United States Patent Application Publication US 2026/0226133 A1, published August 6, 2026 (application 19/145,170).

The application's sequence listing, which the Patent Office published only in electronic form, follows.

SEQUENCE LISTING (50558 sequences)

SEQ ID NO: 1 - DNA, 7440 bp, synthetic construct
  source 1..7440: mol_type = other DNA
aatgtagtcttatgcaatactcttgtagtcttgcaacatggtaacgatgagttagcaacatgccttacaaggagagaaaaagcaccgtgcatgccgattggtggaagtaaggtggtacgatcgtgccttattaggaaggcaacagacgggtctgacatggattggacgaaccactgaattgccgcattgcagagatattgtatttaagtgcctagctcgatacataaacgggtctctctggttagaccagatctgagcctgggagctctctggctaactagggaacccactgcttaagcctcaataaagcttgccttgagtgcttcaagtagtgtgtgcccgtctgttgtgtgactctggtaactagagatccctcagacccttttagtcagtgtggaaaatctctagcagtggcgcccgaacagggacttgaaagcgaaagggaaaccagaggagctctctcgacgcaggactcggcttgctgaagcgcgcacggcaagaggcgaggggcggcgactggtgagtacgccaaaaattttgactagcggaggctagaaggagagagatgggtgcgagagcgtcagtattaagcgggggagaattagatcgcgatgggaaaaaattcggttaaggccagggggaaagaaaaaatataaattaaaacatatagtatgggcaagcagggagctagaacgattcgcagttaatcctggcctgttagaaacatcagaaggctgtagacaaatactgggacagctacaaccatcccttcagacaggatcagaagaacttagatcattatataatacagtagcaaccctctattgtgtgcatcaaaggatagagataaaagacaccaaggaagctttagacaagatagaggaagagcaaaacaaaagtaagaccaccgcacagcaagcggccgctgatcttcagacctggaggaggagatatgagggacaattggagaagtgaattatataaatataaagtagtaaaaattgaaccattaggagtagcacccaccaaggcaaagagaagagtggtgcagagagaaaaaagagcagtgggaataggagctttgttccttgggttcttgggagcagcaggaagcactatgggcgcagcgtcaatgacgctgacggtacaggccagacaattattgtctggtatagtgcagcagcagaacaatttgctgagggctattgaggcgcaacagcatctgttgcaactcacagtctggggcatcaagcagctccaggcaagaatcctggctgtggaaagatacctaaaggatcaacagctcctggggatttggggttgctctggaaaactcatttgcaccactgctgtgccttggaatgctagttggagtaataaatctctggaacagatttggaatcacacgacctggatggagtgggacagagaaattaacaattacacaagcttaatacactccttaattgaagaatcgcaaaaccagcaagaaaagaatgaacaagaattattggaattagataaatgggcaagtttgtggaattggtttaacataacaaattggctgtggtatataaaattattcataatgatagtaggaggcttggtaggtttaagaatagtttttgctgtactttctatagtgaatagagttaggcagggatattcaccattatcgtttcagacccacctcccaaccccgaggggacccgacaggcccgaaggaatagaagaagaaggtggagagagagacagagacagatccattcgattagtgaacggatctcgacggtatcggttaacttttaaaagaaaaggggggattggggggtacagtgcaggggaaagaatagtagacataatagcaacagacatacaaactaaagaattacaaaaacaaattacaaaattcaaaattttatcgataagctttgcaaagatggataaagttttaaacagagaggaatctttgcagctaatggaccttctaggtcttgaaaggagtgcctcgtgaggctccggtgcccgtcagtgggcagagcgcacatcgcccacagtccccgagaagttggggggaggggtcggcaattgaaccggtgcctagagaaggtggcgcggggtaaactgggaaagtgatgtcgtgtactggctccgcctttttcccgagggtgggggagaaccgtatataagtgcagtagtcgccgtgaacgttctttttcgcaacgggtttgccgccagaacacaggtaagtgccgtgtgtggttcccgcgggcctggcctctttacgggttatggcccttgcgtgccttgaattacttccacctggctgcagtacgtgattcttgatcccgagcttcgggttggaagtgggtgggagagttcgaggccttgcgcttaaggagccccttcgcctcgtgcttgagttgaggcctggcctgggcgctggggccgccgcgtgcgaatctggtggcaccttcgcgcctgtctcgctgctttcgataagtctctagccatttaaaatttttgatgacctgctgcgacgctttttttctggcaagatagtcttgtaaatgcgggccaagatctgcacactggtatttcggtttttggggccgcgggcggcgacggggcccgtgcgtcccagcgcacatgttcggcgaggcggggcctgcgagcgcggccaccgagaatcggacgggggtagtctcaagctggccggcctgctctggtgcctggcctcgcgccgccgtgtatcgccccgccctgggcggcaaggctggcccggtcggcaccagttgcgtgagcggaaagatggccgcttcccggccctgctgcagggagctcaaaatggaggacgcggcgctcgggagagcgggcgggtgagtcacccacacaaaggaaaagggcctttccgtcctcagccgtcgcttcatgtgactccacggagtaccgggcgccgtccaggcacctcgattagttctcgaccttttggagtacgtcgtctttaggttggggggaggggttttatgcgatggagtttccccacactgagtgggtggagactgaagttaggccagcttggcacttgatgtaattctccttggaatttgccctttttgagtttggatcttggttcattctcaagcctcagacagtggttcaaagtttttttcttccatttcaggtgtcgtgaggaattagcttggtactaatacgactcactatagggagacccaagctggctaggtaagcttgatatcgaattcctgcagcccgggggatctgctagcgtcgactccggatgatcagggccctgtacagatatcgacaatcaacctctggattacaaaatttgtgaaagattgactggtattcttaactatgttgctccttttacgctatgtggatacgctgctttaatgcctttgtatcatgctattgcttcccgtatggctttcattttctcctccttgtataaatcctggttgctgtctctttatgaggagttgtggcccgttgtcaggcaacgtggcgtggtgtgcactgtgtttgctgacgcaacccccactggttggggcattgccaccacctgtcagctcctttccgggactttcgctttccccctccctattgccacggcggaactcatcgccgcctgccttgcccgctgctggacaggggctcggctgttgggcactgacaattccgtggtgttgtcggggaagctgacgtcctttccatggctgctcgcctgtgttgccacctggattctgcgcgggacgtccttctgctacgtcccttcggccctcaatccagcggaccttccttcccgcggcctgctgccggctctgcggcctcttccgcgtcttcgccttcgccctcagacgagtcggatctccctttgggccgcctccccgcctggaattcgagctcggtacctttaagaccaatgacttacaaggcagctgtagatcttagccactttttaaaagaaaaggggggactggaagggctaattcactcccaacgaagacaagatctgctttttgcttgtactgggtctctctggttagaccagatctgagcctgggagctctctggctaactagggaacccactgcttaagcctcaataaagcttgccttgagtgcttcaagtagtgtgtgcccgtctgttgtgtgactctggtaactagagatccctcagacccttttagtcagtgtggaaaatctctagcagtagtagttcatgtcatcttattattcagtatttataacttgcaaagaaatgaatatcagagagtgagaggaacttgtttattgcagcttataatggttacaaataaagcaatagcatcacaaatttcacaaataaagcatttttttcactgcattctagttgtggtttgtccaaactcatcaatgtatcttatcatgtctggctctagctatcccgcccctaactccgcccatcccgcccctaactccgcccagttccgcccattctccgccccatggctgactaattttttttatttatgcagaggccgaggccgcctcggcctctgagctattccagaagtagtgaggaggcttttttggaggcctagggacgtacccaattcgccctatagtgagtcgtattacgcgcgctcactggccgtcgttttacaacgtcgtgactgggaaaaccctggcgttacccaacttaatcgccttgcagcacatccccctttcgccagctggcgtaatagcgaagaggcccgcaccgatcgcccttcccaacagttgcgcagcctgaatggcgaatgggacgcgccctgtagcggcgcattaagcgcggcgggtgtggtggttacgcgcagcgtgaccgctacacttgccagcgccctagcgcccgctcctttcgctttcttcccttcctttctcgccacgttcgccggctttccccgtcaagctctaaatcgggggctccctttagggttccgatttagtgctttacggcacctcgaccccaaaaaacttgattagggtgatggttcacgtagtgggccatcgccctgatagacggtttttcgccctttgacgttggagtccacgttctttaatagtggactcttgttccaaactggaacaacactcaaccctatctcggtctattcttttgatttataagggattttgccgatttcggcctattggttaaaaaatgagctgatttaacaaaaatttaacgcgaattttaacaaaatattaacgcttacaatttaggtggcacttttcggggaaatgtgcgcggaacccctatttgtttatttttctaaatacattcaaatatgtatccgctcatgagacaataaccctgataaatgcttcaataatattgaaaaaggaagagtatgagtattcaacatttccgtgtcgcccttattcccttttttgcggcattttgccttcctgtttttgctcacccagaaacgctggtgaaagtaaaagatgctgaagatcagttgggtgcacgagtgggttacatcgaactggatctcaacagcggtaagatccttgagagttttcgccccgaagaacgttttccaatgatgagcacttttaaagttctgctatgtggcgcggtattatcccgtattgacgccgggcaagagcaactcggtcgccgcatacactattctcagaatgacttggttgagtactcaccagtcacagaaaagcatcttacggatggcatgacagtaagagaattatgcagtgctgccataaccatgagtgataacactgcggccaacttacttctgacaacgatcggaggaccgaaggagctaaccgcttttttgcacaacatgggggatcatgtaactcgccttgatcgttgggaaccggagctgaatgaagccataccaaacgacgagcgtgacaccacgatgcctgtagcaatggcaacaacgttgcgcaaactattaactggcgaactacttactctagcttcccggcaacaattaatagactggatggaggcggataaagttgcaggaccacttctgcgctcggcccttccggctggctggtttattgctgataaatctggagccggtgagcgtgggtctcgcggtatcattgcagcactggggccagatggtaagccctcccgtatcgtagttatctacacgacggggagtcaggcaactatggatgaacgaaatagacagatcgctgagataggtgcctcactgattaagcattggtaactgtcagaccaagtttactcatatatactttagattgatttaaaacttcatttttaatttaaaaggatctaggtgaagatcctttttgataatctcatgaccaaaatcccttaacgtgagttttcgttccactgagcgtcagaccccgtagaaaagatcaaaggatcttcttgagatcctttttttctgcgcgtaatctgctgcttgcaaacaaaaaaaccaccgctaccagcggtggtttgtttgccggatcaagagctaccaactctttttccgaaggtaactggcttcagcagagcgcagataccaaatactgttcttctagtgtagccgtagttaggccaccacttcaagaactctgtagcaccgcctacatacctcgctctgctaatcctgttaccagtggctgctgccagtggcgataagtcgtgtcttaccgggttggactcaagacgatagttaccggataaggcgcagcggtcgggctgaacggggggttcgtgcacacagcccagcttggagcgaacgacctacaccgaactgagatacctacagcgtgagctatgagaaagcgccacgcttcccgaagggagaaaggcggacaggtatccggtaagcggcagggtcggaacaggagagcgcacgagggagcttccagggggaaacgcctggtatctttatagtcctgtcgggtttcgccacctctgacttgagcgtcgatttttgtgatgctcgtcaggggggcggagcctatggaaaaacgccagcaacgcggcctttttacggttcctggccttttgctggccttttgctcacatgttctttcctgcgttatcccctgattctgtggataaccgtattaccgcctttgagtgagctgataccgctcgccgcagccgaacgaccgagcgcagcgagtcagtgagcgaggaagcggaagagcgcccaatacgcaaaccgcctctccccgcgcgttggccgattcattaatgcagctggcacgacaggtttcccgactggaaagcgggcagtgagcgcaacgcaattaatgtgagttagctcactcattaggcaccccaggctttacactttatgcttccggctcgtatgttgtgtggaattgtgagcggataacaatttcacacaggaaacagctatgaccatgattacgccaagcgcgc

SEQ ID NO: 2 - DNA, 6840 bp, synthetic construct
  source 1..6840: mol_type = other DNA
aatgtagtcttatgcaatactcttgtagtcttgcaacatggtaacgatgagttagcaacatgccttacaaggagagaaaaagcaccgtgcatgccgattggtggaagtaaggtggtacgatcgtgccttattaggaaggcaacagacgggtctgacatggattggacgaaccactgaattgccgcattgcagagatattgtatttaagtgcctagctcgatacataaacgggtctctctggttagaccagatctgagcctgggagctctctggctaactagggaacccactgcttaagcctcaataaagcttgccttgagtgcttcaagtagtgtgtgcccgtctgttgtgtgactctggtaactagagatccctcagacccttttagtcagtgtggaaaatctctagcagtggcgcccgaacagggacttgaaagcgaaagggaaaccagaggagctctctcgacgcaggactcggcttgctgaagcgcgcacggcaagaggcgaggggcggcgactggtgagtacgccaaaaattttgactagcggaggctagaaggagagagatgggtgcgagagcgtcagtattaagcgggggagaattagatcgcgatgggaaaaaattcggttaaggccagggggaaagaaaaaatataaattaaaacatatagtatgggcaagcagggagctagaacgattcgcagttaatcctggcctgttagaaacatcagaaggctgtagacaaatactgggacagctacaaccatcccttcagacaggatcagaagaacttagatcattatataatacagtagcaaccctctattgtgtgcatcaaaggatagagataaaagacaccaaggaagctttagacaagatagaggaagagcaaaacaaaagtaagaccaccgcacagcaagcggccgctgatcttcagacctggaggaggagatatgagggacaattggagaagtgaattatataaatataaagtagtaaaaattgaaccattaggagtagcacccaccaaggcaaagagaagagtggtgcagagagaaaaaagagcagtgggaataggagctttgttccttgggttcttgggagcagcaggaagcactatgggcgcagcgtcaatgacgctgacggtacaggccagacaattattgtctggtatagtgcagcagcagaacaatttgctgagggctattgaggcgcaacagcatctgttgcaactcacagtctggggcatcaagcagctccaggcaagaatcctggctgtggaaagatacctaaaggatcaacagctcctggggatttggggttgctctggaaaactcatttgcaccactgctgtgccttggaatgctagttggagtaataaatctctggaacagatttggaatcacacgacctggatggagtgggacagagaaattaacaattacacaagcttaatacactccttaattgaagaatcgcaaaaccagcaagaaaagaatgaacaagaattattggaattagataaatgggcaagtttgtggaattggtttaacataacaaattggctgtggtatataaaattattcataatgatagtaggaggcttggtaggtttaagaatagtttttgctgtactttctatagtgaatagagttaggcagggatattcaccattatcgtttcagacccacctcccaaccccgaggggacccgacaggcccgaaggaatagaagaagaaggtggagagagagacagagacagatccattcgattagtgaacggatctcgacggtatcggttaacttttaaaagaaaaggggggattggggggtacagtgcaggggaaagaatagtagacataatagcaacagacatacaaactaaagaattacaaaaacaaattacaaaattcaaaattttatcgataagctttgcaaagatggataaagttttaaacagagaggaatctttgcagctaatggaccttctaggtcttgaaaggagtgcctcgtgaggctccggtgcccgtcagtgggcagagcgcacatcgcccacagtccccgagaagttggggggaggggtcggcaattgaaccggtgcctagagaaggtggcgcggggtaaactgggaaagtgatgtcgtgtactggctccgcctttttcccgagggtgggggagaaccgtatataagtgcagtagtcgccgtgaacgttctttttcgcaacgggtttgccgccagaacacaggtaagtgccgtgtgtggttcccgcgggcctggcctctttacgggttatggcccttgcgtgccttgaattacttccacctggctgcagtacgtgattcttgatcccgagcttcgggttggaagtgggtgggagagttcgaggccttgcgcttaaggagccccttcgcctcgtgcttgagttgaggcctggcctgggcgctggggccgccgcgtgcgaatctggtggcaccttcgcgcctgtctcgctgctttcgataagtctctagccatttaaaatttttgatgacctgctgcgacgctttttttctggcaagatagtcttgtaaatgcgggccaagatctgcacactggtatttcggtttttggggccgcgggcggcgacggggcccgtgcgtcccagcgcacatgttcggcgaggcggggcctgcgagcgcggccaccgagaatcggacgggggtagtctcaagctggccggcctgctctggtgcctggcctcgcgccgccgtgtatcgccccgccctgggcggcaaggctggcccggtcggcaccagttgcgtgagcggaaagatggccgcttcccggccctgctgcagggagctcaaaatggaggacgcggcgctcgggagagcgggcgggtgagtcacccacacaaaggaaaagggcctttccgtcctcagccgtcgcttcatgtgactccacggagtaccgggcgccgtccaggcacctcgattagttctcgaccttttggagtacgtcgtctttaggttggggggaggggttttatgcgatggagtttccccacactgagtgggtggagactgaagttaggccagcttggcacttgatgtaattctccttggaatttgccctttttgagtttggatcttggttcattctcaagcctcagacagtggttcaaagtttttttcttccatttcaggtgtcgtgaggaattagcttggtactaatacgactcactatagggagacccaagctggctaggtaagcttgatatcgaattcctgcagcccgggggatctgctagcgtcgacggcgaatccggactatagtgtcacctaaatgctagacgtacctttaagaccaatgacttacaaggcagctgtagatcttagccactttttaaaagaaaaggggggactggaagggctaattcactcccaacgaagacaagatctgctttttgcttgtactgggtctctctggttagaccagatctgagcctgggagctctctggctaactagggaacccactgcttaagcctcaataaagcttgccttgagtgcttcaagtagtgtgtgcccgtctgttgtgtgactctggtaactagagatccctcagacccttttagtcagtgtggaaaatctctagcagtagtagttcatgtcatcttattattcagtatttataacttgcaaagaaatgaatatcagagagtgagaggaacttgtttattgcagcttataatggttacaaataaagcaatagcatcacaaatttcacaaataaagcatttttttcactgcattctagttgtggtttgtccaaactcatcaatgtatcttatcatgtctggctctagctatcccgcccctaactccgcccatcccgcccctaactccgcccagttccgcccattctccgccccatggctgactaattttttttatttatgcagaggccgaggccgcctcggcctctgagctattccagaagtagtgaggaggcttttttggaggcctagggacgtacccaattcgccctatagtgagtcgtattacgcgcgctcactggccgtcgttttacaacgtcgtgactgggaaaaccctggcgttacccaacttaatcgccttgcagcacatccccctttcgccagctggcgtaatagcgaagaggcccgcaccgatcgcccttcccaacagttgcgcagcctgaatggcgaatgggacgcgccctgtagcggcgcattaagcgcggcgggtgtggtggttacgcgcagcgtgaccgctacacttgccagcgccctagcgcccgctcctttcgctttcttcccttcctttctcgccacgttcgccggctttccccgtcaagctctaaatcgggggctccctttagggttccgatttagtgctttacggcacctcgaccccaaaaaacttgattagggtgatggttcacgtagtgggccatcgccctgatagacggtttttcgccctttgacgttggagtccacgttctttaatagtggactcttgttccaaactggaacaacactcaaccctatctcggtctattcttttgatttataagggattttgccgatttcggcctattggttaaaaaatgagctgatttaacaaaaatttaacgcgaattttaacaaaatattaacgcttacaatttaggtggcacttttcggggaaatgtgcgcggaacccctatttgtttatttttctaaatacattcaaatatgtatccgctcatgagacaataaccctgataaatgcttcaataatattgaaaaaggaagagtatgagtattcaacatttccgtgtcgcccttattcccttttttgcggcattttgccttcctgtttttgctcacccagaaacgctggtgaaagtaaaagatgctgaagatcagttgggtgcacgagtgggttacatcgaactggatctcaacagcggtaagatccttgagagttttcgccccgaagaacgttttccaatgatgagcacttttaaagttctgctatgtggcgcggtattatcccgtattgacgccgggcaagagcaactcggtcgccgcatacactattctcagaatgacttggttgagtactcaccagtcacagaaaagcatcttacggatggcatgacagtaagagaattatgcagtgctgccataaccatgagtgataacactgcggccaacttacttctgacaacgatcggaggaccgaaggagctaaccgcttttttgcacaacatgggggatcatgtaactcgccttgatcgttgggaaccggagctgaatgaagccataccaaacgacgagcgtgacaccacgatgcctgtagcaatggcaacaacgttgcgcaaactattaactggcgaactacttactctagcttcccggcaacaattaatagactggatggaggcggataaagttgcaggaccacttctgcgctcggcccttccggctggctggtttattgctgataaatctggagccggtgagcgtgggtctcgcggtatcattgcagcactggggccagatggtaagccctcccgtatcgtagttatctacacgacggggagtcaggcaactatggatgaacgaaatagacagatcgctgagataggtgcctcactgattaagcattggtaactgtcagaccaagtttactcatatatactttagattgatttaaaacttcatttttaatttaaaaggatctaggtgaagatcctttttgataatctcatgaccaaaatcccttaacgtgagttttcgttccactgagcgtcagaccccgtagaaaagatcaaaggatcttcttgagatcctttttttctgcgcgtaatctgctgcttgcaaacaaaaaaaccaccgctaccagcggtggtttgtttgccggatcaagagctaccaactctttttccgaaggtaactggcttcagcagagcgcagataccaaatactgttcttctagtgtagccgtagttaggccaccacttcaagaactctgtagcaccgcctacatacctcgctctgctaatcctgttaccagtggctgctgccagtggcgataagtcgtgtcttaccgggttggactcaagacgatagttaccggataaggcgcagcggtcgggctgaacggggggttcgtgcacacagcccagcttggagcgaacgacctacaccgaactgagatacctacagcgtgagctatgagaaagcgccacgcttcccgaagggagaaaggcggacaggtatccggtaagcggcagggtcggaacaggagagcgcacgagggagcttccagggggaaacgcctggtatctttatagtcctgtcgggtttcgccacctctgacttgagcgtcgatttttgtgatgctcgtcaggggggcggagcctatggaaaaacgccagcaacgcggcctttttacggttcctggccttttgctggccttttgctcacatgttctttcctgcgttatcccctgattctgtggataaccgtattaccgcctttgagtgagctgataccgctcgccgcagccgaacgaccgagcgcagcgagtcagtgagcgaggaagcggaagagcgcccaatacgcaaaccgcctctccccgcgcgttggccgattcattaatgcagctggcacgacaggtttcccgactggaaagcgggcagtgagcgcaacgcaattaatgtgagttagctcactcattaggcaccccaggctttacactttatgcttccggctcgtatgttgtgtggaattgtgagcggataacaatttcacacaggaaacagctatgaccatgattacgccaagcgcgca

SEQ ID NO: 3 - DNA, 5150 bp, synthetic construct
  source 1..5150: mol_type = other DNA
tgaaagaccccacctgtaggtttggcaagctagcttaagtaacgccattttgcaaggcatggaaaatacataactgagaatagagaagttcagatcaaggttaggaacagagagacagcagaatatgggccaaacaggatatctgtggtaagcagttcctgccccggctcagggccaagaacagatggtccccagatgcggtcccgccctcagcagtttctagagaaccatcagatgtttccagggtgccccaaggacctgaaatgaccctgtgccttatttgaactaaccaatcagttcgcttctcgcttctgttcgcgcgcttctgctccccgagctcaataaaagagcccacaacccctcactcggcgcgccagtcctccgatagactgcgtcgcccgggtacccgtattcccaataaagcctcttgctgtttgcatccgaatcgtggactcgctgatccttgggagggtctcctcagattgattgactgcccacctcgggggtctttcatttggaggttccaccgagatttggagacccctgcccagggaccaccgacccccccgccgggaggtaagctggccagcggtcgtttcgtgtctgtctctgtctttgtgcgtgtttgtgccggcatctaatgtttgcgcctgcgtctgtactagttagctaactagctctgtatctggcggacccgtggtggaactgacgagttctgaacacccggccgcaaccctgggagacgtcccagggactttgggggccgtttttgtggcccgacctgaggaagggagtcgatgtggaatccgaccccgtcaggatatgtggttctggtaggagacgagaacctaaaacagttcccgcctccgtctgaatttttgctttcggtttggaaccgaagccgcgcgtcttgtctgctgcagcgctgcagcatcgttctgtgttgtctctgtctgactgtgtttctgtatttgtctgaaaattagggccagactgttaccactcccttaagtttgaccttaggtcactggaaagatgtcgagcggatcgctcacaaccagtcggtagatgtcaagaagagacgttgggttaccttctgctctgcagaatggccaacctttaacgtcggatggccgcgagacggcacctttaaccgagacctcatcacccaggttaagatcaaggtcttttcacctggcccgcatggacacccagaccaggtcccctacatcgtgacctgggaagccttggcttttgacccccctccctgggtcaagccctttgtacaccctaagcctccgcctcctcttcctccatccgccccgtctctcccccttgaacctcctcgttcgaccccgcctcgatcctccctttatccagccctcactccttctctaggcgccggaattagatctcctaggatccaagaattcggctcgagttcgaagggacgcgtaatgtcgacatcgataaaataaaagattttatttagtctccagaaaaaggggggaatgaaagaccccacctgtaggtttggcaagctagcttaagtaacgccattttgcaaggcatggaaaatacataactgagaatagagaagttcagatcaaggttaggaacagagagacagcagaatatgggccaaacaggatatctgtggtaagcagttcctgccccggctcagggccaagaacagatggtccccagatgcggtcccgccctcagcagtttctagagaaccatcagatgtttccagggtgccccaaggacctgaaatgaccctgtgccttatttgaactaaccaatcagttcgcttctcgcttctgttcgcgcgcttctgctccccgagctcaataaaagagcccacaacccctcactcggcgcgccagtcctccgatagactgcgtcgcccgggtacccgtgtatccaataaaccctcttgcagttgcatccgacttgtggtctcgctgttccttgggagggtctcctctgagtgattgactacccgtcagcgggggtctttcatgggtaacagtttcttgaagttggagaacaacattctgagggtaggagtcgaatattaagtaatcctgactcaattagccactgttttgaatccacatactccaatactcctgaaatagttcattatggacagcgcagaagagctggggagaattaattcgtaatcatggtcatagctgtttcctgtgtgaaattgttatccgctcacaattccacacaacatacgagccggaagcataaagtgtaaagcctggggtgcctaatgagtgagctaactcacattaattgcgttgcgctcactgcccgctttccagtcgggaaacctgtcgtgccagctgcattaatgaatcggccaacgcgcggggagaggcggtttgcgtattgggcgctcttccgcttcctcgctcactgactcgctgcgctcggtcgttcggctgcggcgagcggtatcagctcactcaaaggcggtaatacggttatccacagaatcaggggataacgcaggaaagaacatgtgagcaaaaggccagcaaaaggccaggaaccgtaaaaaggccgcgttgctggcgtttttccataggctccgcccccctgacgagcatcacaaaaatcgacgctcaagtcagaggtggcgaaacccgacaggactataaagataccaggcgtttccccctggaagctccctcgtgcgctctcctgttccgaccctgccgcttaccggatacctgtccgcctttctcccttcgggaagcgtggcgctttctcatagctcacgctgtaggtatctcagttcggtgtaggtcgttcgctccaagctgggctgtgtgcacgaaccccccgttcagcccgaccgctgcgccttatccggtaactatcgtcttgagtccaacccggtaagacacgacttatcgccactggcagcagccactggtaacaggattagcagagcgaggtatgtaggcggtgctacagagttcttgaagtggtggcctaactacggctacactagaaggacagtatttggtatctgcgctctgctgaagccagttaccttcggaaaaagagttggtagctcttgatccggcaaacaaaccaccgctggtagcggtggtttttttgtttgcaagcagcagattacgcgcagaaaaaaaggatctcaagaagatcctttgatcttttctacggggtctgacgctcagtggaacgaaaactcacgttaagggattttggtcatgagattatcaaaaaggatcttcacctagatccttttaaattaaaaatgaagttttaaatcaatctaaagtatatatgagtaaacttggtctgacagttaccaatgcttaatcagtgaggcacctatctcagcgatctgtctatttcgttcatccatagttgcctgactccccgtcgtgtagataactacgatacgggagggcttaccatctggccccagtgctgcaatgataccgcgagacccacgctcaccggctccagatttatcagcaataaaccagccagccggaagggccgagcgcagaagtggtcctgcaactttatccgcctccatccagtctattaattgttgccgggaagctagagtaagtagttcgccagttaatagtttgcgcaacgttgttgccattgctacaggcatcgtggtgtcacgctcgtcgtttggtatggcttcattcagctccggttcccaacgatcaaggcgagttacatgatcccccatgttgtgcaaaaaagcggttagctccttcggtcctccgatcgttgtcagaagtaagttggccgcagtgttatcactcatggttatggcagcactgcataattctcttactgtcatgccatccgtaagatgcttttctgtgactggtgagtactcaaccaagtcattctgagaatagtgtatgcggcgaccgagttgctcttgcccggcgtcaatacgggataataccgcgccacatagcagaactttaaaagtgctcatcattggaaaacgttcttcggggcgaaaactctcaaggatcttaccgctgttgagatccagttcgatgtaacccactcgtgcacccaactgatcttcagcatcttttactttcaccagcgtttctgggtgagcaaaaacaggaaggcaaaatgccgcaaaaaagggaataagggcgacacggaaatgttgaatactcatactcttcctttttcaatattattgaagcatttatcagggttattgtctcatgagcggatacatatttgaatgtatttagaaaaataaacaaataggggttccgcgcacatttccccgaaaagtgccacctgacgtctaagaaaccattattatcatgacattaacctataaaaataggcgtatcacgaggccctttcgtctcgcgcgtttcggtgatgacggtgaaaacctctgacacatgcagctcccggagacggtcacagcttgtctgtaagcggatgccgggagcagacaagcccgtcagggcgcgtcagcgggtgttggcgggtgtcggggctggcttaactatgcggcatcagagcagattgtactgagagtgcaccatatgcggtgtgaaataccgcacagatgcgtaaggagaaaataccgcatcaggcgccattcgccattcaggctgcgcaactgttgggaagggcgatcggtgcgggcctcttcgctattacgccagctggcgaaagggggatgtgctgcaaggcgattaagttgggtaacgccagggttttcccagtcacgacgttgtaaaacgacggcgcaaggaatggtgcatgcaaggagatggcgcccaacagtcccccggccacggggcctgccaccatacccacgccgaaacaagcgctcatgagcccgaagtggcgagcccgatcttccccatcggtgatgtcggcgatataggcgccagcaaccgcacctgtggcgccggtgatgccggccacgatgcgtccggcgtagaggcgattagtccaatttgttaaagacaggatatcagtggtccaggctctagttttgactcaacaatatcaccagctgaagcctatagagtacgagccatagataaaataaaagattttatttagtctccagaaaaaggggggaa

SEQ ID NO: 4 - DNA, 7172 bp, synthetic construct
  source 1..7172: mol_type = other DNA
cccgactggaaagcgggcagtgagcgcaacgcaattaatgtgagttagctcactcattaggcaccccaggctttacactttatgcttccggctcgtatgttgtgtggaattgtgagcggataacaatttcacacaggaaacagctatgaccatgattacgccaagcgcgcaattaaccctcactaaagggaacaaaagctggagctgcaagcttggccattgcatacgttgtatccatatcataatatgtacatttatattggctcatgtccaacattaccgccatgttgacattgattattgactagttattaatagtaatcaattacggggtcattagttcatagcccatatatggagttccgcgttacataacttacggtaaatggcccgcctggctgaccgcccaacgacccccgcccattgacgtcaataatgacgtatgttcccatagtaacgccaatagggactttccattgacgtcaatgggtggagtatttacggtaaactgcccacttggcagtacatcaagtgtatcatatgccaagtacgccccctattgacgtcaatgacggtaaatggcccgcctggcattatgcccagtacatgaccttatgggactttcctacttggcagtacatctacgtattagtcatcgctattaccatggtgatgcggttttggcagtacatcaatgggcgtggatagcggtttgactcacggggatttccaagtctccaccccattgacgtcaatgggagtttgttttggcaccaaaatcaacgggactttccaaaatgtcgtaacaactccgccccattgacgcaaatgggcggtaggcgtgtacggtgggaggtctatataagcagagctcgtttagtgaaccggggtctctctggttagaccagatctgagcctgggagctctctggctaactagggaacccactgcttaagcctcaataaagcttgccttgagtgcttcaagtagtgtgtgcccgtctgttgtgtgactctggtaactagagatccctcagacccttttagtcagtgtggaaaatctctagcagtggcgcccgaacagggacttgaaagcgaaagggaaaccagaggagctctctcgacgcaggactcggcttgctgaagcgcgcacggcaagaggcgaggggcggcgactggtgagtacgccaaaaattttgactagcggaggctagaaggagagagatgggtgcgagagcgtcagtattaagcgggggagaattagatcgcgatgggaaaaaattcggttaaggccagggggaaagaaaaaatataaattaaaacatatagtatgggcaagcagggagctagaacgattcgcagttaatcctggcctgttagaaacatcagaaggctgtagacaaatactgggacagctacaaccatcccttcagacaggatcagaagaacttagatcattatataatacagtagcaaccctctattgtgtgcatcaaaggatagagataaaagacaccaaggaagctttagacaagatagaggaagagcaaaacaaaagtaagaccaccgcacagcaagcggccgctgatcttcagacctggaggaggagatatgagggacaattggagaagtgaattatataaatataaagtagtaaaaattgaaccattaggagtagcacccaccaaggcaaagagaagagtggtgcagagagaaaaaagagcagtgggaataggagctttgttccttgggttcttgggagcagcaggaagcactatgggcgcagcgtcaatgacgctgacggtacaggccagacaattattgtctggtatagtgcagcagcagaacaatttgctgagggctattgaggcgcaacagcatctgttgcaactcacagtctggggcatcaagcagctccaggcaagaatcctggctgtggaaagatacctaaaggatcaacagctcctggggatttggggttgctctggaaaactcatttgcaccactgctgtgccttggaatgctagttggagtaataaatctctggaacagatttggaatcacacgacctggatggagtgggacagagaaattaacaattacacaagcttaatacactccttaattgaagaatcgcaaaaccagcaagaaaagaatgaacaagaattattggaattagataaatgggcaagtttgtggaattggtttaacataacaaattggctgtggtatataaaattattcataatgatagtaggaggcttggtaggtttaagaatagtttttgctgtactttctatagtgaatagagttaggcagggatattcaccattatcgtttcagacccacctcccaaccccgaggggacccgacaggcccgaaggaatagaagaagaaggtggagagagagacagagacagatccattcgattagtgaacggatctcgacggtatcgataagctaattcacaaatggcagtattcatccacaattttaaaagaaaaggggggattggggggtacagtgcaggggaaagaatagtagacataatagcaacagacatacaaactaaagaattacaaaaacaaattacaaaaattcaaaattttcgggtttattacagggacagcagagatccagtttgggaattagcttgatcgattagtccaatttgttaaagacaggatatcagtggtccaggctctagttttgactcaacaatatcaccagctgaagcctatagagtacgagccatagatagaataaaagattttatttagtctccagaaaaaggggggaatgaaagaccccacctgtaggtttggcaagctaggatcaaggttaggaacagagagacagcagaatatgggccaaacaggatatctgtggtaagcagttcctgccccggctcagggccaagaacagttggaacagcagaatatgggccaaacaggatatctgtggtaagcagttcctgccccggctcagggccaagaacagatggtccccagatgcggtcccgccctcagcagtttctagagaaccatcagatgtttccagggtgccccaaggacctgaaatgaccctgtgccttatttgaactaaccaatcagttcgcttctcgcttctgttcgcgcgcttctgctccccgagctcaataaaagagcccacaacccctcactcggcgcgatctagatctcgaatcgaattcgtcgactgatccgataatcaacctctggattacaaaatttgtgaaagattgactggtattcttaactatgttgctccttttacgctatgtggatacgctgctttaatgcctttgtatcatgctattgcttcccgtatggctttcattttctcctccttgtataaatcctggttgctgtctctttatgaggagttgtggcccgttgtcaggcaacgtggcgtggtgtgcactgtgtttgctgacgcaacccccactggttggggcattgccaccacctgtcagctcctttccgggactttcgctttccccctccctattgccacggcggaactcatcgccgcctgccttgcccgctgctggacaggggctcggctgttgggcactgacaattccgtggtgttgtcggggaaatcatcgtcctttccttggctgctcgcctgtgttgccacctggattctgcgcgggacgtccttctgctacgtcccttcggccctcaatccagcggaccttccttcccgcggcctgctgccggctctgcggcctcttccgcgtcttcgccttcgccctcagacgagtcggatctccctttgggccgcctccccgcatcggatcaaattcgagctcggtacctttaagaccaatgacttacaaggcagctgtagatcttagccactttttaaaagaaaaggggggactggaagggctaattcactcccaacgaagacaagatctgctttttgcttgtactgggtctctctggttagaccagatctgagcctgggagctctctggctaactagggaacccactgcttaagcctcaataaagcttgccttgagtgcttcaagtagtgtgtgcccgtctgttgtgtgactctggtaactagagatccctcagacccttttagtcagtgtggaaaatctctagcagtagtagttcatgtcatcttattattcagtatttataacttgcaaagaaatgaatatcagagagtgagaggaacttgtttattgcagcttataatggttacaaataaagcaatagcatcacaaatttcacaaataaagcatttttttcactgcattctagttgtggtttgtccaaactcatcaatgtatcttatcatgtctggctctagctatcccgcccctaactccgcccatcccgcccctaactccgcccagttccgcccattctccgccccatggctgactaattttttttatttatgcagaggccgaggccgcctcggcctctgagctattccagaagtagtgaggaggcttttttggaggcctagggacgtacccaattcgccctatagtgagtcgtattacgcgcgctcactggccgtcgttttacaacgtcgtgactgggaaaaccctggcgttacccaacttaatcgccttgcagcacatccccctttcgccagctggcgtaatagcgaagaggcccgcaccgatcgcccttcccaacagttgcgcagcctgaatggcgaatgggacgcgccctgtagcggcgcattaagcgcggcgggtgtggtggttacgcgcagcgtgaccgctacacttgccagcgccctagcgcccgctcctttcgctttcttcccttcctttctcgccacgttcgccggctttccccgtcaagctctaaatcgggggctccctttagggttccgatttagtgctttacggcacctcgaccccaaaaaacttgattagggtgatggttcacgtagtgggccatcgccctgatagacggtttttcgccctttgacgttggagtccacgttctttaatagtggactcttgttccaaactggaacaacactcaaccctatctcggtctattcttttgatttataagggattttgccgatttcggcctattggttaaaaaatgagctgatttaacaaaaatttaacgcgaattttaacaaaatattaacgcttacaatttaggtggcacttttcggggaaatgtgcgcggaacccctatttgtttatttttctaaatacattcaaatatgtatccgctcatgagacaataaccctgataaatgcttcaataatattgaaaaaggaagagtatgagtattcaacatttccgtgtcgcccttattcccttttttgcggcattttgccttcctgtttttgctcacccagaaacgctggtgaaagtaaaagatgctgaagatcagttgggtgcacgagtgggttacatcgaactggatctcaacagcggtaagatccttgagagttttcgccccgaagaacgttttccaatgatgagcacttttaaagttctgctatgtggcgcggtattatcccgtattgacgccgggcaagagcaactcggtcgccgcatacactattctcagaatgacttggttgagtactcaccagtcacagaaaagcatcttacggatggcatgacagtaagagaattatgcagtgctgccataaccatgagtgataacactgcggccaacttacttctgacaacgatcggaggaccgaaggagctaaccgcttttttgcacaacatgggggatcatgtaactcgccttgatcgttgggaaccggagctgaatgaagccataccaaacgacgagcgtgacaccacgatgcctgtagcaatggcaacaacgttgcgcaaactattaactggcgaactacttactctagcttcccggcaacaattaatagactggatggaggcggataaagttgcaggaccacttctgcgctcggcccttccggctggctggtttattgctgataaatctggagccggtgagcgtgggtctcgcggtatcattgcagcactggggccagatggtaagccctcccgtatcgtagttatctacacgacggggagtcaggcaactatggatgaacgaaatagacagatcgctgagataggtgcctcactgattaagcattggtaactgtcagaccaagtttactcatatatactttagattgatttaaaacttcatttttaatttaaaaggatctaggtgaagatcctttttgataatctcatgaccaaaatcccttaacgtgagttttcgttccactgagcgtcagaccccgtagaaaagatcaaaggatcttcttgagatcctttttttctgcgcgtaatctgctgcttgcaaacaaaaaaaccaccgctaccagcggtggtttgtttgccggatcaagagctaccaactctttttccgaaggtaactggcttcagcagagcgcagataccaaatactgttcttctagtgtagccgtagttaggccaccacttcaagaactctgtagcaccgcctacatacctcgctctgctaatcctgttaccagtggctgctgccagtggcgataagtcgtgtcttaccgggttggactcaagacgatagttaccggataaggcgcagcggtcgggctgaacggggggttcgtgcacacagcccagcttggagcgaacgacctacaccgaactgagatacctacagcgtgagctatgagaaagcgccacgcttcccgaagggagaaaggcggacaggtatccggtaagcggcagggtcggaacaggagagcgcacgagggagcttccagggggaaacgcctggtatctttatagtcctgtcgggtttcgccacctctgacttgagcgtcgatttttgtgatgctcgtcaggggggcggagcctatggaaaaacgccagcaacgcggcctttttacggttcctggccttttgctggccttttgctcacatgttctttcctgcgttatcccctgattctgtggataaccgtattaccgcctttgagtgagctgataccgctcgccgcagccgaacgaccgagcgcagcgagtcagtgagcgaggaagcggaagagcgcccaatacgcaaaccgcctctccccgcgcgttggccgattcattaatgcagctggcacgacaggttt

SEQ ID NO: 5 - DNA, 7181 bp, synthetic construct
  source 1..7181: mol_type = other DNA
cccgactggaaagcgggcagtgagcgcaacgcaattaatgtgagttagctcactcattaggcaccccaggctttacactttatgcttccggctcgtatgttgtgtggaattgtgagcggataacaatttcacacaggaaacagctatgaccatgattacgccaagcgcgcaattaaccctcactaaagggaacaaaagctggagctgcaagcttggccattgcatacgttgtatccatatcataatatgtacatttatattggctcatgtccaacattaccgccatgttgacattgattattgactagttattaatagtaatcaattacggggtcattagttcatagcccatatatggagttccgcgttacataacttacggtaaatggcccgcctggctgaccgcccaacgacccccgcccattgacgtcaataatgacgtatgttcccatagtaacgccaatagggactttccattgacgtcaatgggtggagtatttacggtaaactgcccacttggcagtacatcaagtgtatcatatgccaagtacgccccctattgacgtcaatgacggtaaatggcccgcctggcattatgcccagtacatgaccttatgggactttcctacttggcagtacatctacgtattagtcatcgctattaccatggtgatgcggttttggcagtacatcaatgggcgtggatagcggtttgactcacggggatttccaagtctccaccccattgacgtcaatgggagtttgttttggcaccaaaatcaacgggactttccaaaatgtcgtaacaactccgccccattgacgcaaatgggcggtaggcgtgtacggtgggaggtctatataagcagagctcgtttagtgaaccggggtctctctggttagaccagatctgagcctgggagctctctggctaactagggaacccactgcttaagcctcaataaagcttgccttgagtgcttcaagtagtgtgtgcccgtctgttgtgtgactctggtaactagagatccctcagacccttttagtcagtgtggaaaatctctagcagtggcgcccgaacagggacttgaaagcgaaagggaaaccagaggagctctctcgacgcaggactcggcttgctgaagcgcgcacggcaagaggcgaggggcggcgactggtgagtacgccaaaaattttgactagcggaggctagaaggagagagatgggtgcgagagcgtcagtattaagcgggggagaattagatcgcgatgggaaaaaattcggttaaggccagggggaaagaaaaaatataaattaaaacatatagtatgggcaagcagggagctagaacgattcgcagttaatcctggcctgttagaaacatcagaaggctgtagacaaatactgggacagctacaaccatcccttcagacaggatcagaagaacttagatcattatataatacagtagcaaccctctattgtgtgcatcaaaggatagagataaaagacaccaaggaagctttagacaagatagaggaagagcaaaacaaaagtaagaccaccgcacagcaagcggccgctgatcttcagacctggaggaggagatatgagggacaattggagaagtgaattatataaatataaagtagtaaaaattgaaccattaggagtagcacccaccaaggcaaagagaagagtggtgcagagagaaaaaagagcagtgggaataggagctttgttccttgggttcttgggagcagcaggaagcactatgggcgcagcgtcaatgacgctgacggtacaggccagacaattattgtctggtatagtgcagcagcagaacaatttgctgagggctattgaggcgcaacagcatctgttgcaactcacagtctggggcatcaagcagctccaggcaagaatcctggctgtggaaagatacctaaaggatcaacagctcctggggatttggggttgctctggaaaactcatttgcaccactgctgtgccttggaatgctagttggagtaataaatctctggaacagatttggaatcacacgacctggatggagtgggacagagaaattaacaattacacaagcttaatacactccttaattgaagaatcgcaaaaccagcaagaaaagaatgaacaagaattattggaattagataaatgggcaagtttgtggaattggtttaacataacaaattggctgtggtatataaaattattcataatgatagtaggaggcttggtaggtttaagaatagtttttgctgtactttctatagtgaatagagttaggcagggatattcaccattatcgtttcagacccacctcccaaccccgaggggacccgacaggcccgaaggaatagaagaagaaggtggagagagagacagagacagatccattcgattagtgaacggatctcgacggtatcgataagctaattcacaaatggcagtattcatccacaattttaaaagaaaaggggggattggggggtacagtgcaggggaaagaatagtagacataatagcaacagacatacaaactaaagaattacaaaaacaaattacaaaaattcaaaattttcgggtttattacagggacagcagagatccagtttgggaattagcttgatcgattagtccaatttgttaaagacaggatatcagtggtccaggctctagttttgactcaacaatatcaccagctgaagcctatagagtacgagccatagatagaataaaagattttatttagtctccagaaaaaggggggaatgaaagaccccacctgtaggtttggcaagctaggatcaaggttaggaacagagagacagcagaatatgggccaaacaggatatctgtggtaagcagttcctgccccggctcagggccaagaacagttggaacagcagaatatgggccaaacaggatatctgtggtaagcagttcctgccccggctcagggccaagaacagatggtccccagatgcggtcccgccctcagcagtttctagagaaccatcagatgtttccagggtgccccaaggacctgaaatgaccctgtgccttatttgaactaaccaatcagttcgcttctcgcttctgttcgcgcgcttctgctccccgagctcaataaaagagcccacaacccctcactcggcgcgatctagatctcgaatcgaattcgccgctagcgtcgactgatccgataatcaacctctggattacaaaatttgtgaaagattgactggtattcttaactatgttgctccttttacgctatgtggatacgctgctttaatgcctttgtatcatgctattgcttcccgtatggctttcattttctcctccttgtataaatcctggttgctgtctctttatgaggagttgtggcccgttgtcaggcaacgtggcgtggtgtgcactgtgtttgctgacgcaacccccactggttggggcattgccaccacctgtcagctcctttccgggactttcgctttccccctccctattgccacggcggaactcatcgccgcctgccttgcccgctgctggacaggggctcggctgttgggcactgacaattccgtggtgttgtcggggaaatcatcgtcctttccttggctgctcgcctgtgttgccacctggattctgcgcgggacgtccttctgctacgtcccttcggccctcaatccagcggaccttccttcccgcggcctgctgccggctctgcggcctcttccgcgtcttcgccttcgccctcagacgagtcggatctccctttgggccgcctccccgcatcggatcaaattcgagctcggtacctttaagaccaatgacttacaaggcagctgtagatcttagccactttttaaaagaaaaggggggactggaagggctaattcactcccaacgaagacaagatctgctttttgcttgtactgggtctctctggttagaccagatctgagcctgggagctctctggctaactagggaacccactgcttaagcctcaataaagcttgccttgagtgcttcaagtagtgtgtgcccgtctgttgtgtgactctggtaactagagatccctcagacccttttagtcagtgtggaaaatctctagcagtagtagttcatgtcatcttattattcagtatttataacttgcaaagaaatgaatatcagagagtgagaggaacttgtttattgcagcttataatggttacaaataaagcaatagcatcacaaatttcacaaataaagcatttttttcactgcattctagttgtggtttgtccaaactcatcaatgtatcttatcatgtctggctctagctatcccgcccctaactccgcccatcccgcccctaactccgcccagttccgcccattctccgccccatggctgactaattttttttatttatgcagaggccgaggccgcctcggcctctgagctattccagaagtagtgaggaggcttttttggaggcctagggacgtacccaattcgccctatagtgagtcgtattacgcgcgctcactggccgtcgttttacaacgtcgtgactgggaaaaccctggcgttacccaacttaatcgccttgcagcacatccccctttcgccagctggcgtaatagcgaagaggcccgcaccgatcgcccttcccaacagttgcgcagcctgaatggcgaatgggacgcgccctgtagcggcgcattaagcgcggcgggtgtggtggttacgcgcagcgtgaccgctacacttgccagcgccctagcgcccgctcctttcgctttcttcccttcctttctcgccacgttcgccggctttccccgtcaagctctaaatcgggggctccctttagggttccgatttagtgctttacggcacctcgaccccaaaaaacttgattagggtgatggttcacgtagtgggccatcgccctgatagacggtttttcgccctttgacgttggagtccacgttctttaatagtggactcttgttccaaactggaacaacactcaaccctatctcggtctattcttttgatttataagggattttgccgatttcggcctattggttaaaaaatgagctgatttaacaaaaatttaacgcgaattttaacaaaatattaacgcttacaatttaggtggcacttttcggggaaatgtgcgcggaacccctatttgtttatttttctaaatacattcaaatatgtatccgctcatgagacaataaccctgataaatgcttcaataatattgaaaaaggaagagtatgagtattcaacatttccgtgtcgcccttattcccttttttgcggcattttgccttcctgtttttgctcacccagaaacgctggtgaaagtaaaagatgctgaagatcagttgggtgcacgagtgggttacatcgaactggatctcaacagcggtaagatccttgagagttttcgccccgaagaacgttttccaatgatgagcacttttaaagttctgctatgtggcgcggtattatcccgtattgacgccgggcaagagcaactcggtcgccgcatacactattctcagaatgacttggttgagtactcaccagtcacagaaaagcatcttacggatggcatgacagtaagagaattatgcagtgctgccataaccatgagtgataacactgcggccaacttacttctgacaacgatcggaggaccgaaggagctaaccgcttttttgcacaacatgggggatcatgtaactcgccttgatcgttgggaaccggagctgaatgaagccataccaaacgacgagcgtgacaccacgatgcctgtagcaatggcaacaacgttgcgcaaactattaactggcgaactacttactctagcttcccggcaacaattaatagactggatggaggcggataaagttgcaggaccacttctgcgctcggcccttccggctggctggtttattgctgataaatctggagccggtgagcgtgggtctcgcggtatcattgcagcactggggccagatggtaagccctcccgtatcgtagttatctacacgacggggagtcaggcaactatggatgaacgaaatagacagatcgctgagataggtgcctcactgattaagcattggtaactgtcagaccaagtttactcatatatactttagattgatttaaaacttcatttttaatttaaaaggatctaggtgaagatcctttttgataatctcatgaccaaaatcccttaacgtgagttttcgttccactgagcgtcagaccccgtagaaaagatcaaaggatcttcttgagatcctttttttctgcgcgtaatctgctgcttgcaaacaaaaaaaccaccgctaccagcggtggtttgtttgccggatcaagagctaccaactctttttccgaaggtaactggcttcagcagagcgcagataccaaatactgttcttctagtgtagccgtagttaggccaccacttcaagaactctgtagcaccgcctacatacctcgctctgctaatcctgttaccagtggctgctgccagtggcgataagtcgtgtcttaccgggttggactcaagacgatagttaccggataaggcgcagcggtcgggctgaacggggggttcgtgcacacagcccagcttggagcgaacgacctacaccgaactgagatacctacagcgtgagctatgagaaagcgccacgcttcccgaagggagaaaggcggacaggtatccggtaagcggcagggtcggaacaggagagcgcacgagggagcttccagggggaaacgcctggtatctttatagtcctgtcgggtttcgccacctctgacttgagcgtcgatttttgtgatgctcgtcaggggggcggagcctatggaaaaacgccagcaacgcggcctttttacggttcctggccttttgctggccttttgctcacatgttctttcctgcgttatcccctgattctgtggataaccgtattaccgcctttgagtgagctgataccgctcgccgcagccgaacgaccgagcgcagcgagtcagtgagcgaggaagcggaagagcgcccaatacgcaaaccgcctctccccgcgcgttggccgattcattaatgcagctggcacgacaggttt

SEQ ID NO: 6 - DNA, 6554 bp, synthetic construct
  source 1..6554: mol_type = other DNA
cccgactggaaagcgggcagtgagcgcaacgcaattaatgtgagttagctcactcattaggcaccccaggctttacactttatgcttccggctcgtatgttgtgtggaattgtgagcggataacaatttcacacaggaaacagctatgaccatgattacgccaagcgcgcaattaaccctcactaaagggaacaaaagctggagctgcaagcttggccattgcatacgttgtatccatatcataatatgtacatttatattggctcatgtccaacattaccgccatgttgacattgattattgactagttattaatagtaatcaattacggggtcattagttcatagcccatatatggagttccgcgttacataacttacggtaaatggcccgcctggctgaccgcccaacgacccccgcccattgacgtcaataatgacgtatgttcccatagtaacgccaatagggactttccattgacgtcaatgggtggagtatttacggtaaactgcccacttggcagtacatcaagtgtatcatatgccaagtacgccccctattgacgtcaatgacggtaaatggcccgcctggcattatgcccagtacatgaccttatgggactttcctacttggcagtacatctacgtattagtcatcgctattaccatggtgatgcggttttggcagtacatcaatgggcgtggatagcggtttgactcacggggatttccaagtctccaccccattgacgtcaatgggagtttgttttggcaccaaaatcaacgggactttccaaaatgtcgtaacaactccgccccattgacgcaaatgggcggtaggcgtgtacggtgggaggtctatataagcagagctcgtttagtgaaccggggtctctctggttagaccagatctgagcctgggagctctctggctaactagggaacccactgcttaagcctcaataaagcttgccttgagtgcttcaagtagtgtgtgcccgtctgttgtgtgactctggtaactagagatccctcagacccttttagtcagtgtggaaaatctctagcagtggcgcccgaacagggacttgaaagcgaaagggaaaccagaggagctctctcgacgcaggactcggcttgctgaagcgcgcacggcaagaggcgaggggcggcgactggtgagtacgccaaaaattttgactagcggaggctagaaggagagagatgggtgcgagagcgtcagtattaagcgggggagaattagatcgcgatgggaaaaaattcggttaaggccagggggaaagaaaaaatataaattaaaacatatagtatgggcaagcagggagctagaacgattcgcagttaatcctggcctgttagaaacatcagaaggctgtagacaaatactgggacagctacaaccatcccttcagacaggatcagaagaacttagatcattatataatacagtagcaaccctctattgtgtgcatcaaaggatagagataaaagacaccaaggaagctttagacaagatagaggaagagcaaaacaaaagtaagaccaccgcacagcaagcggccgctgatcttcagacctggaggaggagatatgagggacaattggagaagtgaattatataaatataaagtagtaaaaattgaaccattaggagtagcacccaccaaggcaaagagaagagtggtgcagagagaaaaaagagcagtgggaataggagctttgttccttgggttcttgggagcagcaggaagcactatgggcgcagcgtcaatgacgctgacggtacaggccagacaattattgtctggtatagtgcagcagcagaacaatttgctgagggctattgaggcgcaacagcatctgttgcaactcacagtctggggcatcaagcagctccaggcaagaatcctggctgtggaaagatacctaaaggatcaacagctcctggggatttggggttgctctggaaaactcatttgcaccactgctgtgccttggaatgctagttggagtaataaatctctggaacagatttggaatcacacgacctggatggagtgggacagagaaattaacaattacacaagcttaatacactccttaattgaagaatcgcaaaaccagcaagaaaagaatgaacaagaattattggaattagataaatgggcaagtttgtggaattggtttaacataacaaattggctgtggtatataaaattattcataatgatagtaggaggcttggtaggtttaagaatagtttttgctgtactttctatagtgaatagagttaggcagggatattcaccattatcgtttcagacccacctcccaaccccgaggggacccgacaggcccgaaggaatagaagaagaaggtggagagagagacagagacagatccattcgattagtgaacggatctcgacggtatcgataagctaattcacaaatggcagtattcatccacaattttaaaagaaaaggggggattggggggtacagtgcaggggaaagaatagtagacataatagcaacagacatacaaactaaagaattacaaaaacaaattacaaaaattcaaaattttcgggtttattacagggacagcagagatccagtttgggaattagcttgatcgattagtccaatttgttaaagacaggatatcagtggtccaggctctagttttgactcaacaatatcaccagctgaagcctatagagtacgagccatagatagaataaaagattttatttagtctccagaaaaaggggggaatgaaagaccccacctgtaggtttggcaagctaggatcaaggttaggaacagagagacagcagaatatgggccaaacaggatatctgtggtaagcagttcctgccccggctcagggccaagaacagttggaacagcagaatatgggccaaacaggatatctgtggtaagcagttcctgccccggctcagggccaagaacagatggtccccagatgcggtcccgccctcagcagtttctagagaaccatcagatgtttccagggtgccccaaggacctgaaatgaccctgtgccttatttgaactaaccaatcagttcgcttctcgcttctgttcgcgcgcttctgctccccgagctcaataaaagagcccacaacccctcactcggcgcgatctagatctcgaatcgaattcgtcgacggtacctttaagaccaatgacttacaaggcagctgtagatcttagccactttttaaaagaaaaggggggactggaagggctaattcactcccaacgaagacaagatctgctttttgcttgtactgggtctctctggttagaccagatctgagcctgggagctctctggctaactagggaacccactgcttaagcctcaataaagcttgccttgagtgcttcaagtagtgtgtgcccgtctgttgtgtgactctggtaactagagatccctcagacccttttagtcagtgtggaaaatctctagcagtagtagttcatgtcatcttattattcagtatttataacttgcaaagaaatgaatatcagagagtgagaggaacttgtttattgcagcttataatggttacaaataaagcaatagcatcacaaatttcacaaataaagcatttttttcactgcattctagttgtggtttgtccaaactcatcaatgtatcttatcatgtctggctctagctatcccgcccctaactccgcccatcccgcccctaactccgcccagttccgcccattctccgccccatggctgactaattttttttatttatgcagaggccgaggccgcctcggcctctgagctattccagaagtagtgaggaggcttttttggaggcctagggacgtacccaattcgccctatagtgagtcgtattacgcgcgctcactggccgtcgttttacaacgtcgtgactgggaaaaccctggcgttacccaacttaatcgccttgcagcacatccccctttcgccagctggcgtaatagcgaagaggcccgcaccgatcgcccttcccaacagttgcgcagcctgaatggcgaatgggacgcgccctgtagcggcgcattaagcgcggcgggtgtggtggttacgcgcagcgtgaccgctacacttgccagcgccctagcgcccgctcctttcgctttcttcccttcctttctcgccacgttcgccggctttccccgtcaagctctaaatcgggggctccctttagggttccgatttagtgctttacggcacctcgaccccaaaaaacttgattagggtgatggttcacgtagtgggccatcgccctgatagacggtttttcgccctttgacgttggagtccacgttctttaatagtggactcttgttccaaactggaacaacactcaaccctatctcggtctattcttttgatttataagggattttgccgatttcggcctattggttaaaaaatgagctgatttaacaaaaatttaacgcgaattttaacaaaatattaacgcttacaatttaggtggcacttttcggggaaatgtgcgcggaacccctatttgtttatttttctaaatacattcaaatatgtatccgctcatgagacaataaccctgataaatgcttcaataatattgaaaaaggaagagtatgagtattcaacatttccgtgtcgcccttattcccttttttgcggcattttgccttcctgtttttgctcacccagaaacgctggtgaaagtaaaagatgctgaagatcagttgggtgcacgagtgggttacatcgaactggatctcaacagcggtaagatccttgagagttttcgccccgaagaacgttttccaatgatgagcacttttaaagttctgctatgtggcgcggtattatcccgtattgacgccgggcaagagcaactcggtcgccgcatacactattctcagaatgacttggttgagtactcaccagtcacagaaaagcatcttacggatggcatgacagtaagagaattatgcagtgctgccataaccatgagtgataacactgcggccaacttacttctgacaacgatcggaggaccgaaggagctaaccgcttttttgcacaacatgggggatcatgtaactcgccttgatcgttgggaaccggagctgaatgaagccataccaaacgacgagcgtgacaccacgatgcctgtagcaatggcaacaacgttgcgcaaactattaactggcgaactacttactctagcttcccggcaacaattaatagactggatggaggcggataaagttgcaggaccacttctgcgctcggcccttccggctggctggtttattgctgataaatctggagccggtgagcgtgggtctcgcggtatcattgcagcactggggccagatggtaagccctcccgtatcgtagttatctacacgacggggagtcaggcaactatggatgaacgaaatagacagatcgctgagataggtgcctcactgattaagcattggtaactgtcagaccaagtttactcatatatactttagattgatttaaaacttcatttttaatttaaaaggatctaggtgaagatcctttttgataatctcatgaccaaaatcccttaacgtgagttttcgttccactgagcgtcagaccccgtagaaaagatcaaaggatcttcttgagatcctttttttctgcgcgtaatctgctgcttgcaaacaaaaaaaccaccgctaccagcggtggtttgtttgccggatcaagagctaccaactctttttccgaaggtaactggcttcagcagagcgcagataccaaatactgttcttctagtgtagccgtagttaggccaccacttcaagaactctgtagcaccgcctacatacctcgctctgctaatcctgttaccagtggctgctgccagtggcgataagtcgtgtcttaccgggttggactcaagacgatagttaccggataaggcgcagcggtcgggctgaacggggggttcgtgcacacagcccagcttggagcgaacgacctacaccgaactgagatacctacagcgtgagctatgagaaagcgccacgcttcccgaagggagaaaggcggacaggtatccggtaagcggcagggtcggaacaggagagcgcacgagggagcttccagggggaaacgcctggtatctttatagtcctgtcgggtttcgccacctctgacttgagcgtcgatttttgtgatgctcgtcaggggggcggagcctatggaaaaacgccagcaacgcggcctttttacggttcctggccttttgctggccttttgctcacatgttctttcctgcgttatcccctgattctgtggataaccgtattaccgcctttgagtgagctgataccgctcgccgcagccgaacgaccgagcgcagcgagtcagtgagcgaggaagcggaagagcgcccaatacgcaaaccgcctctccccgcgcgttggccgattcattaatgcagctggcacgacaggttt

SEQ ID NO: 7 - DNA, 1183 bp, synthetic construct
  source 1..1183: mol_type = other DNA
gtgaggctccggtgcccgtcagtgggcagagcgcacatcgcccacagtccccgagaagttggggggaggggtcggcaattgaaccggtgcctagagaaggtggcgcggggtaaactgggaaagtgatgtcgtgtactggctccgcctttttcccgagggtgggggagaaccgtatataagtgcagtagtcgccgtgaacgttctttttcgcaacgggtttgccgccagaacacaggtaagtgccgtgtgtggttcccgcgggcctggcctctttacgggttatggcccttgcgtgccttgaattacttccacctggctgcagtacgtgattcttgatcccgagcttcgggttggaagtgggtgggagagttcgaggccttgcgcttaaggagccccttcgcctcgtgcttgagttgaggcctggcctgggcgctggggccgccgcgtgcgaatctggtggcaccttcgcgcctgtctcgctgctttcgataagtctctagccatttaaaatttttgatgacctgctgcgacgctttttttctggcaagatagtcttgtaaatgcgggccaagatctgcacactggtatttcggtttttggggccgcgggcggcgacggggcccgtgcgtcccagcgcacatgttcggcgaggcggggcctgcgagcgcggccaccgagaatcggacgggggtagtctcaagctggccggcctgctctggtgcctggcctcgcgccgccgtgtatcgccccgccctgggcggcaaggctggcccggtcggcaccagttgcgtgagcggaaagatggccgcttcccggccctgctgcagggagctcaaaatggaggacgcggcgctcgggagagcgggcgggtgagtcacccacacaaaggaaaagggcctttccgtcctcagccgtcgcttcatgtgactccacggagtaccgggcgccgtccaggcacctcgattagttctcgaccttttggagtacgtcgtctttaggttggggggaggggttttatgcgatggagtttccccacactgagtgggtggagactgaagttaggccagcttggcacttgatgtaattctccttggaatttgccctttttgagtttggatcttggttcattctcaagcctcagacagtggttcaaagtttttttcttccatttcaggtgtcgtga

SEQ ID NO: 8 - DNA, 5857 bp, synthetic construct
  source 1..5857: mol_type = other DNA
aattttaacaaaatattaacgcttacaatttcctgatgcggtattttctccttacgcatctgtgcggtatttcacaccgcatcaggtggcacttttcggggaaatgtgcgcggaacccctatttgtttatttttctaaatacattcaaatatgtatccgctcatgagacaataaccctgataaatgcttcaataatattgaaaaaggaagagtatgagtattcaacatttccgtgtcgcccttattcccttttttgcggcattttgccttcctgtttttgctcacccagaaacgctggtgaaagtaaaagatgctgaagatcagttgggtgcacgagtgggttacatcgaactggatctcaacagcggtaagatccttgagagttttcgccccgaagaacgttttccaatgatgagcacttttaaagttctgctatgtggcgcggtattatcccgtattgacgccgggcaagagcaactcggtcgccgcatacactattctcagaatgacttggttgagtactcaccagtcacagaaaagcatcttacggatggcatgacagtaagagaattatgcagtgctgccataaccatgagtgataacactgcggccaacttacttctgacaacgatcggaggaccgaaggagctaaccgcttttttgcacaacatgggggatcatgtaactcgccttgatcgttgggaaccggagctgaatgaagccataccaaacgacgagcgtgacaccacgatgcctgtagcaatggcaacaacgttgcgcaaactattaactggcgaactacttactctagcttcccggcaacaattaatagactggatggaggcggataaagttgcaggaccacttctgcgctcggcccttccggctggctggtttattgctgataaatctggagccggtgagcgtgggtctcgcggtatcattgcagcactggggccagatggtaagccctcccgtatcgtagttatctacacgacggggagtcaggcaactatggatgaacgaaatagacagatcgctgagataggtgcctcactgattaagcattggtaactgtcagaccaagtttactcatatatactttagattgatttaaaacttcatttttaatttaaaaggatctaggtgaagatcctttttgataatctcatgaccaaaatcccttaacgtgagttttcgttccactgagcgtcagaccccgtagaaaagatcaaaggatcttcttgagatcctttttttctgcgcgtaatctgctgcttgcaaacaaaaaaaccaccgctaccagcggtggtttgtttgccggatcaagagctaccaactctttttccgaaggtaactggcttcagcagagcgcagataccaaatactgttcttctagtgtagccgtagttaggccaccacttcaagaactctgtagcaccgcctacatacctcgctctgctaatcctgttaccagtggctgctgccagtggcgataagtcgtgtcttaccgggttggactcaagacgatagttaccggataaggcgcagcggtcgggctgaacggggggttcgtgcacacagcccagcttggagcgaacgacctacaccgaactgagatacctacagcgtgagctatgagaaagcgccacgcttcccgaagggagaaaggcggacaggtatccggtaagcggcagggtcggaacaggagagcgcacgagggagcttccagggggaaacgcctggtatctttatagtcctgtcgggtttcgccacctctgacttgagcgtcgatttttgtgatgctcgtcaggggggcggagcctatggaaaaacgccagcaacgcggcctttttacggttcctggccttttgctggccttttgctcacatgttctttcctgcgttatcccctgattctgtggataaccgtattaccgcctttgagtgagctgataccgctcgccgcagccgaacgaccgagcgcagcgagtcagtgagcgaggaagcggatccctatacagttgaagtcggaagtttacatacaccttagccaaatacatttaaactcactttttcacaattcctgacatttaatcctagtaaaaattccctgtcttaggtcagttaggatcaccactttattttaagaatgtgaaatatcagaataatagtagagagaatgattcatttcagcttttatttctttcatcacattcccagtgggtcagaagtttacatacactcgactcctctgcagaatgcggcgatgtttcggtaaggggtcccgagtagctagttcatggcagccagcatatggcatatgttgccaaactctaaaccaaatactcattctgatgttttaaatgatttgccctcccatatgtccttccgagtgagagacacaaaaaattccaacacactattgcaatgaaaataaatttcctttattagccagaagtcagatgctcaaggggcttcatgatgtccccataatttttggcagagggaaaaagatctcagtggtatttgtgagccagggcattggccacaccagccaccaccttctgataggcagcctgcacctgaggagtgaattcacgacaggccttcgaatcaggcaccgggcttgcgggtcatgcaccaggtgcgcggtccttcgggcacctcgacgtcggcggtgacggtgaagccgagccgctcgtagaaggggaggttgcggggcgcggaggtctccaggaaggcgggcaccccggcgcgctcggccgcctccactccggggagcacgacggcgctgcccagacccttgccctggtggtcgggcgagacgccgacggtggccaggaaccacgcgggctccttgggccggtgcggcgccaggaggccttccatctgttgctgcgcggccagccgggaaccgctcaactcggccatgcgcgggccgatctcggcgaacaccgcccccgcttcgacgctctccggcgtggtccagaccgccaccgcggcgccgtcgtccgcgacccacaccttgccgatgtcgagcccgacgcgcgtgaggaagagttcttgcagctcggtgacccgctcgatgtggcggtccggatcgacggtgtggcgcgtggcggggtagtcggcgaacgcggcggcgagggtgcgtacggccctggggacgtcgtcgcgggtggcgaggcgcaccgtgggcttgtactcggtcatggtggcctcaggtgcagaggtttctacagggaaagagagaaaggctacagttagtttgctgtgatgatgctaagtgccgaggtcagatgtctatggattgtacacggaatcccaacgcaggaaccaaaaaacactcacccaaaaaaatggcgctaaggccgagagaaaggcgaagttccgtctacggctatataccttgaaacaggggcggcagaagtgacgcaacgcggttgcgcggacggcttcctgtgttttcattggtcgaagcgttctgcgcgtgcgcagagattccccagggaaggcgggccctcttccgaatgtccaatccggacattcttccggttggacctccgcggtcagcgctgtgcccggcgagagatcacgtggggcgcggaggcggtgctgctggggcacggccgtccagcctcggcggccatatttttgaggggctgttcatctcgttcacacgctctgtccgccatgtttgtgagtggaagcgccattaccccttcaagcgactgaaggctgcagggcctctggtggcccgcatggggagaccagacccgccaggcccgcctttccgcactcagtccgggcttactttattttgtgagacagggtctcgcctagaggctccggtgcccgtcagtgggcagagcgcacatcgcccacagtccccgagaagttggggggaggggtcggcaattgaaccggtgcctagagaaggtggcgcggggtaaactgggaaagtgatgtcgtgtactggctccgcctttttcccgagggtgggggagaaccgtatataagtgcagtagtcgccgtgaacgttctttttcgcaacgggtttgccgccagaacacaggtaagtgccgtgtgtggttcccgcgggcctggcctctttacgggttatggcccttgcgtgccttgaattacttccacgcccctggctgcagtacgtgattcttgatcccgagcttcgggttggaagtgggtgggagagttcgaggccttgcgcttaaggagccccttcgcctcgtgcttgagttgaggcttggcctgggcgctggggccgccgcgtgcgaatctggtggcaccttcgcgcctgtctcgctgctttcgataagtctctagccatttaaaatttttgatgacctgctgcgacgctttttttctggcaagatagtcttgtaaatgcgggccaagatctgcacactggtatttcggtttttggggccgcgggcggcgacggggcccgtgcgtcccagcgcacatgttcggcgaggcggggcctgcgagcgcggccaccgagaatcggacgggggtagtctcaagctggccggcctgctctggtgcctggcctcgcgccgccgtgtatcgccccgccctgggcggcaaggctggcccggtcggcaccagttgcgtgagcggaaagatggccgcttcccggccctgctgcagggagctcaaaatggaggacgcggcgctcgggagagcgggcgggtgagtcacccacacaaaggaaaagggcctttccgtcctcagccgtcgcttcatgtgactccacggagtaccgggcgccgtccaggcacctcgattagttctcgagcttttggagtacgtcgtctttaggttggggggaggggttttatgcgatggagtttccccatactgagtgggtggagactgaagttaggccagcttggcacttgatgtaattctccttggaatttgccctttttgagtttggatcttggttcattctcaagcctcagacagtggttcaaagtttttttcttccatttaaggtgtcgtgaaaactaccccaagctggcctctgaggccaccatggctcgagtttcgaactcaattatactgaattgtttcatcatagggttcaacattgtgataaatcaggacttcaatgtctagtgttcagtaaataccttgtagggctctccaaaaaggggaatcttttcaggaaatgcctctttctcttggtgggcttcctggttgcgtctttccttctctctaattcgaaggcctgtcaggccaagcttggggatcaattctctagagctcgctgatcagcctcgactgtgccttctagttgccagccatctgttgtttgcccctcccccgtgccttccttgaccctggaaggtgccactcccactgtcctttcctaataaaatgaggaaattgcatcgcattgtctgagtaggtgtcattctattctggggggtggggtggggcaggacagcaagggggaggattgggaagacaatagcaggcatgctggggatgcggtgggctctatggcttctgaggcggaaagaaccagctgggcctactagatagcggaccccttaccgaaacatcgccgcattctgcagaggagtcgaacttagtgtatgtaaacttctgacccactggaattgtgatacagtgaattataagtgaaataatctgtctgtaaacaattgttggaaaaatgacttgtgtcatgcacaaagtagatgtcctaactgacttgccaaaactattgtttgttaacaagaaatttgtggagtagttgaaaaacgagttttaatgactccaacttaagtgtatgtaaacttccgacttcaactgtatagggatcc

SEQ ID NO: 9 - DNA, 7566 bp, synthetic construct
  source 1..7566: mol_type = other DNA
tgaaagaccccacctgtaggtttggcaagctagcttaagtaacgccattttgcaaggcatggaaaatacataactgagaatagagaagttcagatcaaggttaggaacagagagacagcagaatatgggccaaacaggatatctgtggtaagcagttcctgccccggctcagggccaagaacagatggtccccagatgcggtcccgccctcagcagtttctagagaaccatcagatgtttccagggtgccccaaggacctgaaatgaccctgtgccttatttgaactaaccaatcagttcgcttctcgcttctgttcgcgcgcttctgctccccgagctcaataaaagagcccacaacccctcactcggcgcgccagtcctccgatagactgcgtcgcccgggtacccgtattcccaataaagcctcttgctgtttgcatccgaatcgtggactcgctgatccttgggagggtctcctcagattgattgactgcccacctcgggggtctttcatttggaggttccaccgagatttggagacccctgcccagggaccaccgacccccccgccgggaggtaagctggccagcggtcgtttcgtgtctgtctctgtctttgtgcgtgtttgtgccggcatctaatgtttgcgcctgcgtctgtactagttagctaactagctctgtatctggcggacccgtggtggaactgacgagttctgaacacccggccgcaaccctgggagacgtcccagggactttgggggccgtttttgtggcccgacctgaggaagggagtcgatgtggaatccgaccccgtcaggatatgtggttctggtaggagacgagaacctaaaacagttcccgcctccgtctgaatttttgctttcggtttggaaccgaagccgcgcgtcttgtctgctgcagcgctgcagcatcgttctgtgttgtctctgtctgactgtgtttctgtatttgtctgaaaattagggccagactgttaccactcccttaagtttgaccttaggtcactggaaagatgtcgagcggatcgctcacaaccagtcggtagatgtcaagaagagacgttgggttaccttctgctctgcagaatggccaacctttaacgtcggatggccgcgagacggcacctttaaccgagacctcatcacccaggttaagatcaaggtcttttcacctggcccgcatggacacccagaccaggtcccctacatcgtgacctgggaagccttggcttttgacccccctccctgggtcaagccctttgtacaccctaagcctccgcctcctcttcctccatccgccccgtctctcccccttgaacctcctcgttcgaccccgcctcgatcctccctttatccagccctcactccttctctaggcgccggaattagatccccaccatgaagcccaccgagaacaacgaagacttcaacatcgtggccgtggccagcaacttcgcgaccacggatctcgatgctgaccgcgggaagttgcccggcaagaagctgccgctggaggtgctcaaagagatggaagccaatgcccggaaagctggctgcaccaggggctgtctgatctgcctgtcccacatcaagtgcacgcccaagatgaagaagttcatcccaggacgctgccacacctacgaaggcgacaaagagtccgcacagggcggcataggcgaggcgatcgtcgacattcctgagattcctgggttcaaggacttggagcccatggagcagttcatcgcacaggtcgatctgtgtgtggactgcacaactggctgcctcaaagggcttgccaacgtgcagtgttctgacctgctcaagaagtggctgccgcaacgctgtgcgacctttgccagcaagatccagggccaggtggacaagatcaagggggccggtggtgacctcgagaccgatttctacccctacgatgtgcccgattacgcttagtctagagggccctattctatagtgtcacctaagtcgaggttaacgaattctaccgggtaggggaggcgcttttcccaaggcagtctggagcatgcgctttagcagccccgctgggcacttggcgctacacaagtggcctctggcctcgcacacattccacatccaccggtaggcgccaaccggctccgttctttggtggccccttcgcgccaccttctactcctcccctagtcaggaagttcccccccgccccgcagctcgcgtcgtgcaggacgtgacaaatggaagtagcacgtctcactagtctcgtgcagatggacagcaccgctgagcaatggaagcgggtaggcctttggggcagcggccaatagcagctttgctccttcgctttctgggctcagaggctgggaaggggtgggtccgggggcgggctcaggggcgggctcaggggcggggcgggcgcccgaaggtcctccggaggcccggcattctgcacgcttcaaaagcgcacgtctgccgcgctgttctcctcttcctcatctccgggcctttcgacctgcatcccgccaccatgaaaaagcctgaactcaccgcgacgtctgtcgagaagtttctgatcgaaaagttcgacagcgtctccgacctgatgcagctctcggagggcgaagaatctcgtgctttcagcttcgatgtaggagggcgtggatatgtcctgcgggtaaatagctgcgccgatggtttctacaaagatcgttatgtttatcggcactttgcatcggccgcgctcccgattccggaagtgcttgacattggggaattcagcgagagcctgacctattgcatctcccgccgtgcacagggtgtcacgttgcaagacctgcctgaaaccgaactgcccgctgttctgcagccggtcgcggaggccatggatgcgatcgctgcggccgatcttagccagacgagcgggttcggcccattcggaccgcaaggaatcggtcaatacactacatggcgtgatttcatatgcgcgattgctgatccccatgtgtatcactggcaaactgtgatggacgacaccgtcagtgcgtccgtcgcgcaggctctcgatgagctgatgctttgggccgaggactgccccgaagtccggcacctcgtgcacgcggatttcggctccaacaatgtcctgacggacaatggccgcataacagcggtcattgactggagcgaggcgatgttcggggattcccaatacgaggtcgccaacatcttcttctggaggccgtggttggcttgtatggagcagcagacgcgctacttcgagcggaggcatccggagcttgcaggatcgccgcggctccggggcgtatatgctccgcattggtcttgaccaactctatcagagcttggttgacggcaatttcgatgatgcagcttgggcgcagggtcgatgcgacgcaatcgtccgatccggagccgggactgtcgggcgtacacaaatcgcccgcagaagcgcggccgtctggaccgatggctgtgtagaagtactcgccgatagtggaaaccgacgccccagcactcgtccgagggcaaaggaatagagtagatgccgaccgaacaagagctgatttcgagaacgcctcagccagcaactcgcgcgagcctagcaaggcaaatgcgagagaacggccttacgcttggtggcacagttctcgtccacagttcgctaagctcgctcggctgggtcgcgggagggccggtcgcagtgattcaggcccttctggattgtgttggtccccagggcacgattgtcatgcccacgcactcgggtgatctgactgatcccgcagattggagatcgccgcccgtgcctgccgattgggtgcagatccgtcgacctgcagccaagcttatcgataaaataaaagattttatttagtctccagaaaaaggggggaatgaaagaccccacctgtaggtttggcaagctagcttaagtaacgccattttgcaaggcatggaaaatacataactgagaatagagaagttcagatcaaggttaggaacagagagacagcagaatatgggccaaacaggatatctgtggtaagcagttcctgccccggctcagggccaagaacagatggtccccagatgcggtcccgccctcagcagtttctagagaaccatcagatgtttccagggtgccccaaggacctgaaatgaccctgtgccttatttgaactaaccaatcagttcgcttctcgcttctgttcgcgcgcttctgctccccgagctcaataaaagagcccacaacccctcactcggcgcgccagtcctccgatagactgcgtcgcccgggtacccgtgtatccaataaaccctcttgcagttgcatccgacttgtggtctcgctgttccttgggagggtctcctctgagtgattgactacccgtcagcgggggtctttcatgggtaacagtttcttgaagttggagaacaacattctgagggtaggagtcgaatattaagtaatcctgactcaattagccactgttttgaatccacatactccaatactcctgaaatagttcattatggacagcgcagaagagctggggagaattaattcgtaatcatggtcatagctgtttcctgtgtgaaattgttatccgctcacaattccacacaacatacgagccggaagcataaagtgtaaagcctggggtgcctaatgagtgagctaactcacattaattgcgttgcgctcactgcccgctttccagtcgggaaacctgtcgtgccagctgcattaatgaatcggccaacgcgcggggagaggcggtttgcgtattgggcgctcttccgcttcctcgctcactgactcgctgcgctcggtcgttcggctgcggcgagcggtatcagctcactcaaaggcggtaatacggttatccacagaatcaggggataacgcaggaaagaacatgtgagcaaaaggccagcaaaaggccaggaaccgtaaaaaggccgcgttgctggcgtttttccataggctccgcccccctgacgagcatcacaaaaatcgacgctcaagtcagaggtggcgaaacccgacaggactataaagataccaggcgtttccccctggaagctccctcgtgcgctctcctgttccgaccctgccgcttaccggatacctgtccgcctttctcccttcgggaagcgtggcgctttctcatagctcacgctgtaggtatctcagttcggtgtaggtcgttcgctccaagctgggctgtgtgcacgaaccccccgttcagcccgaccgctgcgccttatccggtaactatcgtcttgagtccaacccggtaagacacgacttatcgccactggcagcagccactggtaacaggattagcagagcgaggtatgtaggcggtgctacagagttcttgaagtggtggcctaactacggctacactagaaggacagtatttggtatctgcgctctgctgaagccagttaccttcggaaaaagagttggtagctcttgatccggcaaacaaaccaccgctggtagcggtggtttttttgtttgcaagcagcagattacgcgcagaaaaaaaggatctcaagaagatcctttgatcttttctacggggtctgacgctcagtggaacgaaaactcacgttaagggattttggtcatgagattatcaaaaaggatcttcacctagatccttttaaattaaaaatgaagttttaaatcaatctaaagtatatatgagtaaacttggtctgacagttaccaatgcttaatcagtgaggcacctatctcagcgatctgtctatttcgttcatccatagttgcctgactccccgtcgtgtagataactacgatacgggagggcttaccatctggccccagtgctgcaatgataccgcgagacccacgctcaccggctccagatttatcagcaataaaccagccagccggaagggccgagcgcagaagtggtcctgcaactttatccgcctccatccagtctattaattgttgccgggaagctagagtaagtagttcgccagttaatagtttgcgcaacgttgttgccattgctacaggcatcgtggtgtcacgctcgtcgtttggtatggcttcattcagctccggttcccaacgatcaaggcgagttacatgatcccccatgttgtgcaaaaaagcggttagctccttcggtcctccgatcgttgtcagaagtaagttggccgcagtgttatcactcatggttatggcagcactgcataattctcttactgtcatgccatccgtaagatgcttttctgtgactggtgagtactcaaccaagtcattctgagaatagtgtatgcggcgaccgagttgctcttgcccggcgtcaatacgggataataccgcgccacatagcagaactttaaaagtgctcatcattggaaaacgttcttcggggcgaaaactctcaaggatcttaccgctgttgagatccagttcgatgtaacccactcgtgcacccaactgatcttcagcatcttttactttcaccagcgtttctgggtgagcaaaaacaggaaggcaaaatgccgcaaaaaagggaataagggcgacacggaaatgttgaatactcatactcttcctttttcaatattattgaagcatttatcagggttattgtctcatgagcggatacatatttgaatgtatttagaaaaataaacaaataggggttccgcgcacatttccccgaaaagtgccacctgacgtctaagaaaccattattatcatgacattaacctataaaaataggcgtatcacgaggccctttcgtctcgcgcgtttcggtgatgacggtgaaaacctctgacacatgcagctcccggagacggtcacagcttgtctgtaagcggatgccgggagcagacaagcccgtcagggcgcgtcagcgggtgttggcgggtgtcggggctggcttaactatgcggcatcagagcagattgtactgagagtgcaccatatgcggtgtgaaataccgcacagatgcgtaaggagaaaataccgcatcaggcgccattcgccattcaggctgcgcaactgttgggaagggcgatcggtgcgggcctcttcgctattacgccagctggcgaaagggggatgtgctgcaaggcgattaagttgggtaacgccagggttttcccagtcacgacgttgtaaaacgacggcgcaaggaatggtgcatgcaaggagatggcgcccaacagtcccccggccacggggcctgccaccatacccacgccgaaacaagcgctcatgagcccgaagtggcgagcccgatcttccccatcggtgatgtcggcgatataggcgccagcaaccgcacctgtggcgccggtgatgccggccacgatgcgtccggcgtagaggcgattagtccaatttgttaaagacaggatatcagtggtccaggctctagttttgactcaacaatatcaccagctgaagcctatagagtacgagccatagataaaataaaagattttatttagtctccagaaaaaggggggaa

SEQ ID NO: 10 - DNA, 6884 bp, synthetic construct
  source 1..6884: mol_type = other DNA
tgaaagaccccacctgtaggtttggcaagctagcttaagtaacgccattttgcaaggcatggaaaatacataactgagaatagagaagttcagatcaaggttaggaacagagagacagcagaatatgggccaaacaggatatctgtggtaagcagttcctgccccggctcagggccaagaacagatggtccccagatgcggtcccgccctcagcagtttctagagaaccatcagatgtttccagggtgccccaaggacctgaaatgaccctgtgccttatttgaactaaccaatcagttcgcttctcgcttctgttcgcgcgcttctgctccccgagctcaataaaagagcccacaacccctcactcggcgcgccagtcctccgatagactgcgtcgcccgggtacccgtattcccaataaagcctcttgctgtttgcatccgaatcgtggactcgctgatccttgggagggtctcctcagattgattgactgcccacctcgggggtctttcatttggaggttccaccgagatttggagacccctgcccagggaccaccgacccccccgccgggaggtaagctggccagcggtcgtttcgtgtctgtctctgtctttgtgcgtgtttgtgccggcatctaatgtttgcgcctgcgtctgtactagttagctaactagctctgtatctggcggacccgtggtggaactgacgagttctgaacacccggccgcaaccctgggagacgtcccagggactttgggggccgtttttgtggcccgacctgaggaagggagtcgatgtggaatccgaccccgtcaggatatgtggttctggtaggagacgagaacctaaaacagttcccgcctccgtctgaatttttgctttcggtttggaaccgaagccgcgcgtcttgtctgctgcagcgctgcagcatcgttctgtgttgtctctgtctgactgtgtttctgtatttgtctgaaaattagggccagactgttaccactcccttaagtttgaccttaggtcactggaaagatgtcgagcggatcgctcacaaccagtcggtagatgtcaagaagagacgttgggttaccttctgctctgcagaatggccaacctttaacgtcggatggccgcgagacggcacctttaaccgagacctcatcacccaggttaagatcaaggtcttttcacctggcccgcatggacacccagaccaggtcccctacatcgtgacctgggaagccttggcttttgacccccctccctgggtcaagccctttgtacaccctaagcctccgcctcctcttcctccatccgccccgtctctcccccttgaacctcctcgttcgaccccgcctcgatcctccctttatccagccctcactccttctctaggcgccggaattagatccccaccatgaagcccaccgagaacaacgaagacttcaacatcgtggccgtggccagcaacttcgcgaccacggatctcgatgctgaccgcgggaagttgcccggcaagaagctgccgctggaggtgctcaaagagatggaagccaatgcccggaaagctggctgcaccaggggctgtctgatctgcctgtcccacatcaagtgcacgcccaagatgaagaagttcatcccaggacgctgccacacctacgaaggcgacaaagagtccgcacagggcggcataggcgaggcgatcgtcgacattcctgagattcctgggttcaaggacttggagcccatggagcagttcatcgcacaggtcgatctgtgtgtggactgcacaactggctgcctcaaagggcttgccaacgtgcagtgttctgacctgctcaagaagtggctgccgcaacgctgtgcgacctttgccagcaagatccagggccaggtggacaagatcaagggggccggtggtgacctcgagaccgatttctacccctacgatgtgcccgattacgcttagtctagagggccctattctatagtgtcacctaagtcgaggttaacgaattctaccgggtaggggaggcgcttttcccaaggcagtctggagcatgcgctttagcagccccgctgggcacttggcgctacacaagtggcctctggcctcgcacacattccacatccaccggtaggcgccaaccggctccgttctttggtggccccttcgcgccaccttctactcctcccctagtcaggaagttcccccccgccccgcagctcgcgtcgtgcaggacgtgacaaatggaagtagcacgtctcactagtctcgtgcagatggacagcaccgctgagcaatggaagcgggtaggcctttggggcagcggccaatagcagctttgctccttcgctttctgggctcagaggctgggaaggggtgggtccgggggcgggctcaggggcgggctcaggggcggggcgggcgcccgaaggtcctccggaggcccggcattctgcacgcttcaaaagcgcacgtctgccgcgctgttctcctcttcctcatctccgggcctttcgacctgcagcccaagcttaccatgaccgagtacaagcccacggtgcgcctcgccacccgcgacgacgtccccagggccgtacgcaccctcgccgccgcgttcgccgactaccccgccacgcgccacaccgtcgatccggaccgccacatcgagcgggtcaccgagctgcaagaactcttcctcacgcgcgtcgggctcgacatcggcaaggtgtgggtcgcggacgacggcgccgcggtggcggtctggaccacgccggagagcgtcgaagcgggggcggtgttcgccgagatcggcccgcgcatggccgagttgagcggttcccggctggccgcgcagcaacagatggaaggcctcctggcgccgcaccggcccaaggagcccgcgtggttcctggccaccgtcggcgtctcgcccgaccaccagggcaagggtctgggcagcgccgtcgtgctccccggagtggaggcggccgagcgcgccggggtgcccgccttcctggagacctccgcgccccgcaacctccccttctacgagcggctcggcttcaccgtcaccgccgacgtcgaggtgcccgaaggaccgcgcacctggtgcatgacccgcaagcccggtgcctgacgcccgccccacgacccgcagcgcccgaccgaaaggagcgcacgaccccatgcatcgataaaataaaagattttatttagtctccagaaaaaggggggaatgaaagaccccacctgtaggtttggcaagctagcttaagtaacgccattttgcaaggcatggaaaatacataactgagaatagagaagttcagatcaaggttaggaacagagagacagcagaatatgggccaaacaggatatctgtggtaagcagttcctgccccggctcagggccaagaacagatggtccccagatgcggtcccgccctcagcagtttctagagaaccatcagatgtttccagggtgccccaaggacctgaaatgaccctgtgccttatttgaactaaccaatcagttcgcttctcgcttctgttcgcgcgcttctgctccccgagctcaataaaagagcccacaacccctcactcggcgcgccagtcctccgatagactgcgtcgcccgggtacccgtgtatccaataaaccctcttgcagttgcatccgacttgtggtctcgctgttccttgggagggtctcctctgagtgattgactacccgtcagcgggggtctttcatgggtaacagtttcttgaagttggagaacaacattctgagggtaggagtcgaatattaagtaatcctgactcaattagccactgttttgaatccacatactccaatactcctgaaatagttcattatggacagcgcagaagagctggggagaattaattcgtaatcatggtcatagctgtttcctgtgtgaaattgttatccgctcacaattccacacaacatacgagccggaagcataaagtgtaaagcctggggtgcctaatgagtgagctaactcacattaattgcgttgcgctcactgcccgctttccagtcgggaaacctgtcgtgccagctgcattaatgaatcggccaacgcgcggggagaggcggtttgcgtattgggcgctcttccgcttcctcgctcactgactcgctgcgctcggtcgttcggctgcggcgagcggtatcagctcactcaaaggcggtaatacggttatccacagaatcaggggataacgcaggaaagaacatgtgagcaaaaggccagcaaaaggccaggaaccgtaaaaaggccgcgttgctggcgtttttccataggctccgcccccctgacgagcatcacaaaaatcgacgctcaagtcagaggtggcgaaacccgacaggactataaagataccaggcgtttccccctggaagctccctcgtgcgctctcctgttccgaccctgccgcttaccggatacctgtccgcctttctcccttcgggaagcgtggcgctttctcatagctcacgctgtaggtatctcagttcggtgtaggtcgttcgctccaagctgggctgtgtgcacgaaccccccgttcagcccgaccgctgcgccttatccggtaactatcgtcttgagtccaacccggtaagacacgacttatcgccactggcagcagccactggtaacaggattagcagagcgaggtatgtaggcggtgctacagagttcttgaagtggtggcctaactacggctacactagaaggacagtatttggtatctgcgctctgctgaagccagttaccttcggaaaaagagttggtagctcttgatccggcaaacaaaccaccgctggtagcggtggtttttttgtttgcaagcagcagattacgcgcagaaaaaaaggatctcaagaagatcctttgatcttttctacggggtctgacgctcagtggaacgaaaactcacgttaagggattttggtcatgagattatcaaaaaggatcttcacctagatccttttaaattaaaaatgaagttttaaatcaatctaaagtatatatgagtaaacttggtctgacagttaccaatgcttaatcagtgaggcacctatctcagcgatctgtctatttcgttcatccatagttgcctgactccccgtcgtgtagataactacgatacgggagggcttaccatctggccccagtgctgcaatgataccgcgagacccacgctcaccggctccagatttatcagcaataaaccagccagccggaagggccgagcgcagaagtggtcctgcaactttatccgcctccatccagtctattaattgttgccgggaagctagagtaagtagttcgccagttaatagtttgcgcaacgttgttgccattgctacaggcatcgtggtgtcacgctcgtcgtttggtatggcttcattcagctccggttcccaacgatcaaggcgagttacatgatcccccatgttgtgcaaaaaagcggttagctccttcggtcctccgatcgttgtcagaagtaagttggccgcagtgttatcactcatggttatggcagcactgcataattctcttactgtcatgccatccgtaagatgcttttctgtgactggtgagtactcaaccaagtcattctgagaatagtgtatgcggcgaccgagttgctcttgcccggcgtcaatacgggataataccgcgccacatagcagaactttaaaagtgctcatcattggaaaacgttcttcggggcgaaaactctcaaggatcttaccgctgttgagatccagttcgatgtaacccactcgtgcacccaactgatcttcagcatcttttactttcaccagcgtttctgggtgagcaaaaacaggaaggcaaaatgccgcaaaaaagggaataagggcgacacggaaatgttgaatactcatactcttcctttttcaatattattgaagcatttatcagggttattgtctcatgagcggatacatatttgaatgtatttagaaaaataaacaaataggggttccgcgcacatttccccgaaaagtgccacctgacgtctaagaaaccattattatcatgacattaacctataaaaataggcgtatcacgaggccctttcgtctcgcgcgtttcggtgatgacggtgaaaacctctgacacatgcagctcccggagacggtcacagcttgtctgtaagcggatgccgggagcagacaagcccgtcagggcgcgtcagcgggtgttggcgggtgtcggggctggcttaactatgcggcatcagagcagattgtactgagagtgcaccatatgcggtgtgaaataccgcacagatgcgtaaggagaaaataccgcatcaggcgccattcgccattcaggctgcgcaactgttgggaagggcgatcggtgcgggcctcttcgctattacgccagctggcgaaagggggatgtgctgcaaggcgattaagttgggtaacgccagggttttcccagtcacgacgttgtaaaacgacggcgcaaggaatggtgcatgcaaggagatggcgcccaacagtcccccggccacggggcctgccaccatacccacgccgaaacaagcgctcatgagcccgaagtggcgagcccgatcttccccatcggtgatgtcggcgatataggcgccagcaaccgcacctgtggcgccggtgatgccggccacgatgcgtccggcgtagaggcgattagtccaatttgttaaagacaggatatcagtggtccaggctctagttttgactcaacaatatcaccagctgaagcctatagagtacgagccatagataaaataaaagattttatttagtctccagaaaaaggggggaa

SEQ ID NO: 11 - DNA, 7512 bp, synthetic construct
  source 1..7512: mol_type = other DNA
aatgtagtcttatgcaatactcttgtagtcttgcaacatggtaacgatgagttagcaacatgccttacaaggagagaaaaagcaccgtgcatgccgattggtggaagtaaggtggtacgatcgtgccttattaggaaggcaacagacgggtctgacatggattggacgaaccactgaattgccgcattgcagagatattgtatttaagtgcctagctcgatacataaacgggtctctctggttagaccagatctgagcctgggagctctctggctaactagggaacccactgcttaagcctcaataaagcttgccttgagtgcttcaagtagtgtgtgcccgtctgttgtgtgactctggtaactagagatccctcagacccttttagtcagtgtggaaaatctctagcagtggcgcccgaacagggacttgaaagcgaaagggaaaccagaggagctctctcgacgcaggactcggcttgctgaagcgcgcacggcaagaggcgaggggcggcgactggtgagtacgccaaaaattttgactagcggaggctagaaggagagagatgggtgcgagagcgtcagtattaagcgggggagaattagatcgcgatgggaaaaaattcggttaaggccagggggaaagaaaaaatataaattaaaacatatagtatgggcaagcagggagctagaacgattcgcagttaatcctggcctgttagaaacatcagaaggctgtagacaaatactgggacagctacaaccatcccttcagacaggatcagaagaacttagatcattatataatacagtagcaaccctctattgtgtgcatcaaaggatagagataaaagacaccaaggaagctttagacaagatagaggaagagcaaaacaaaagtaagaccaccgcacagcaagcggccgctgatcttcagacctggaggaggagatatgagggacaattggagaagtgaattatataaatataaagtagtaaaaattgaaccattaggagtagcacccaccaaggcaaagagaagagtggtgcagagagaaaaaagagcagtgggaataggagctttgttccttgggttcttgggagcagcaggaagcactatgggcgcagcgtcaatgacgctgacggtacaggccagacaattattgtctggtatagtgcagcagcagaacaatttgctgagggctattgaggcgcaacagcatctgttgcaactcacagtctggggcatcaagcagctccaggcaagaatcctggctgtggaaagatacctaaaggatcaacagctcctggggatttggggttgctctggaaaactcatttgcaccactgctgtgccttggaatgctagttggagtaataaatctctggaacagatttggaatcacacgacctggatggagtgggacagagaaattaacaattacacaagcttaatacactccttaattgaagaatcgcaaaaccagcaagaaaagaatgaacaagaattattggaattagataaatgggcaagtttgtggaattggtttaacataacaaattggctgtggtatataaaattattcataatgatagtaggaggcttggtaggtttaagaatagtttttgctgtactttctatagtgaatagagttaggcagggatattcaccattatcgtttcagacccacctcccaaccccgaggggacccgacaggcccgaaggaatagaagaagaaggtggagagagagacagagacagatccattcgattagtgaacggatctcgacggtatcgataagcttgggagttccgcgttacataacttacggtaaatggcccgcctggctgaccgcccaacgacccccgcccattgacgtcaataatgacgtatgttcccatagtaacgccaatagggactttccattgacgtcaatgggtggagtatttacggtaaactgcccacttggcagtacatcaagtgtatcatatgccaagtacgccccctattgacgtcaatgacggtaaatggcccgcctggcattatgcccagtacatgaccttatgggactttcctacttggcagtacatctacgtattagtcatcgctattaccatggtgatgcggttttggcagtacatcaatgggcgtggatagcggtttgactcacggggatttccaagtctccaccccattgacgtcaatgggagtttgttttggcaccaaaatcaacgggactttccaaaatgtcgtaacaactccgccccattgacgcaaatgggcggtaggcgtgtacggtgggaggtctatataagcagagctcgtttagtgaaccgtcagatcgcctggagacgccatccacgctgttttgacctccatagaagacaccgactctagaggatccccaccatggtcttcacactcgaagatttcgttggggactggcgacagacagccggctacaacctggaccaagtccttgaacagggaggtgtgtccagtttgtttcagaatctcggggtgtccgtaactccgatccaaaggattgtcctgagcggtgaaaatgggctgaagatcgacatccatgtcatcatcccgtatgaaggtctgagcggcgaccaaatgggccagatcgaaaaaatttttaaggtggtgtaccctgtggatgatcatcactttaaggtgatcctgcactatggcacactggtaatcgacggggttacgccgaacatgatcgactatttcggacggccctatgaaggcatcgccgtgttcgacggcaaaaagatcactgtaacagggaccctgtggaacggcaacaaaattatcgacgagcgcctgatcaaccccgacggctccctgctgttccgagtaaccatcaacggagtgaccggctggcggctgtgcgaacgcattctggcgagttggaaggatgcctctggatggtcttaagtcgagaccgatttctacccctacgatgtgcccgattacgcttagtctagagggcccgcggttcgaaggtaagcctatccctaaccctctcctcggtctcgattctacgcgtaccggttagtaatgagtttggaattaattctgtggaatgtgtgtcagttagggtgtggaaagtccccaggctccccaggcaggcagaagtatgcaaagcatgcatctcaattagtcagcaaccaggtgtggaaagtccccaggctccccagcaggcagaagtatgcaaagcatgcatctcaattagtcagcaaccatagtcccgcccctaactccgcccatcccgcccctaactccgcccagttccgcccattctccgccccatggctgactaattttttttatttatgcagaggccgaggccgcctctgcctctgagctattccagaagtagtgaggaggcttttttggaggcctaggcttttgcaaaaagctcccgggagcttgtatatccattttcggatctgatcagcacgtgttgacaattaatcatcggcatagtatatcggcatagtataatacgacaaggtgaggaactaaaccatggccaagcctttgtctcaagaagaatccaccctcattgaaagagcaacggctacaatcaacagcatccccatctctgaagactacagcgtcgccagcgcagctctctctagcgacggccgcatcttcactggtgtcaatgtatatcattttactgggggaccttgtgcagaactcgtggtgctgggcactgctgctgctgcggcagctggcaacctgacttgtatcgtcgcgatcggaaatgagaacaggggcatcttgagcccctgcggacggtgccgacaggtgcttctcgatctgcatcctgggatcaaagccatagtgaaggacagtgatggacagccgacggcagttgggattcgtgaattgctgccctctggttatgtgtgggagggctaagcacaattcgagctcggtacctttaagaccaatgacttacaaggcagctgtagatcttagccactttttaaaagaaaaggggggactggaagggctaattcactcccaacgaagacaagatctgctttttgcttgtactgggtctctctggttagaccagatctgagcctgggagctctctggctaactagggaacccactgcttaagcctcaataaagcttgccttgagtgcttcaagtagtgtgtgcccgtctgttgtgtgactctggtaactagagatccctcagacccttttagtcagtgtggaaaatctctagcagtagtagttcatgtcatcttattattcagtatttataacttgcaaagaaatgaatatcagagagtgagaggaacttgtttattgcagcttataatggttacaaataaagcaatagcatcacaaatttcacaaataaagcatttttttcactgcattctagttgtggtttgtccaaactcatcaatgtatcttatcatgtctggctctagctatcccgcccctaactccgcccatcccgcccctaactccgcccagttccgcccattctccgccccatggctgactaattttttttatttatgcagaggccgaggccgcctcggcctctgagctattccagaagtagtgaggaggcttttttggaggcctagggacgtacccaattcgccctatagtgagtcgtattacgcgcgctcactggccgtcgttttacaacgtcgtgactgggaaaaccctggcgttacccaacttaatcgccttgcagcacatccccctttcgccagctggcgtaatagcgaagaggcccgcaccgatcgcccttcccaacagttgcgcagcctgaatggcgaatgggacgcgccctgtagcggcgcattaagcgcggcgggtgtggtggttacgcgcagcgtgaccgctacacttgccagcgccctagcgcccgctcctttcgctttcttcccttcctttctcgccacgttcgccggctttccccgtcaagctctaaatcgggggctccctttagggttccgatttagtgctttacggcacctcgaccccaaaaaacttgattagggtgatggttcacgtagtgggccatcgccctgatagacggtttttcgccctttgacgttggagtccacgttctttaatagtggactcttgttccaaactggaacaacactcaaccctatctcggtctattcttttgatttataagggattttgccgatttcggcctattggttaaaaaatgagctgatttaacaaaaatttaacgcgaattttaacaaaatattaacgcttacaatttaggtggcacttttcggggaaatgtgcgcggaacccctatttgtttatttttctaaatacattcaaatatgtatccgctcatgagacaataaccctgataaatgcttcaataatattgaaaaaggaagagtatgagtattcaacatttccgtgtcgcccttattcccttttttgcggcattttgccttcctgtttttgctcacccagaaacgctggtgaaagtaaaagatgctgaagatcagttgggtgcacgagtgggttacatcgaactggatctcaacagcggtaagatccttgagagttttcgccccgaagaacgttttccaatgatgagcacttttaaagttctgctatgtggcgcggtattatcccgtattgacgccgggcaagagcaactcggtcgccgcatacactattctcagaatgacttggttgagtactcaccagtcacagaaaagcatcttacggatggcatgacagtaagagaattatgcagtgctgccataaccatgagtgataacactgcggccaacttacttctgacaacgatcggaggaccgaaggagctaaccgcttttttgcacaacatgggggatcatgtaactcgccttgatcgttgggaaccggagctgaatgaagccataccaaacgacgagcgtgacaccacgatgcctgtagcaatggcaacaacgttgcgcaaactattaactggcgaactacttactctagcttcccggcaacaattaatagactggatggaggcggataaagttgcaggaccacttctgcgctcggcccttccggctggctggtttattgctgataaatctggagccggtgagcgtgggtctcgcggtatcattgcagcactggggccagatggtaagccctcccgtatcgtagttatctacacgacggggagtcaggcaactatggatgaacgaaatagacagatcgctgagataggtgcctcactgattaagcattggtaactgtcagaccaagtttactcatatatactttagattgatttaaaacttcatttttaatttaaaaggatctaggtgaagatcctttttgataatctcatgaccaaaatcccttaacgtgagttttcgttccactgagcgtcagaccccgtagaaaagatcaaaggatcttcttgagatcctttttttctgcgcgtaatctgctgcttgcaaacaaaaaaaccaccgctaccagcggtggtttgtttgccggatcaagagctaccaactctttttccgaaggtaactggcttcagcagagcgcagataccaaatactgttcttctagtgtagccgtagttaggccaccacttcaagaactctgtagcaccgcctacatacctcgctctgctaatcctgttaccagtggctgctgccagtggcgataagtcgtgtcttaccgggttggactcaagacgatagttaccggataaggcgcagcggtcgggctgaacggggggttcgtgcacacagcccagcttggagcgaacgacctacaccgaactgagatacctacagcgtgagctatgagaaagcgccacgcttcccgaagggagaaaggcggacaggtatccggtaagcggcagggtcggaacaggagagcgcacgagggagcttccagggggaaacgcctggtatctttatagtcctgtcgggtttcgccacctctgacttgagcgtcgatttttgtgatgctcgtcaggggggcggagcctatggaaaaacgccagcaacgcggcctttttacggttcctggccttttgctggccttttgctcacatgttctttcctgcgttatcccctgattctgtggataaccgtattaccgcctttgagtgagctgataccgctcgccgcagccgaacgaccgagcgcagcgagtcagtgagcgaggaagcggaagagcgcccaatacgcaaaccgcctctccccgcgcgttggccgattcattaatgcagctggcacgacaggtttcccgactggaaagcgggcagtgagcgcaacgcaattaatgtgagttagctcactcattaggcaccccaggctttacactttatgcttccggctcgtatgttgtgtggaattgtgagcggataacaatttcacacaggaaacagctatgaccatgattacgccaagcgcgcaattaaccctcactaaagggaacaaaagctggagctgcaagctt

SEQ ID NO: 12 - DNA, 7476 bp, synthetic construct
  source 1..7476: mol_type = other DNA
aatgtagtcttatgcaatactcttgtagtcttgcaacatggtaacgatgagttagcaacatgccttacaaggagagaaaaagcaccgtgcatgccgattggtggaagtaaggtggtacgatcgtgccttattaggaaggcaacagacgggtctgacatggattggacgaaccactgaattgccgcattgcagagatattgtatttaagtgcctagctcgatacataaacgggtctctctggttagaccagatctgagcctgggagctctctggctaactagggaacccactgcttaagcctcaataaagcttgccttgagtgcttcaagtagtgtgtgcccgtctgttgtgtgactctggtaactagagatccctcagacccttttagtcagtgtggaaaatctctagcagtggcgcccgaacagggacttgaaagcgaaagggaaaccagaggagctctctcgacgcaggactcggcttgctgaagcgcgcacggcaagaggcgaggggcggcgactggtgagtacgccaaaaattttgactagcggaggctagaaggagagagatgggtgcgagagcgtcagtattaagcgggggagaattagatcgcgatgggaaaaaattcggttaaggccagggggaaagaaaaaatataaattaaaacatatagtatgggcaagcagggagctagaacgattcgcagttaatcctggcctgttagaaacatcagaaggctgtagacaaatactgggacagctacaaccatcccttcagacaggatcagaagaacttagatcattatataatacagtagcaaccctctattgtgtgcatcaaaggatagagataaaagacaccaaggaagctttagacaagatagaggaagagcaaaacaaaagtaagaccaccgcacagcaagcggccgctgatcttcagacctggaggaggagatatgagggacaattggagaagtgaattatataaatataaagtagtaaaaattgaaccattaggagtagcacccaccaaggcaaagagaagagtggtgcagagagaaaaaagagcagtgggaataggagctttgttccttgggttcttgggagcagcaggaagcactatgggcgcagcgtcaatgacgctgacggtacaggccagacaattattgtctggtatagtgcagcagcagaacaatttgctgagggctattgaggcgcaacagcatctgttgcaactcacagtctggggcatcaagcagctccaggcaagaatcctggctgtggaaagatacctaaaggatcaacagctcctggggatttggggttgctctggaaaactcatttgcaccactgctgtgccttggaatgctagttggagtaataaatctctggaacagatttggaatcacacgacctggatggagtgggacagagaaattaacaattacacaagcttaatacactccttaattgaagaatcgcaaaaccagcaagaaaagaatgaacaagaattattggaattagataaatgggcaagtttgtggaattggtttaacataacaaattggctgtggtatataaaattattcataatgatagtaggaggcttggtaggtttaagaatagtttttgctgtactttctatagtgaatagagttaggcagggatattcaccattatcgtttcagacccacctcccaaccccgaggggacccgacaggcccgaaggaatagaagaagaaggtggagagagagacagagacagatccattcgattagtgaacggatctcgacggtatcgataagcttgggagttccgcgttacataacttacggtaaatggcccgcctggctgaccgcccaacgacccccgcccattgacgtcaataatgacgtatgttcccatagtaacgccaatagggactttccattgacgtcaatgggtggagtatttacggtaaactgcccacttggcagtacatcaagtgtatcatatgccaagtacgccccctattgacgtcaatgacggtaaatggcccgcctggcattatgcccagtacatgaccttatgggactttcctacttggcagtacatctacgtattagtcatcgctattaccatggtgatgcggttttggcagtacatcaatgggcgtggatagcggtttgactcacggggatttccaagtctccaccccattgacgtcaatgggagtttgttttggcaccaaaatcaacgggactttccaaaatgtcgtaacaactccgccccattgacgcaaatgggcggtaggcgtgtacggtgggaggtctatataagcagagctcgtttagtgaaccgtcagatcgcctggagacgccatccacgctgttttgacctccatagaagacaccgactctagaggatccccaccatgaagcccaccgagaacaacgaagacttcaacatcgtggccgtggccagcaacttcgcgaccacggatctcgatgctgaccgcgggaagttgcccggcaagaagctgccgctggaggtgctcaaagagatggaagccaatgcccggaaagctggctgcaccaggggctgtctgatctgcctgtcccacatcaagtgcacgcccaagatgaagaagttcatcccaggacgctgccacacctacgaaggcgacaaagagtccgcacagggcggcataggcgaggcgatcgtcgacattcctgagattcctgggttcaaggacttggagcccatggagcagttcatcgcacaggtcgatctgtgtgtggactgcacaactggctgcctcaaagggcttgccaacgtgcagtgttctgacctgctcaagaagtggctgccgcaacgctgtgcgacctttgccagcaagatccagggccaggtggacaagatcaagggggccggtggtgacctcgagaccgatttctacgactacaaggacgacgatgacaagtagtctagagggcccgcggttcgaaggtaagcctatccctaaccctctcctcggtctcgattctacgcgtaccggttagtaatgagtttggaattaattctgtggaatgtgtgtcagttagggtgtggaaagtccccaggctccccaggcaggcagaagtatgcaaagcatgcatctcaattagtcagcaaccaggtgtggaaagtccccaggctccccagcaggcagaagtatgcaaagcatgcatctcaattagtcagcaaccatagtcccgcccctaactccgcccatcccgcccctaactccgcccagttccgcccattctccgccccatggctgactaattttttttatttatgcagaggccgaggccgcctctgcctctgagctattccagaagtagtgaggaggcttttttggaggcctaggcttttgcaaaaagctcccgggagcttgtatatccattttcggatctgatcagcacgtgttgacaattaatcatcggcatagtatatcggcatagtataatacgacaaggtgaggaactaaaccatggccaagcctttgtctcaagaagaatccaccctcattgaaagagcaacggctacaatcaacagcatccccatctctgaagactacagcgtcgccagcgcagctctctctagcgacggccgcatcttcactggtgtcaatgtatatcattttactgggggaccttgtgcagaactcgtggtgctgggcactgctgctgctgcggcagctggcaacctgacttgtatcgtcgcgatcggaaatgagaacaggggcatcttgagcccctgcggacggtgccgacaggtgcttctcgatctgcatcctgggatcaaagccatagtgaaggacagtgatggacagccgacggcagttgggattcgtgaattgctgccctctggttatgtgtgggagggctaagcacaattcgagctcggtacctttaagaccaatgacttacaaggcagctgtagatcttagccactttttaaaagaaaaggggggactggaagggctaattcactcccaacgaagacaagatctgctttttgcttgtactgggtctctctggttagaccagatctgagcctgggagctctctggctaactagggaacccactgcttaagcctcaataaagcttgccttgagtgcttcaagtagtgtgtgcccgtctgttgtgtgactctggtaactagagatccctcagacccttttagtcagtgtggaaaatctctagcagtagtagttcatgtcatcttattattcagtatttataacttgcaaagaaatgaatatcagagagtgagaggaacttgtttattgcagcttataatggttacaaataaagcaatagcatcacaaatttcacaaataaagcatttttttcactgcattctagttgtggtttgtccaaactcatcaatgtatcttatcatgtctggctctagctatcccgcccctaactccgcccatcccgcccctaactccgcccagttccgcccattctccgccccatggctgactaattttttttatttatgcagaggccgaggccgcctcggcctctgagctattccagaagtagtgaggaggcttttttggaggcctagggacgtacccaattcgccctatagtgagtcgtattacgcgcgctcactggccgtcgttttacaacgtcgtgactgggaaaaccctggcgttacccaacttaatcgccttgcagcacatccccctttcgccagctggcgtaatagcgaagaggcccgcaccgatcgcccttcccaacagttgcgcagcctgaatggcgaatgggacgcgccctgtagcggcgcattaagcgcggcgggtgtggtggttacgcgcagcgtgaccgctacacttgccagcgccctagcgcccgctcctttcgctttcttcccttcctttctcgccacgttcgccggctttccccgtcaagctctaaatcgggggctccctttagggttccgatttagtgctttacggcacctcgaccccaaaaaacttgattagggtgatggttcacgtagtgggccatcgccctgatagacggtttttcgccctttgacgttggagtccacgttctttaatagtggactcttgttccaaactggaacaacactcaaccctatctcggtctattcttttgatttataagggattttgccgatttcggcctattggttaaaaaatgagctgatttaacaaaaatttaacgcgaattttaacaaaatattaacgcttacaatttaggtggcacttttcggggaaatgtgcgcggaacccctatttgtttatttttctaaatacattcaaatatgtatccgctcatgagacaataaccctgataaatgcttcaataatattgaaaaaggaagagtatgagtattcaacatttccgtgtcgcccttattcccttttttgcggcattttgccttcctgtttttgctcacccagaaacgctggtgaaagtaaaagatgctgaagatcagttgggtgcacgagtgggttacatcgaactggatctcaacagcggtaagatccttgagagttttcgccccgaagaacgttttccaatgatgagcacttttaaagttctgctatgtggcgcggtattatcccgtattgacgccgggcaagagcaactcggtcgccgcatacactattctcagaatgacttggttgagtactcaccagtcacagaaaagcatcttacggatggcatgacagtaagagaattatgcagtgctgccataaccatgagtgataacactgcggccaacttacttctgacaacgatcggaggaccgaaggagctaaccgcttttttgcacaacatgggggatcatgtaactcgccttgatcgttgggaaccggagctgaatgaagccataccaaacgacgagcgtgacaccacgatgcctgtagcaatggcaacaacgttgcgcaaactattaactggcgaactacttactctagcttcccggcaacaattaatagactggatggaggcggataaagttgcaggaccacttctgcgctcggcccttccggctggctggtttattgctgataaatctggagccggtgagcgtgggtctcgcggtatcattgcagcactggggccagatggtaagccctcccgtatcgtagttatctacacgacggggagtcaggcaactatggatgaacgaaatagacagatcgctgagataggtgcctcactgattaagcattggtaactgtcagaccaagtttactcatatatactttagattgatttaaaacttcatttttaatttaaaaggatctaggtgaagatcctttttgataatctcatgaccaaaatcccttaacgtgagttttcgttccactgagcgtcagaccccgtagaaaagatcaaaggatcttcttgagatcctttttttctgcgcgtaatctgctgcttgcaaacaaaaaaaccaccgctaccagcggtggtttgtttgccggatcaagagctaccaactctttttccgaaggtaactggcttcagcagagcgcagataccaaatactgttcttctagtgtagccgtagttaggccaccacttcaagaactctgtagcaccgcctacatacctcgctctgctaatcctgttaccagtggctgctgccagtggcgataagtcgtgtcttaccgggttggactcaagacgatagttaccggataaggcgcagcggtcgggctgaacggggggttcgtgcacacagcccagcttggagcgaacgacctacaccgaactgagatacctacagcgtgagctatgagaaagcgccacgcttcccgaagggagaaaggcggacaggtatccggtaagcggcagggtcggaacaggagagcgcacgagggagcttccagggggaaacgcctggtatctttatagtcctgtcgggtttcgccacctctgacttgagcgtcgatttttgtgatgctcgtcaggggggcggagcctatggaaaaacgccagcaacgcggcctttttacggttcctggccttttgctggccttttgctcacatgttctttcctgcgttatcccctgattctgtggataaccgtattaccgcctttgagtgagctgataccgctcgccgcagccgaacgaccgagcgcagcgagtcagtgagcgaggaagcggaagagcgcccaatacgcaaaccgcctctccccgcgcgttggccgattcattaatgcagctggcacgacaggtttcccgactggaaagcgggcagtgagcgcaacgcaattaatgtgagttagctcactcattaggcaccccaggctttacactttatgcttccggctcgtatgttgtgtggaattgtgagcggataacaatttcacacaggaaacagctatgaccatgattacgccaagcgcgcaattaaccctcactaaagggaacaaaagctggagctgcaagctt

SEQ ID NO: 13 - DNA, 2000 bp, synthetic construct
  source 1..2000: mol_type = other DNA
aaaaaaaaaaaaaaaaaaaaaaaaaaaaaaaaaaaaaaaaaaaaaaaaaaaaaaaaaaaaaaaaaaaaaaaaaaaaaaaaaaaaaaaaaaaaaaaaaaaaaaaaaaaaaaaaaaaaaaaaaaaaaaaaaaaaaaaaaaaaaaaaaaaaaaaaaaaaaaaaaaaaaaaaaaaaaaaaaaaaaaaaaaaaaaaaaaaaaaaaaaaaaaaaaaaaaaaaaaaaaaaaaaaaaaaaaaaaaaaaaaaaaaaaaaaaaaaaaaaaaaaaaaaaaaaaaaaaaaaaaaaaaaaaaaaaaaaaaaaaaaaaaaaaaaaaaaaaaaaaaaaaaaaaaaaaaaaaaaaaaaaaaaaaaaaaaaaaaaaaaaaaaaaaaaaaaaaaaaaaaaaaaaaaaaaaaaaaaaaaaaaaaaaaaaaaaaaaaaaaaaaaaaaaaaaaaaaaaaaaaaaaaaaaaaaaaaaaaaaaaaaaaaaaaaaaaaaaaaaaaaaaaaaaaaaaaaaaaaaaaaaaaaaaaaaaaaaaaaaaaaaaaaaaaaaaaaaaaaaaaaaaaaaaaaaaaaaaaaaaaaaaaaaaaaaaaaaaaaaaaaaaaaaaaaaaaaaaaaaaaaaaaaaaaaaaaaaaaaaaaaaaaaaaaaaaaaaaaaaaaaaaaaaaaaaaaaaaaaaaaaaaaaaaaaaaaaaaaaaaaaaaaaaaaaaaaaaaaaaaaaaaaaaaaaaaaaaaaaaaaaaaaaaaaaaaaaaaaaaaaaaaaaaaaaaaaaaaaaaaaaaaaaaaaaaaaaaaaaaaaaaaaaaaaaaaaaaaaaaaaaaaaaaaaaaaaaaaaaaaaaaaaaaaaaaaaaaaaaaaaaaaaaaaaaaaaaaaaaaaaaaaaaaaaaaaaaaaaaaaaaaaaaaaaaaaaaaaaaaaaaaaaaaaaaaaaaaaaaaaaaaaaaaaaaaaaaaaaaaaaaaaaaaaaaaaaaaaaaaaaaaaaaaaaaaaaaaaaaaaaaaaaaaaaaaaaaaaaaaaaaaaaaaaaaaaaaaaaaaaaaaaaaaaaaaaaaaaaaaaaaaaaaaaaaaaaaaaaaaaaaaaaaaaaaaaaaaaaaaaaaaaaaaaaaaaaaaaaaaaaaaaaaaaaaaaaaaaaaaaaaaaaaaaaaaaaaaaaaaaaaaaaaaaaaaaaaaaaaaaaaaaaaaaaaaaaaaaaaaaaaaaaaaaaaaaaaaaaaaaaaaaaaaaaaaaaaaaaaaaaaaaaaaaaaaaaaaaaaaaaaaaaaaaaaaaaaaaaaaaaaaaaaaaaaaaaaaaaaaaaaaaaaaaaaaaaaaaaaaaaaaaaaaaaaaaaaaaaaaaaaaaaaaaaaaaaaaaaaaaaaaaaaaaaaaaaaaaaaaaaaaaaaaaaaaaaaaaaaaaaaaaaaaaaaaaaaaaaaaaaaaaaaaaaaaaaaaaaaaaaaaaaaaaaaaaaaaaaaaaaaaaaaaaaaaaaaaaaaaaaaaaaaaaaaaaaaaaaaaaaaaaaaaaaaaaaaaaaaaaaaaaaaaaaaaaaaaaaaaaaaaaaaaaaaaaaaaaaaaaaaaaaaaaaaaaaaaaaaaaaaaaaaaaaaaaaaaaaaaaaaaaaaaaaaaaaaaaaaaaaaaaaaaaaaaaaaaaaaaaaaaaaaaaaaaaaaaaaaaaaaaaaaaaaaaaaaaaaaaaaaaaaaaaaaaaaaaaaaaaaaaaaaaaaaaaaaaaaaaaaaaaaaaaaaaaaaaaaaaaaaaaaaaaaaaaaaaaaaaaaaaaaaaaaaaaaaaaaaaaaaaaaaaaaaaaaaaaaaaaaaaaaaaaaaaaaaaaaaaaaaaaaaaaaaaaaaaaaaaaaaaaaaaaaaaaaaaaaaaaaaaaaaaaaaaaaaaaaaaaaaaaaaaaaaaaaaaaaaaaaaaaaaaaaaaaaaaaaaaaaaaaaaaaaaaaaaaaaaaaaaaaaaaaaaaaaaaaaaaaaaaaaaaaaaaaaaaaaaaaaaaaaaaaaaaaaaaaaaaaaaaaaaaaaaaaaaaaaaaa

SEQ ID NO: 14 - DNA, 1358 bp, synthetic construct
  source 1..1358: mol_type = other DNA
aaaaaaaaaaaaaaaaaaaaaaaaaaaaaaaaaaaaaaaaaaaaaaaaaaaaaaaaaaaaaaaaaaaaaaaaaaaaaaaaaaaaaaaaaaaaaaaaaaaaaaaaaaaaaaaaaaaaaaaaaaaaaaaaaaaaaaaaaaaaaaaaaaaaaaaaaaaaaaaaaaaaaaaaaaaaaaaaaaaaaaaaaaaaaaaaaaaaaaaaaaaaaaaaaaaaaaaaaaaaaaaaaaaaaaaaaaaaaaaaaaaaaaaaaaaaaaaaaaaaaaaaaaaaaaaaaaaaaaaaaaaaaaaaaaaaaaaaaaaaaaaaaaaaaaaaaaaaaaaaaaaaaaaaaaaaaaaaaaaaaaaaaaaaaaaaaaaaaaaaaaaaaaaaaaaaaaaaaaaaaaaaaaaaaaaaaaaaaaaaaaaaaaaaaaaaaaaaaaaaaaaaaaaaaaaaaaaaaaaaaaaaaaaaaaaaaaaaaaaaaaaaaaaaaaaaaaaaaaaaaaaaaaaaaaaaaaaaaaaaaaaaaaaaaaaaaaaaaaaaaaaaaaaaaaaaaaaaaaaaaaaaaaaaaaaaaaaaaaaaaaaaaaaaaaaaaaaaaaaaaaaaaaaaaaaaaaaaaaaaaaaaaaaaaaaaaaaaaaaaaaaaaaaaaaaaaaaaaaaaaaaaaaaaaaaaaaaaaaaaaaaaaaaaaaaaaaaaaaaaaaaaaaaaaaaaaaaaaaaaaaaaaaaaaaaaaaaaaaaaaaaaaaaaaaaaaaaaaaaaaaaaaaaaaaaaaaaaaaaaaaaaaaaaaaaaaaaaaaaaaaaaaaaaaaaaaaaaaaaaaaaaaaaaaaaaaaaaaaaaaaaaaaaaaaaaaaaaaaaaaaaaaaaaaaaaaaaaaaaaaaaaaaaaaaaaaaaaaaaaaaaaaaaaaaaaaaaaaaaaaaaaaaaaaaaaaaaaaaaaaaaaaaaaaaaaaaaaaaaaaaaaaaaaaaaaaaaaaaaaaaaaaaaaaaaaaaaaaaaaaaaaaaaaaaaaaaaaaaaaaaaaaaaaaaaaaaaaaaaaaaaaaaaaaaaaaaaaaaaaaaaaaaaaaaaaaaaaaaaaaaaaaaaaaaaaaaaaaaaaaaaaaaaaaaaaaaaaaaaaaaaaaaaaaaaaaaaaaaaaaaaaaaaaaaaaaaaaaaaaaaaaaaaaaaaaaaaaaaaaaaaaaaaaaaaaaaaaaaaaaaaaaaaaaaaaaaaaaaaaaaaaaaaaaaaaaaaaaaaaaaaaaaaaaaaaaaaaaaaaaaaaaaaaaaaaaaaaaaaaaaaaaaaaaaaaaaaaaaaaaaaaaaaaaaaaaaaaaaaaaaaaaaaaaaaaaaaaaaaaaaaaaaaaaaaaaaaaaaaaaaaaaaaaaaaaaaaaaa

SEQ ID NO: 15 - DNA, 5016 bp, synthetic construct
  source 1..5016: mol_type = other DNA
tttttttttttttttttttttttttttttttttttttttttttttttttttttttttttttttttttttttttttttttttttttttttttttttttttttttttttttttttttttttttttttttttttttttttttttttttttttttttttttttttttttttttttttttttttttttttttttttttttttttttttttttttttttttttttttttttttttttttttttttttttttttttttttttttttttttttttttttttttttttttttttttttttttttttttttttttttttttttttttttttttttttttttttttttttttttttttttttttttttttttttttttttttttttttttttttttttttttttttttttttttttttttttttttttttttttttttttttttttttttttttttttttttttttttttttttttttttttttttttttttttttttttttttttttttttttttttttttttttttttttttttttttttttttttttttttttttttttttttttttttttttttttttttttttttttttttttttttttttttttttttttttttttttttttttttttttttttttttttttttttttttttttttttttttttttttttttttttttttttttttttttttttttttttttttttttttttttttttttttttttttttttttttttttttttttttttttttttttttttttttttttttttttttttttttttttttttttttttttttttttttttttttttttttttttttttttttttttttttttttttttttttttttttttttttttttttttttttttttttttttttttttttttttttttttttttttttttttttttttttttttttttttttttttttttttttttttttttttttttttttttttttttttttttttttttttttttttttttttttttttttttttttttttttttttttttttttttttttttttttttttttttttttttttttttttttttttttttttttttttttttttttttttttttttttttttttttttttttttttttttttttttttttttttttttttttttttttttttttttttttttttttttttttttttttttttttttttttttttttttttttttttttttttttttttttttttttttttttttttttttttttttttttttttttttttttttttttttttttttttttttttttttttttttttttttttttttttttttttttttttttttttttttttttttttttttttttttttttttttttttttttttttttttttttttttttttttttttttttttttttttttttttttttttttttttttttttttttttttttttttttttttttttttttttttttttttttttttttttttttttttttttttttttttttttttttttttttttttttttttttttttttttttttttttttttttttttttttttttttttttttttttttttttttttttttttttttttttttttttttttttttttttttttttttttttttttttttttttttttttttttttttttttttttttttttttttttttttttttttttttttttttttttttttttttttttttttttttttttttttttttttttttttttttttttttttttttttttttttttttttttttttttttttttttttttttttttttttttttttttttttttttttttttttttttttttttttttttttttttttttttttttttttttttttttttttttttttttttttttttttttttttttttttttttttttttttttttttttttttttttttttttttttttttttttttttttttttttttttttttttttttttttttttttttttttttttttttttttttttttttttttttttttttttttttttttttttttttttttttttttttttttttttttttttttttttttttttttttttttttttttttttttttttttttttttttttttttttttttttttttttttttttttttttttttttttttttttttttttttttttttttttttttttttttttttttttttttttttttttttttttttttttttttttttttttttttttttttttttttttttttttttttttttttttttttttttttttttttttttttttttttttttttttttttttttttttttttttttttttttttttttttttttttttttttttttttttttttttttttttttttttttttttttttttttttttttttttttttttttttttttttttttttttttttttttttttttttttttttttttttttttttttttttttttttttttttttttttttttttttttttttttttttttttttttttttttttttttttttttttttttttttttttttttttttttttttttttttttttttttttttttttttttttttttttttttttttttttttttttttttttttttttttttttttttttttttttttttttttttttttttttttttttttttttttttttttttttttttttttttttttttttttttttttttttttttttttttttttttttttttttttttttttttttttttttttttttttttttttttttttttttttttttttttttttttttttttttttttttttttttttttttttttttttttttttttttttttttttttttttttttttttttttttttttttttttttttttttttttttttttttttttttttttttttttttttttttttttttttttttttttttttttttttttttttttttttttttttttttttttttttttttttttttttttttttttttttttttttttttttttttttttttttttttttttttttttttttttttttttttttttttttttttttttttttttttttttttttttttttttttttttttttttttttttttttttttttttttttttttttttttttttttttttttttttttttttttttttttttttttttttttttttttttttttttttttttttttttttttttttttttttttttttttttttttttttttttttttttttttttttttttttttttttttttttttttttttttttttttttttttttttttttttttttttttttttttttttttttttttttttttttttttttttttttttttttttttttttttttttttttttttttttttttttttttttttttttttttttttttttttttttttttttttttttttttttttttttttttttttttttttttttttttttttttttttttttttttttttttttttttttttttttttttttttttttttttttttttttttttttttttttttttttttttttttttttttttttttttttttttttttttttttttttttttttttttttttttttttttttttttttttttttttttttttttttttttttttttttttttttttttttttttttttttttttttttttttttttttttttttttttttttttttttttttttttttttttttttttttttttttttttttttttttttttttttttttttttttttttttttttttttttttttttttttttttttttttttttttttttttttttttttttttttttttttttttttttttttttttttttttttttttttttttttttttttttttttttttttttttttttttttttttttttttttttttttttttttttttttttttttttttttttttttttttttttttttttttttttttttttttttttttttttttttttttttttttttttttttttttttttttttttttttttttttttttttttttttttttttttttttttttttttttttttttttttttttttttttttttttttttttttttttttttttttttttttttttttttttttttttttttttttttttttttttttttttttttttttttttttttttttttttttttttttttttttttttttttttttttttttttttttttttttttttttttttttttttttttttttttttttttttttttttttttttttttttttttttttttttttttttttttttttttttttttttttttttttttttttttttttttttttttttttttttttttttttttttttttttttttttttttttttttttttttttttttttttttttttttttttttttttttttttttttttttttttttttttttttttttttttttttttttttttttttttttttttttttttttttttttttttttttttttttttttttttttttttttttttttttttttttttttttttttttttttttttttttttttttttttttttttttttttttttttttttttttttttttttttttttttttttttttttttttttttttttttttttttttttttttttttttttttttttttttttttttttttttttttttttttttttttttttttttttttttttttttttttttttttttttttttttttttttttttttttttttttttttttttttttttttttttttttttttttttttttttttttttttttttttttttttttttttttttttttttttttttttttttttttttttttttttttttttttttttttttttttttttttttttttttttttttttttttttttttttttttttttttttttttttttttttttttttttttttttttttttttttttttttttttttttttttttttttttttttttttttttttttttttttttttttttttttttttttttttttt

SEQ ID NO: 16 - DNA, 2400 bp, synthetic construct
  source 1..2400: mol_type = other DNA
tttttttttttttttttttttttttttttttttttttttttttttttttttttttttttttttttttttttttttttttttttttttttttttttttttttttttttttttttttttttttttttttttttttttttttttttttttttttttttttttttttttttttttttttttttttttttttttttttttttttttttttttttttttttttttttttttttttttttttttttttttttttttttttttttttttttttttttttttttttttttttttttttttttttttttttttttttttttttttttttttttttttttttttttttttttttttttttttttttttttttttttttttttttttttttttttttttttttttttttttttttttttttttttttttttttttttttttttttttttttttttttttttttttttttttttttttttttttttttttttttttttttttttttttttttttttttttttttttttttttttttttttttttttttttttttttttttttttttttttttttttttttttttttttttttttttttttttttttttttttttttttttttttttttttttttttttttttttttttttttttttttttttttttttttttttttttttttttttttttttttttttttttttttttttttttttttttttttttttttttttttttttttttttttttttttttttttttttttttttttttttttttttttttttttttttttttttttttttttttttttttttttttttttttttttttttttttttttttttttttttttttttttttttttttttttttttttttttttttttttttttttttttttttttttttttttttttttttttttttttttttttttttttttttttttttttttttttttttttttttttttttttttttttttttttttttttttttttttttttttttttttttttttttttttttttttttttttttttttttttttttttttttttttttttttttttttttttttttttttttttttttttttttttttttttttttttttttttttttttttttttttttttttttttttttttttttttttttttttttttttttttttttttttttttttttttttttttttttttttttttttttttttttttttttttttttttttttttttttttttttttttttttttttttttttttttttttttttttttttttttttttttttttttttttttttttttttttttttttttttttttttttttttttttttttttttttttttttttttttttttttttttttttttttttttttttttttttttttttttttttttttttttttttttttttttttttttttttttttttttttttttttttttttttttttttttttttttttttttttttttttttttttttttttttttttttttttttttttttttttttttttttttttttttttttttttttttttttttttttttttttttttttttttttttttttttttttttttttttttttttttttttttttttttttttttttttttttttttttttttttttttttttttttttttttttttttttttttttttttttttttttttttttttttttttttttttttttttttttttttttttttttttttttttttttttttttttttttttttttttttttttttttttttttttttttttttttttttttttttttttttttttttttttttttttttttttttttttttttttttttttttttttttttttttttttttttttttttttttttttttttttttttttttttttttttttttttttttttttttttttttttttttttttttttttttttttttttttttttttttttttttttttttttttttttttttttttttttttttttttttttttttttttttttttttttttttttttttttttttttttttttttttttttttttttttttttttttttttttttttttttttttttttttttttttttttttttttttttttttttttttttttttttttttttttttttttttttttttttttttttttttttttttttttttttttttttttttttttttttttttttttttttttttttttttttttttttttttttttttttttttttttttttttttttttttttttttttttttttttttttttttttttttttttttttttttttttttttttttttttttttttttttttttttttttttttttttttttttttttttttttttttttttttttttttttttttttttttttttttttt

SEQ ID NO: 17 - DNA, 1632 bp, synthetic construct
  source 1..1632: mol_type = other DNA
atggccgacaagaacatcctgtacggccccgagcctttctaccctctggaagatggaacagccggcgagcagatgttcgacgccctgagcagatatgccgccattcctggatgtatcgccctgacaaacgcccacaccaaagaaaacgtgctgtacgaagagttcctgaagctgagctgtcggctggccgagagcttcaagaagtacggcctgaagcagaacgacacaatcgccgtgtgcagcgagaacagcctccagttcttcctgcctgtgatcgccagcctgtacctgggcattattgtggcccctgtgaacgacaagtacatcgagagagagctgatccacagcctgggcatcgtgaagccccggatcgtgttctgctccaagaacaccttccagaaggtgctgaacgtcaagagcaagctgaagtccatcgagacaatcatcatcctggacctgaacgaggacctcggcggctaccagtgcctgaacaacttcatcagccagaacagcgacagcaacctggacgtgaagaagttcaagccctacagcttcaaccgggacgaccaggtggcctccatcatgtttagcagcggcaccaccggactgcccaaaggcgttatgctgacccacaagaatatcgtggcccggttctctatcgctaaggaccccaccttcggcaacgccatcaatcctacaagcgctatcctgacagtgatccccttccaccacggcttcggcatgatgaccacactgggctacttcacctgtggcttcagagtggtgctgatgcacaccttcgaggaaaagctgtttctccagagcctccaggactacaaggtggaaagcaccctgctggtgcctactctgatggccttcctggctaagtctgccctggtcgagaagtacgatctgagccacctgaaagagatcgcctctggcggagcccctctgagcaaagaaatcggcgagatggtcaagaagcggttcaagctgaacttcgtgcggcaaggctatggcctgaccgagacaacaagcgccgtgctgattacccctaagggcgacgccaagcctggcagcacaggcaaaattgtgcctctgcacgccgtgaaggtggtggaccctaccacaggcaagatcctgggacctaatgagcccggcgagctgtacttcaagggacccatgattatgaagggctactacaacaacgaggaagccaccaaggccattatcgacaacgacggctggctgcggagcggcgatattgcctactacgacaatgacggccacttctacatcgtggacagactgaagtccctcatcaagtacaagggctatcaggtggccccagccgagatcgagggtatcctgctgcaacacccctatatcgtggatgccggcgtgacaggcatccctgatgaagctgctggcgaacttccagcagctggcgtggtggttcagaccggcaagtacctgaatgagcagatcgtgcaggactacgtggcctctcaggtgtccacagccaaatggctgagaggcggcgtgaagttcctggacgagatcccaaagggctctaccggcaagatcgacagaaaggtgctgcggcagatgctggaaaagcacaccaatggc

SEQ ID NO: 18 - DNA, 1632 bp, synthetic construct
  source 1..1632: mol_type = other DNA
atggccgacaagaacatcctgtacggccccgagcctttctaccctctggaagatggaacagccggcgagcagatgttcgacgccctgagcagatacgccgacattcctggatgtatcgccctgacaaacgcccacaccaaagaaaacgtgctgtacgaagagttcctgaagctgagctgtcggctggccgagagcttcaagaagtacggcctgaagcagaacgacacaatcgccgtgtgcagcgagaacagcctccagttcttcctgcctgtgatcgccagcctgtacctgggcattattgtggcccctgtgaacgacaagtacatcgagagagagctgatccacagcctgggcatcgtgaagccccggatcgtgttctgctccaagaacaccttccagaaggtgctgaacgtcaagagcaagctgaagtccatcgagacaatcatcatcctggacctgaacgacgacctcggcggctaccagtgcctgaacaacttcatcagccagaacagcgacagcaacctggacgtgaagaagttcaagccctacagcttcaaccgggacgaccaggtggccctgattatgtttagcagcggcaccaccggactgcccaaaggcgttatgctgacccacaagaatatcgtggcccggttctctatcgctaaggaccccaccttcggcaacgccatcaatcctacaagcgctatcctgacagtgatccccttccaccacggcttcggcatgatgaccacactgggctacttcacctgtggcttcagagtggtgctgatgcacaccttcgaggaaaagctgtttctccagagcctccaggactacaaggtggaaagcaccctgctggtgcctactctgatggccttcctggctaagtctgccctggtcgagaagtacgatctgagccacctgaaagagatcgcctctggcggagcccctctgagcaaagaaatcggcgagatggtcaagaagcggttcaagctgaacttcgtgcggcaaggctatggcctgaccgagacaacaagcgccgtgctgattacccctaagggcgacgccaagcctggcagcacaggcaagattgtgcctttccacgccgtgaaggtggtggaccctaccaccggaaagatcctgggacctaatgagcccggcgagctgtacttcaagggacccatgattatgaagggctactacaacaacgaggaagccaccaaggccattatcgacaacgacggctggctgcggagcggcgatattgcctactacgacaatgacggccacttctacatcgtggacagactgaagtccctcatcaagtacaagggctaccaggtcgcccctgccgagattgagggtatcctgctgcaacacccctatatcgtggatgccggcgtgacaggcatccctgatgaagctgctggcgaacttccagcagctggcgtggtggttcagaccggcaagtacctgaatgagcagatcgtgcaggactacgtggcctctcaggtgtccacagccaaatggctgagaggcggcgtgatcttcctggacgagatcccaaagggctctaccggcaagatcgacagaaaggtgctgcggcagatgctggaaaagcacaccaatggc

SEQ ID NO: 19 - DNA, 1632 bp, synthetic construct
  source 1..1632: mol_type = other DNA
atggccgacaagaacatcctgtacggccccgagcctttctaccctctggctgatggaacagccggcgagcagatgttcgatgccctgagcagatacgccgacatcagcggatgtatcgccctgacaaacgcccacaccaaagaaaacgtgctgtacgaagagttcctgaagctgagctgtcggctggccgagagcttcaagaagtacggcctgaagcagaacgacacaatcgccgtgtgcagcgagaacggcctccagttctttctgcctgtgatcgccagcctgtacctgggcattatcgctgcccctgtgtccgataagtacatcgagagagagctgatccacagcctgggcatcgtgaagccccggatcatcttctgctccaagaacaccttccagaaggtgctgaacgtcaagagcaagctgaagtccgtggaaaccatcatcatcctggacctgaacgaggacctcggcggctaccagtgcctgaacaacttcatctctcagaacagcgacagcaacctggacgtgaagaagttcaagccctacagcttcaaccgggacgaccaggtggccctggtcatgtttagctctggcacaaccggcgtgcccaagggcgttatgctgacccacaagaatatcgtggcccggttcagcctggctaaggaccctaccttcggcaacgccatcaatcccaccaccgctatcctgacagtgatccccttccaccacggcttcggcatgatgaccacactgggctacttcacctgtggcttcagagtggtgctgatgcacaccttcgaggaaaagctgtttctccagagcctccaggactacaaggtggaaagcaccctgctggtgcctactctgatggcctttctggccaagtctgccctggtcgagaagtacgatctgagccacctgaaagagatcgcctctggcggagcccctctgagcaaagaaatcggcgagatggtcaagaagcggttcaagctgaacttcgtgcggcaaggctatggcctgaccgagacaacaagcgccgtgctgattacccctaagggcgacgctagacctggcagcacaggcaagatcgtgcctttccacgccgtgaaggtggtggaccctacaaccggcaagatcctgggacctaatgagcccggcgagctgtactttaagggcgccatgattatgaagggctactacaacaacgaggaagccaccaaggccattatcgacaacgacggctggctgcggagcggcgatattgcctactacgacaatgacggccacttctacatcgtggacagactgaagtccctcatcaagtacaagggctaccaggtcgcccctgccgagattgagggtatcctgctgcaacacccctatatcgtggatgccggcgtgacaggcatccctgatgaagctgctggcgaacttccagcagcaggcgtggtggttcagaccggcaagtacctgaatgagcagatcgtgcaggacttcgtgtccagccaggtgtccacagccaaatggctgagaggcggcgtgaagttcctggacgagatcccaaagggctccaccggaaagatcgacagaaaggtgctgcggcagatgtttgagaagcacaccaacggc

SEQ ID NO: 20 - DNA, 1632 bp, synthetic construct
  source 1..1632: mol_type = other DNA
atggccgacaagaacatcctgtacggccccgagcctttctaccctctggctgatggaacagccggcgagcagatgttctacgccctgagcagatacgccgacatcagcggatgtatcgccctgacaaacgcccacaccaaagaaaacgtgctgtacgaagagttcctgaagctgagctgtcggctggccgagagcttcaagaagtacggcctgaagcagaacgacacaatcgccgtgtgcagcgagaacggcctccagttcttcctgcctatcattgccagcctgtacctgggcatcattgctgcccctgtgtccgataagtacatcgagagagagctgatccactctctgggcatcgtgaagccccggatcatcttctgctccaagaacaccttccagaaggtgctgaacgtcaagagcaagctgaaatacgtggaaaccatcatcatcctggacctgaacgaggacctcggcggctaccagtgcctgaacaacttcatctctcagaacagcgacatcaacctggacgtcaagaagttcaagccctacagcttcaaccgggacgaccaggtggccctggtcatgtttagctctggcacaaccggcgtgtccaagggcgtgatgctgacccacaagaatatcgtggcccggttcagcctggctaaggaccctaccttcggcaacgccatcaatcccaccaccgctatcctgacagtgatccccttccaccacggcttcggcatgatgaccacactgggctacttcacctgtggcttcagagtggtgctgatgcacaccttcgaggaaaagctgtttctccagagcctccaggactacaaggtggaaagcaccctgctggtgcctactctgatggcctttctggctaagagcgccctggtcgagaagtacgatctgagccacctgaaagagatcgcctctggcggagcccctctgagcaaagaaatcggcgagatggtcaagaagcggttcaagctgaacttcgtgcggcaaggctatggcctgaccgagacaacaagcgccgtgctgattacccctaacaacgatgtgcggcctggcagcacaggcaagatcgtgccttttcacgccgtgaaggtggtggaccctacaaccggcaagatcctgggacctaatgagcccggcgagctgtacttcaagggcgacatgattatgaagggctactacaacaacgaggaagccaccaaggccattatcaacaaggacggctggctgcggagcggcgacattgcctactatgacaacgacggccacttctacatcgtggaccggctgaagtccctgattaagtacaagggctaccaggtcgcccctgccgagattgagggtatcctgctgcaacacccctatatcgtggatgccggcgtgacaggcatccctgatgaagctgctggcgaacttccagcagctggcgtggtggttcagaccggcaagtacctgaatgagcagatcgtgcagaatttcgtgtccagccaggtgtccaccgccaagtggcttagaggcggcgtgaagttcctggacgagatccctaaaggctccaccggaaagatcgacagaaaggtgctgcgccagatgttcgagaagcacaccaatggc

SEQ ID NO: 21 - DNA, 1626 bp, synthetic construct
  source 1..1626: mol_type = other DNA
atgatgaagcgcgagaagaacgtgatctacggccccgaacctctgcaccctcttgaggatcttacagccggcgagatgctgttcagagccctgcggaaacacagccatctgcctcaggctctggtggatgtcgtgggagatgagagcctgtcctacaaagagttcttcgaggccaccgtgctgctggcccagtctctgcataattgcggctacaagatgaacgacgtggtgtccatctgcgccgagaacaacacccggttcttcatccctgtgatcgccgcctggtacatcggcatgattgtggcccctgtgaacgagagctacatccccgacgagctgtgcaaagtgatgggcatcagcaagccccagatcgtgttcaccaccaagaacatcctgaacaaggtgctggaagtgcagagccggaccaacttcatcaagcggatcatcatcctggacaccgtggaaaacatccacggctgcgagagcctgccaaacggcatctccagatacagcgacggcaatatcgccaacttcaagcccctgcacttcgaccccgtggaacaggtggcagccatcctgtgtagcagcggcacaacaggactgcccaaaggcgtgatgcagacccaccagaatatctgcgtgcggctgatccacgctctggaccctagagctggaacccagctgattcctggcgtgaccgtgctggtgtacctgcctttctttcacgccttcggcttcagcatcaccctgggctacttcatggtcggactgagagtgattatgtttcggcgcttcgaccaagaagccttcctgaaggccatccaggactacgaagtgcgctccgtgattaacgtgcccagcgtgatcctgttcctgagcaagagcccactggtggataagtacgacctgagcagcctgagagagctgtgttgcggagctgcccctctggctaaagaggtggcagaagttgccgccaagcggctgaatctgcctggcatcagatgtggctttggcctgaccgagagcaccagcgccaatatccacagcctgcgggacgagtttaagagcggctctctgggcagagtgacccctctgatggccgccaagatcgccgatagagagacaggcaaagccctgggacctaatcaagtgggcgagctgtgtatcaagggacctatggtgtccaagggctacgtgaacaacgtggaagccaccaaagaggccatcgacgacgacggctggctgcactctggcgatttcggctactacgacgaggacgagcacttctacgtggtggacagatacaaagagctgattaagtacaagggcagccaggtggccccagccgagctggaagaaatcctgctgaagaacccctgcatccgcgacgtggcagttgtgggcattcctgatctggaagccggcgaactgcctagcgcctttgtggttaagcagcccggcaaagagatcaccgccaaagaggtgtacgactacctggccgagagagtgtcccacaccaagtatctgagaggcggcgtcagattcgtggacagcatccccagaaacgtgaccggcaagatcacccggaaagagctgctgaaacagctgctggaaaaggctggcgga

SEQ ID NO: 22 - DNA, 999 bp, synthetic construct
  source 1..999: mol_type = other DNA
atggccttaccagtgaccgccttgctcctgccgctggccttgctgctccacgccgccaggccgtggtctcatccccagtttgaaaagggcagcggcgaattcagagtgcagcctaccgagagcatcgtgcggttccccaacatcaccaatctgtgccctttcggcgaggtgttcaacgccaccagattcgcctctgtgtacgcctggaaccggaagcggatcagcaactgcgtggccgattacagcgtgctgtacaacagcgccagcttcagcaccttcaagtgctacggcgtgtcccctaccaagctgaacgacctgtgcttcaccaacgtgtacgccgacagcttcgtgatcagaggcgacgaagtgcggcagattgcccctggacagacaggcaagatcgccgactacaactacaagctgcccgacgacttcaccggctgtgtgattgcctggaacagcaacaacctggacagcaaagtcggcggcaactacaattacctgtaccggctgtttcggaagtccaacctgaagcctttcgagcgggacatcagcaccgaaatctaccaggccggcagcaccccttgcaatggcgtggaaggcttcaactgctacttcccactgcaaagctacggcttccagcctacaaacggcgtgggctaccagccttacagagtggtggtgctgagcttcgagctgctgcacgctcctgctacagtgtgcggccctaagaaaagcaccaacctggtcaagaacaaatgcgtgaacttcacgcgtaccaccaccaagcctgtgctgcggaccccttctcctgtgcatccaacaggcacaagccagcctcagaggcccgaagattgcagacctagaggcagcgtgaaaggcaccggcctggatttcgcctgcgacatctatatctgggctcctctggccggcatctgtgtggctccactgctgagcctgatcatcaccctgatctgctaccacagaagctaactcgag

SEQ ID NO: 23 - DNA, 5444 bp, synthetic construct
  source 1..5444: mol_type = other DNA
ggatccagctggatgtctgcattgccgaggccaccagggctggctcagcaactgtcggggaatcaccagggtctgagaaatcttgtgcgcatgtgaggggctgtgggagcagagaaccactgggtgggaaattctaatccccaccctgctggaaactctctgggtggccccaacatgctaatcctccggcaaacctctgtttcctcctcaaaaggcaggaggtcggaaagaataaacaatgagagtcacattaaaaacacaaaatcctacggaaatactgaagaatgagtctcagcactaaggaaaagcctccagcagctcctgctttctgagggtgaaggatagacgctgtggctctgcatgactcactagcactctatcacggccatattctggcagggtcagtggctccaactaacatttgtttggtactttacagtttattaaatagatgtttatatggagaagctctcatttctttctcagaagagcctggctaggaaggtggatgaggcaccatattcattttgcaggtgaaattcctgagatgtaaggagctgctgtgacttgctcaaggccttatatcgagtaaacggtagcgctggggcttagacgcaggtgttctgatttatagttcaaaacctctatcaatgagagagcaatctcctggtaatgtgatagatttcccaacttaatgccaacataccataaacctcccattctgctaatgcccagcctaagttggggagaccactccagattccaagatgtacagtttgctttgctgggcctttttcccatgcctgcctttactctgccagagttatattgctggggttttgaagaagatcctattaaataaaagaataagcagtattattaagtagccctgcatttcaggtttccttgagtggcaggccaggcctggccgtgaacgttcactgaaatcatggcctcttggccaagattgatagcttgtgcctgtccctgagtcccagtccatcacgagcagctggtttctaagatgctatttcccgtataaagcatgagaccgtgacttgccagccccacagagccccgcccttgtccatcactggcatctggactccagcctgggttggggcaaagagggaaatgagatcatgtcctaaccctgatcctcttgtcccacagatgtgaagcagaccctgaatttcgacctgctgaagctggctggcgacgtggaatccaacccaggccctatggccttaccagtgaccgccttgctcctgccgctggccttgctgctccacgccgccaggccgcaggtccagctcgtcgagtccggcggcggcctcgtccaggccggcgactccgtcaccctctcctgcaccgcctccggccgcaccttctcctcctacgccctcgcctggttccgccagcgccccggcaaggagcgcgagttcgtcgccggcctccgctggggcggccccaccaactacgccgactccgtcaaggaccgcttcaccatctccggcgactccgccaagcacaccatgtacctccagatgaactccctcaagcccgaggacaccgccgtctactactgcggctacaaccccggcggctgggccgtcccctcccagtacgagtacgactcctggggccagggcacccaggtcaccgtctcctccggtaccggcggaggcggatctggcggcggaggtagcggtggcggaggatctgaattcgacatccagatgacacagagccctagcagcctgtctgccagcgtgggagacagagtgaccatcacatgcaaggccagcgaccacatcaacaactggctggcctggtatcagcagaagcctggacaggcccctaagctgctgatctacggcgctaccacactggaaacaggcgtgcccagcagattttctggcagcggctctggcaccgactacaccctgacaatatccagcctccagcctgaggacttcgccacctactactgtcagcagagctggaacaccccttggacattcggccagggcaccaagctggaaatcaagagactcgaggacctgaagaacgtgttcccacctgaggtggccgtgttcgagcctagcgaggccgagatcagccacacccagaaagccaccctcgtgtgcctggctaccggcttctaccccgaccatgtggaactgtcttggtgggtcaacggcaaagaggtgcacagcggcgtgtgtaccgacccccagccactgaaagaacagcccgccctgaacgacagccggtactgcctgagcagcagactgagagtgtccgccaccttctggcagaacccccggaaccacttcagatgccaggtgcagttctacggcctgagcgagaacgacgagtggacccaggacagagccaagcccgtgacccagatcgtgtctgccgaagcctggggcagagccgattgcggctttaccagcgagagctaccagcagggcgtgctgagcgccaccatcctgtacgagatcctgctgggcaaggccaccctgtacgccgtgctggtgtctgccctggtgctgatggctatggtcaagcggaaggacagccggggaagggccaagcgatctggatctggagcaacaaacttctcactactcaaacaagcaggtgacgtggaggagaatcccgggcctactagtatggactggatttggcgcatccttttccttgtcggcgctgctaccggcgcccattccgggccccaggttcagctgcaagagtctggcggaggacttgctcaagctggcggaagcctgagactgtcttgtgccgcctctggcagaaccttcagcatgggctggtttagacaggcccctggcaaagagagagagttcgtcgccgccatcacatacagcggcggcagcccttactacgcctcttctgtcagaggccggttcaccatcagccgggacaacgccaagaacaccgtgtacctccagatgaacagcctgaagccagaggacaccgccgtgtactactgtgccgccaatccaacctacggcagcgactggaatgccgagaattggggccagggcacccaagtgacagtgtctagtggatccggcggcggaggatctggcggaggcggatctgggggcggaggctctttcgaacaagttcagcttcaacagcctggcgctgagctggtcaaacctggcgcttctgtgaagatgagctgcaaagccagcggctacgccttcagcagctactggatcaactggatgaagcagaaacccggccagggactcgaatggatcggccaaatctatcccggcgacggcgacaccaactacaacggcaagttcaagggcagagccacactgaccgccgatacctctagcagcacagcctacatgcagctgagcagcctgaccagcgaagatagcgccgtgtacttctgtgcccggtccatcacaacagtcgtgggctgcgctatggactattggggccagggaacaagcgtgaccgtgtctagtacgcgtatccagaaccctgatcctgccgtgtaccagctgcgggatagcaagagcagcgacaagagcgtgtgtctgttcaccgacttcgacagccagaccaacgtgtcccagagcaaggactccgacgtgtacatcaccgataagtgcgtgctggacatgcggagcatggacttcaagagcaactccgccgtggcctggtccaacaagtccgatttcgcctgcgccaacgccttcaacaacagcattatccccgaggacacattcttcccaagccccgagagcagctgcgacgtgaagctggtggaaaagagcttcgagacagacaccaacctgaacttccagaacctgagcgtgatcggcttcagaatcctgctgctgaaagtggccggctttaacctgctgatgaccctgcggctgtggtccagctgaccagacatgataagatacattgatgagtttggacaaaccacaactagaatgcagtgaaaaaaatgctttatttgtgaaatttgtgatgctattgctttatttgtaaccattataagctgcaataaacaagttaacaacaacaattgcattcattttatgtttcaggttcagggggaggtgtgggaggttttttaaagcaagtaaaacctctacaaatgtggtatggaattaattctaaaatacagcatagcaaaactttaacctccaaatcaagcctctacttgaatccttttctgagggatgaataaggcataggcatcaggggctgttgccaatgtgcattagctgtttgcagcctcaccttctttcatggagtttaagatatagtgtattttcccaaggtttgaactagctcttcatttctttatgttttaaatgcactgacctcccacattccctttttagtaaaatattcagaaataatttaaatacatcattgcaatgaaaataaatgttttttattaggcagaatccagatgctcaaggcccttcataatatcccccagtttagtagttggacttagggaacaaaggaacctttaatagaaattggacagcaagaaagcgagcttctagcttatcctgtatatcacagacaaaactgtgctagacatgaggtctatggacttcaagagcaacagtgctgtggcctggagcaacaaatctgactttgcatgtgcaaacgccttcaacaacagcattattccagaagacaccttcttccccagcccaggtaagggcagctttggtgccttcgcaggctgtttccttgcttcaggaatggccaggttctgcccagagctctggtcaatgatgtctaaaactcctctgattggtggtctcggccttatccattgccaccaaaaccctctttttactaagaaacagtgagccttgttctggcagtccagagaatgacacgggaaaaaagcagatgaagagaaggtggcaggagagggcacgtggcccagcctcagtctctccaactgagttcctgcctgcctgcctttgctcagactgtttgccccttactgctcttctaggcctcattctaagccccttctccaagttgcctctccttatttctccctgtctgccaaaaaatctttcccagctcactaagtcagtctcacgcagtcactcattaacccaccaatcactgattgtgccggcacatgaatgcaccaggtgttgaagtggaggaattaaaaagtcagatgaggggtgtgcccagaggaagcaccattctagttgggggagcccatctgtcagctgggaaaagtccaaataacttcagattggaatgtgttttaactcagggttgagaaaacagccaccttcaggacaaaagtcagggaagggctctctgaagaaatgctacttgaagataccagccctaccaagggcagggagaggaccctatagaggcctgggaca

SEQ ID NO: 24 - DNA, 6357 bp, synthetic construct
  source 1..6357: mol_type = other DNA
cccgactggaaagcgggcagtgagcgcaacgcaattaatgtgagttagctcactcattaggcaccccaggctttacactttatgcttccggctcgtatgttgtgtggaattgtgagcggataacaatttcacacaggaaacagctatgaccatgattacgccaagcgcgcaattaaccctcactaaagggaacaaaagctggagctgcaagcttggccattgcatacgttgtatccatatcataatatgtacatttatattggctcatgtccaacattaccgccatgttgacattgattattgactagcttattaatagtaatcaattacggggtcattagttcatagcccatatatggagttccgcgttacataacttacggtaaatggcccgcctggctgaccgcccaacgacccccgcccattgacgtcaataatgacgtatgttcccatagtaacgccaatagggactttccattgacgtcaatgggtggagtatttacggtaaactgcccacttggcagtacatcaagtgtattatatgccaagtacgccccctattgacgtcaatgacggtaaatggcccgcctggcattatgcccagtacatgaccttatgggactttcctacttggcagtacatctacgtattagtcatcgctattaccatggtgatgcggttttggcagtacatcaatgggcgtggatagcggtttgactcacggggatttccaagtctccaccccattgacgtcaatgggagtttgttttggcaccaaaatcaacgggactttccaaaatgtcgtaacaactccgccccattgacgcaaatgggcggtaggcgtgtacggtgggaggtctatataagcagagctcgtttagtgaaccggggtctctctggttagaccagatctgagcctgggagctctctggctaactagggaacccactgcttaagcctcaataaagcttgccttgagtgcttcaagtagtgtgtgcccgtctgttgtgtgactctggtaactagagatccctcagacccttttagtcagtgtggaaaatctctagcagtggcgcccgaacagggacttgaaagcgaaagggaaaccagaggagctctctcgacgcaggactcggcttgctgaagcgcgcacggcaagaggcgaggggcggcgactggtgagtacgccaaaaattttgactagcggaggctagaaggagagagatgggtgcgagagcgtcagtattaagcgggggagaattagatcgcgatgggaaaaaattcggttaaggccagggggaaagaaaaaatataaattaaaacatatagtatgggcaagcagggagctagaacgattcgcagttaatcctggcctgttagaaacatcagaaggctgtagacaaatactgggacagctacaaccatcccttcagacaggatcagaagaacttagatcattatataatacagtagcaaccctctattgtgtgcatcaaaggatagagataaaagacaccaaggaagctttagacaagatagaggaagagcaaaacaaaagtaagaccaccgcacagcaagcggccgctgatcttcagacctggaggaggagatatgagggacaattggagaagtgaattatataaatataaagtagtaaaaattgaaccattaggagtagcacccaccaaggcaaagagaagagtggtgcagagagaaaaaagagcagtgggaataggagctttgttccttgggttcttgggagcagcaggaagcactatgggcgcagcgtcaatgacgctgacggtacaggccagacaattattgtctggtatagtgcagcagcagaacaatttgctgagggctattgaggcgcaacagcatctgttgcaactcacagtctggggcatcaagcagctccaggcaagaatcctggctgtggaaagatacctaaaggatcaacagctcctggggatttggggttgctctggaaaactcatttgcaccactgctgtgccttggaatgctagttggagtaataaatctctggaacagatttggaatcacacgacctggatggagtgggacagagaaattaacaattacacaagcttaatacactccttaattgaagaatcgcaaaaccagcaagaaaagaatgaacaagaattattggaattagataaatgggcaagtttgtggaattggtttaacataacaaattggctgtggtatataaaattattcataatgatagtaggaggcttggtaggtttaagaatagtttttgctgtactttctatagtgaatagagttaggcagggatattcaccattatcgtttcagacccacctcccaaccccgaggggacccgacaggcccgaaggaatagaagaagaaggtggagagagagacagagacagatccattcgattagtgaacggatctcgacggtatcgataagctaattcacaaatggcagtattcatccacaattttaaaagaaaaggggggattggggggtacagtgcaggggaaagaatagtagacataatagcaacagacatacaaactaaagaattacaaaaacaaattacaaaaattcaaaattttcgggtttattacagggacagcagagatccagtttgggaattagcttgatcgattagtccaatttgttaaagacaggatatcagtggtccaggctctagttttgactcaacaatatcaccagctgaagcctatagagtacgagccatagatagaataaaagattttatttagtctccagaaaaaggggggaatgaaagaccccacctgtaggtttggcaagctaggatcaaggttaggaacagagagacagcagaatatgggccaaacaggatatctgtggtaagcagttcctgccccggctcagggccaagaacagttggaacagcagaatatgggccaaacaggatatctgtggtaagcagttcctgccccggctcagggccaagaacagatggtccccagatgcggtcccgccctcagcagtttctagcgaaccatcagatgtttccagggtgccccaaggacctgaaatgaccctgtgccttatttgaactaaccaatcagttcgcttctcgcttctgttcgcgcgcttctgctccccgagctcaataaaagagcccacaacccctcactcggcgcgatctagatctcgaatcgaattagccgctagcggggtcgactgatccgataatcaacctctggattacaaaatttgtgaaagattgactggtattcttaactatgttgctccttttacgctatgtggatacgctgctttaatgcctttgtatcatgctattgcttcccgtatggctttcattttctcctccttgtataaatcctggttgctgtctctttatgaggagttgtggcccgttgtcaggcaacgtggcgtggtgtgcactgtgtttgctgacgcaacccccactggttggggcattgccaccacctgtcagctcctttccgggactttcgctttccccctccctattgccacggcggaactcatcgccgcctgccttgcccgctgctggacaggggctcggctgttgggcactgacaattccgtggtgttgtcggggaaatcatcgtcctttccttggctgctcgcctgtgttgccacctggattctgcgcgggacgtccttctgctacgtcccttcggccctcaatccagcggaccttccttcccgcgccctgctgccgggtctgcggcctcttccgcgtcttcgccttcgccctcagacgagtcggatctccctttgggccgcctccccgcggatcggatcaaattcgagctcagtacctttaagaccaatgacttacaaggcagctgtagatcttagccactttttaaaagaaaaggggggactggaagggctaattcactcccaacgaagacaagatctgctttttgcttgtactgggtctctctggttagaccagatctgagcctgggagctctctggctaactagggaacccactgcttaagcctcaataaagcttgccttgagtgcttcaagtagtgtgtgcccgtctgttgtgtgactctggtaactagagatccctcagacccttttagtcagtgtggaaaatctctagcagtagtagttcatgtcatcttattattcagtatttataacttgcaaagaaatgaatatcagagagtgagaggaacttgtttattgcagcttataatggttacaaataaagcaatagcatcacaaatttcacaaataaagcatttttttcactgcattctagttgtggtttgtccaaactcatcaatgtatcttatcatgtctggctctagctatcggggaaatgtgcgcggaacccctatttgtttatttttctaaatacattcaaatatgtatccgctcatgagacaataaccctgataaatgcttcaataatattgaaaaaggaagagtatgagtattcaacatttccgtgtcgcccttattcccttttttgcggcattttgccttcctgtttttgctcacccagaaacgctggtgaaagtaaaagatgctgaagatcagttgggtgcacgagtgggttacatcgaactggatctcaacagcggtaagatccttgagagttttcgccccgaagaacgttttccaatgatgagcacttttaaagttctgctatgtggcgcggtattatcccgtattgacgccgggcaagagcaactcggtcgccgcatacactattctcagaatgacttggttgagtactcaccagtcacagaaaagcatcttacggatggcatgacagtaagagaattatgcagtgctgccataaccatgagtgataacactgcggccaacttacttctgacaacgatcggaggaccgaaggagctaaccgcttttttgcacaacatgggggatcatgtaactcgccttgatcgttgggaaccggagctgaatgaagccataccaaacgacgagcgtgacaccacgatgcctgtagcaatggcaacaacgttgcgcaaactattaactggcgaactacttactctagcttcccggcaacaattaatagactggatggaggcggataaagttgcaggaccacttctgcgctcggcccttccggctggctggtttattgctgataaatctggagccggtgagcgtgggtctcgcggtatcattgcagcactggggccagatggtaagccctcccgtatcgtagttatctacacgacggggagtcaggcaactatggatgaacgaaatagacagatcgctgagataggtgcctcactgattaagcattggtaactgtcagaccaagtttactcatatatactttagattgatttaaaacttcatttttaatttaaaaggatctaggtgaagatcctttttgataatctcatgaccaaaatcccttaacgtgagttttcgttccactgagcgtcagaccccgtagaaaagatcaaaggatcttcttgagatcctttttttctgcgcgtaatctgctgcttgcaaacaaaaaaaccaccgctaccagcggtggtttgtttgccggatcaagagctaccaactctttttccgaaggtaactggcttcagcagagcgcagataccaaatactgttcttctagtgtagccgtagttaggccaccacttcaagaactctgtagcaccgcctacatacctcgctctgctaatcctgttaccagtggctgctgccagtggcgataagtcgtgtcttaccgggttggactcaagacgatagttaccggataaggcgcagcggtcgggctgaacggggggttcgtgcacacagcccagcttggagcgaacgacctacaccgaactgagatacctacagcgtgagctatgagaaagcgccacgcttcccgaagggagaaaggcggacaggtatccggtaagcggcagggtcggaacaggagagcgcacgagggagcttccagggggaaacgcctggtatctttatagtcctgtcgggtttcgccacctctgacttgagcgtcgatttttgtgatgctcgtcaggggggcggagcctatggaaaaacgccagcaacgcggcctttttacggttcctggccttttgctggccttttgctcacatgttctttcctgcgttatcccctgattctgtggataaccgtattaccgcctttgagtgagctgataccgctcgccgcagccgaacgaccgagcgcagcgagtcagtgagcgaggaagcggaagagcgcccaatacgcaaaccgcctctccccgcgcgttggccgattcattaatgcagctggcacgacaggttt

SEQ ID NO: 25 - DNA, 539 bp, synthetic construct
  source 1..539: mol_type = other DNA
gatccatcgattagtccaatttgttaaagacaggatatcagtggtccaggctctagttttgactcaacaatatcaccagctgaagcctatagagtacgagccatagatagaataaaagattttatttagtctccagaaaaaggggggaatgaaagaccccacctgtaggtttggcaagctaggatcaaggttaggaacagagagacagcagaatatgggccaaacaggatatctgtggtaagcagttcctgccccggctcagggccaagaacagttggaacagcagaatatgggccaaacaggatatctgtggtaagcagttcctgccccggctcagggccaagaacagatggtccccagatgcggtcccgccctcagcagtttctagcgaaccatcagatgtttccagggtgccccaaggacctgaaatgaccctgtgccttatttgaactaaccaatcagttcgcttctcgcttctgttcgcgcgcttctgctccccgagctcaataaaagagcccacaacccctcactcggcgcga

SEQ ID NO: 26 - DNA, 538 bp, synthetic construct
  source 1..538: mol_type = other DNA
gatccatcgattagtccaatttgttaaagacaggatatcagtggtccaggctctagttttgactcaacaatatcaccagctgaagcctatagagtacgagccatagatagaataaaagattttatttagtctccagaaaaaggggggaatgaaagaccccacctgtaggtttggcaagctaggatcaaggttaggaacagagagacagcagaatatgggccaaacaggatatctgtggtaagcagttcctgccccggctcagggccaagaacagttggaacagcagaatatgggccaaacaggatatctgtggtaagcagttcctgccccggctcagggccaagaacagatggtccccagatgcggtcccgccctcagcagtttctagagaaccatcagatgtttccagggtgccccaaggacctgaaatgaccctgtgccttatttgaactaaccaatcagttcgcttctcgcttctgttcgcgcgcttctgctccccgagctcaataaaagagcccacaacccctcactcggcgcg

SEQ ID NO: 27 - DNA, 3574 bp, synthetic construct
  source 1..3574: mol_type = other DNA
gaagtatgcaaagcatgcatctcaattagtcagcaaccatagtcccgcccctaactccgcccatcccgcccctaactccgcccagttccgcccattctccgccccatggctgactaattttttttatttatgcagaggccgaggccgcctctgcctctgagctattccagaagtagtgaggaggcttttttggaggcctaggcttttgcaaaaagctcccgggagcttgtatatccattttcggatctgatcaagagacaggatgaggatcgtttcgcatgattgaacaagatggattgcacgcaggttctccggccgcttgggtggagaggctattcggctatgactgggcacaacagacaatcggctgctctgatgccgccgtgttccggctgtcagcgcaggggcgcccggttctttttgtcaagaccgacctgtccggtgccctgaatgaactgcaggacgaggcagcgcggctatcgtggctggccacgacgggcgttccttgcgcagctgtgctcgacgttgtcactgaagcgggaagggactggctgctattgggcgaagtgccggggcaggatctcctgtcatctcaccttgctcctgccgagaaagtatccatcatggctgatgcaatgcggcggctgcatacgcttgatccggctacctgcccattcgaccaccaagcgaaacatcgcatcgagcgagcacgtactcggatggaagccggtcttgtcgatcaggatgatctggacgaagagcatcaggggctcgcgccagccgaactgttcgccaggctcaaggcgcgcatgcccgacggcgaggatctcgtcgtgacccatggcgatgcctgcttgccgaatatcatggtggaaaatggccgcttttctggattcatcgactgtggccggctgggtgtggcggaccgctatcaggacatagcgttggctacccgtgatattgctgaagagcttggcggcgaatgggctgaccgcttcctcgtgctttacggtatcgccgctcccgattcgcagcgcatcgccttctatcgccttcttgacgagttcttctgagcgggactctggggttcgaaatgaccgaccaagcgacgcccaacctgccatcacgagatttcgattccaccgccgccttctatgaaaggttgggcttcggaatcgttttccgggacgccggctggatgatcctccagcgcggggatctcatgctggagttcttcgcccaccccaacttgtttattgcagcttataatggttacaaataaagcaatagcatcacaaatttcacaaataaagcatttttttcactgcattctagttgtggtttgtccaaactcatcaatgtatcttatcatgtctgtataccgtcgacctctagctagagcttggcgtaatcatggtcatagctgtttcctgtgtgaaattgttatccgctcacaattccacacaacatacgagccggaagcataaagtgtaaagcctggggtgcctaatgagtgagctaactcacattaattgcgttgcgctcactgcccgctttccagtcgggaaacctgtcgtgccagctgcattaatgaatcggccaacgcgcggggagaggcggtttgcgtattgggcgctcttccgcttcctcgctcactgactcgctgcgctcggtcgttcggctgcggcgagcggtatcagctcactcaaaggcggtaatacggttatccacagaatcaggggataacgcaggaaagaacatgtgagcaaaaggccagcaaaaggccaggaaccgtaaaaaggccgcgttgctggcgtttttccataggctccgcccccctgacgagcatcacaaaaatcgacgctcaagtcagaggtggcgaaacccgacaggactataaagataccaggcgtttccccctggaagctccctcgtgcgctctcctgttccgaccctgccgcttaccggatacctgtccgcctttctcccttcgggaagcgtggcgctttctcaatgctcacgctgtaggtatctcagttcggtgtaggtcgttcgctccaagctgggctgtgtgcacgaaccccccgttcagcccgaccgctgcgccttatccggtaactatcgtcttgagtccaacccggtaagacacgacttatcgccactggcagcagccactggtaacaggattagcagagcgaggtatgtaggcggtgctacagagttcttgaagtggtggcctaactacggctacactagaaggacagtatttggtatctgcgctctgctgaagccagttaccttcggaaaaagagttggtagctcttgatccggcaaacaaaccaccgctggtagcggtggtttttttgtttgcaagcagcagattacgcgcagaaaaaaaggatctcaagaagatcctttgatcttttctacggggtctgacgctcagtggaacgaaaactcacgttaagggattttggtcatgagattatcaaaaaggatcttcacctagatccttttaaattaaaaatgaagttttaaatcaatctaaagtatatatgagtaaacttggtctgacagttaccaatgcttaatcagtgaggcacctatctcagcgatctgtctatttcgttcatccatagttgcctgactccccgtcgtgtagataactacgatacgggagggcttaccatctggccccagtgctgcaatgataccgcgagacccacgctcaccggctccagatttatcagcaataaaccagccagccggaagggccgagcgcagaagtggtcctgcaactttatccgcctccatccagtctattaattgttgccgggaagctagagtaagtagttcgccagttaatagtttgcgcaacgttgttgccattgctacaggcatcgtggtgtcacgctcgtcgtttggtatggcttcattcagctccggttcccaacgatcaaggcgagttacatgatcccccatgttgtgcaaaaaagcggttagctccttcggtcctccgatcgttgtcagaagtaagttggccgcagtgttatcactcatggttatggcagcactgcataattctcttactgtcatgccatccgtaagatgcttttctgtgactggtgagtactcaaccaagtcattctgagaatagtgtatgcggcgaccgagttgctcttgcccggcgtcaatacgggataataccgcgccacatagcagaactttaaaagtgctcatcattggaaaacgttcttcggggcgaaaactctcaaggatcttaccgctgttgagatccagttcgatgtaacccactcgtgcacccaactgatcttcagcatcttttactttcaccagcgtttctgggtgagcaaaaacaggaaggcaaaatgccgcaaaaaagggaataagggcgacacggaaatgttgaatactcatactcttcctttttcaatattattgaagcatttatcagggttattgtctcatgagcggatacatatttgaatgtatttagaaaaataaacaaataggggttccgcgcacatttccccgaaaagtgccacctgacgtc

SEQ ID NO: 28 - DNA, 5428 bp, synthetic construct
  source 1..5428: mol_type = other DNA
gacggatcgggagatctcccgatcccctatggtgcactctcagtacaatctgctctgatgccgcatagttaagccagtatctgctccctgcttgtgtgttggaggtcgctgagtagtgcgcgagcaaaatttaagctacaacaaggcaaggcttgaccgacaattgcatgaagaatctgcttagggttaggcgttttgcgctgcttcgcgatgtacgggccagatatacgcgttgacattgattattgactagttattaatagtaatcaattacggggtcattagttcatagcccatatatggagttccgcgttacataacttacggtaaatggcccgcctggctgaccgcccaacgacccccgcccattgacgtcaataatgacgtatgttcccatagtaacgccaatagggactttccattgacgtcaatgggtggagtatttacggtaaactgcccacttggcagtacatcaagtgtatcatatgccaagtacgccccctattgacgtcaatgacggtaaatggcccgcctggcattatgcccagtacatgaccttatgggactttcctacttggcagtacatctacgtattagtcatcgctattaccatggtgatgcggttttggcagtacatcaatgggcgtggatagcggtttgactcacggggatttccaagtctccaccccattgacgtcaatgggagtttgttttggcaccaaaatcaacgggactttccaaaatgtcgtaacaactccgccccattgacgcaaatgggcggtaggcgtgtacggtgggaggtctatataagcagagctctctggctaactagagaacccactgcttactggcttatcgaaattaatacgactcactatagggagacccaagctggctagcgtttaaacttaagcttggtaccgagctcggatccactagtccagtgtggtggaattctgcagatatccagcacagtggcggccgctcgagtctagagggcccgtttaaacccgctgatcagcctcgactgtgccttctagttgccagccatctgttgtttgcccctcccccgtgccttccttgaccctggaaggtgccactcccactgtcctttcctaataaaatgaggaaattgcatcgcattgtctgagtaggtgtcattctattctggggggtggggtggggcaggacagcaagggggaggattgggaagacaatagcaggcatgctggggatgcggtgggctctatggcttctgaggcggaaagaaccagctggggctctagggggtatccccacgcgccctgtagcggcgcattaagcgcggcgggtgtggtggttacgcgcagcgtgaccgctacacttgccagcgccctagcgcccgctcctttcgctttcttcccttcctttctcgccacgttcgccggctttccccgtcaagctctaaatcgggggctccctttagggttccgatttagtgctttacggcacctcgaccccaaaaaacttgattagggtgatggttcacgtagtgggccatcgccctgatagacggtttttcgccctttgacgttggagtccacgttctttaatagtggactcttgttccaaactggaacaacactcaaccctatctcggtctattcttttgatttataagggattttgccgatttcggcctattggttaaaaaatgagctgatttaacaaaaatttaacgcgaattaattctgtggaatgtgtgtcagttagggtgtggaaagtccccaggctccccagcaggcagaagtatgcaaagcatgcatctcaattagtcagcaaccaggtgtggaaagtccccaggctccccagcaggcagaagtatgcaaagcatgcatctcaattagtcagcaaccatagtcccgcccctaactccgcccatcccgcccctaactccgcccagttccgcccattctccgccccatggctgactaattttttttatttatgcagaggccgaggccgcctctgcctctgagctattccagaagtagtgaggaggcttttttggaggcctaggcttttgcaaaaagctcccgggagcttgtatatccattttcggatctgatcaagagacaggatgaggatcgtttcgcatgattgaacaagatggattgcacgcaggttctccggccgcttgggtggagaggctattcggctatgactgggcacaacagacaatcggctgctctgatgccgccgtgttccggctgtcagcgcaggggcgcccggttctttttgtcaagaccgacctgtccggtgccctgaatgaactgcaggacgaggcagcgcggctatcgtggctggccacgacgggcgttccttgcgcagctgtgctcgacgttgtcactgaagcgggaagggactggctgctattgggcgaagtgccggggcaggatctcctgtcatctcaccttgctcctgccgagaaagtatccatcatggctgatgcaatgcggcggctgcatacgcttgatccggctacctgcccattcgaccaccaagcgaaacatcgcatcgagcgagcacgtactcggatggaagccggtcttgtcgatcaggatgatctggacgaagagcatcaggggctcgcgccagccgaactgttcgccaggctcaaggcgcgcatgcccgacggcgaggatctcgtcgtgacccatggcgatgcctgcttgccgaatatcatggtggaaaatggccgcttttctggattcatcgactgtggccggctgggtgtggcggaccgctatcaggacatagcgttggctacccgtgatattgctgaagagcttggcggcgaatgggctgaccgcttcctcgtgctttacggtatcgccgctcccgattcgcagcgcatcgccttctatcgccttcttgacgagttcttctgagcgggactctggggttcgaaatgaccgaccaagcgacgcccaacctgccatcacgagatttcgattccaccgccgccttctatgaaaggttgggcttcggaatcgttttccgggacgccggctggatgatcctccagcgcggggatctcatgctggagttcttcgcccaccccaacttgtttattgcagcttataatggttacaaataaagcaatagcatcacaaatttcacaaataaagcatttttttcactgcattctagttgtggtttgtccaaactcatcaatgtatcttatcatgtctgtataccgtcgacctctagctagagcttggcgtaatcatggtcatagctgtttcctgtgtgaaattgttatccgctcacaattccacacaacatacgagccggaagcataaagtgtaaagcctggggtgcctaatgagtgagctaactcacattaattgcgttgcgctcactgcccgctttccagtcgggaaacctgtcgtgccagctgcattaatgaatcggccaacgcgcggggagaggcggtttgcgtattgggcgctcttccgcttcctcgctcactgactcgctgcgctcggtcgttcggctgcggcgagcggtatcagctcactcaaaggcggtaatacggttatccacagaatcaggggataacgcaggaaagaacatgtgagcaaaaggccagcaaaaggccaggaaccgtaaaaaggccgcgttgctggcgtttttccataggctccgcccccctgacgagcatcacaaaaatcgacgctcaagtcagaggtggcgaaacccgacaggactataaagataccaggcgtttccccctggaagctccctcgtgcgctctcctgttccgaccctgccgcttaccggatacctgtccgcctttctcccttcgggaagcgtggcgctttctcatagctcacgctgtaggtatctcagttcggtgtaggtcgttcgctccaagctgggctgtgtgcacgaaccccccgttcagcccgaccgctgcgccttatccggtaactatcgtcttgagtccaacccggtaagacacgacttatcgccactggcagcagccactggtaacaggattagcagagcgaggtatgtaggcggtgctacagagttcttgaagtggtggcctaactacggctacactagaagaacagtatttggtatctgcgctctgctgaagccagttaccttcggaaaaagagttggtagctcttgatccggcaaacaaaccaccgctggtagcggtttttttgtttgcaagcagcagattacgcgcagaaaaaaaggatctcaagaagatcctttgatcttttctacggggtctgacgctcagtggaacgaaaactcacgttaagggattttggtcatgagattatcaaaaaggatcttcacctagatccttttaaattaaaaatgaagttttaaatcaatctaaagtatatatgagtaaacttggtctgacagttaccaatgcttaatcagtgaggcacctatctcagcgatctgtctatttcgttcatccatagttgcctgactccccgtcgtgtagataactacgatacgggagggcttaccatctggccccagtgctgcaatgataccgcgagacccacgctcaccggctccagatttatcagcaataaaccagccagccggaagggccgagcgcagaagtggtcctgcaactttatccgcctccatccagtctattaattgttgccgggaagctagagtaagtagttcgccagttaatagtttgcgcaacgttgttgccattgctacaggcatcgtggtgtcacgctcgtcgtttggtatggcttcattcagctccggttcccaacgatcaaggcgagttacatgatcccccatgttgtgcaaaaaagcggttagctccttcggtcctccgatcgttgtcagaagtaagttggccgcagtgttatcactcatggttatggcagcactgcataattctcttactgtcatgccatccgtaagatgcttttctgtgactggtgagtactcaaccaagtcattctgagaatagtgtatgcggcgaccgagttgctcttgcccggcgtcaatacgggataataccgcgccacatagcagaactttaaaagtgctcatcattggaaaacgttcttcggggcgaaaactctcaaggatcttaccgctgttgagatccagttcgatgtaacccactcgtgcacccaactgatcttcagcatcttttactttcaccagcgtttctgggtgagcaaaaacaggaaggcaaaatgccgcaaaaaagggaataagggcgacacggaaatgttgaatactcatactcttcctttttcaatattattgaagcatttatcagggttattgtctcatgagcggatacatatttgaatgtatttagaaaaataaacaaataggggttccgcgcacatttccccgaaaagtgccacctgacgtc

SEQ ID NO: 29 - DNA, 5166 bp, synthetic construct
  source 1..5166: mol_type = other DNA
gacggatcgggagatctcccgatcccctatggtcgactctcagtacaatctgctctgatgccgcatagttaagccagtatctgctccctgcttgtgtgttggaggtcgctgagtagtgcgcgagcaaaatttaagctacaacaaggcaaggcttgaccgacaattgcatgaagaatctgcttagggttaggcgttttgcgctgcttcgcgatgtacgggccagatatacgcgttgacattgattattgactagttattaatagtaatcaattacggggtcattagttcatagcccatatatggagttccgcgttacataacttacggtaaatggcccgcctggctgaccgcccaacgacccccgcccattgacgtcaataatgacgtatgttcccatagtaacgccaatagggactttccattgacgtcaatgggtggactatttacggtaaactgcccacttggcagtacatcaagtgtatcatatgccaagtacgccccctattgacgtcaatgacggtaaatggcccgcctggcattatgcccagtacatgaccttatgggactttcctacttggcagtacatctacgtattagtcatcgctattaccatggtgatgcggttttggcagtacatcaatgggcgtggatagcggtttgactcacggggatttccaagtctccaccccattgacgtcaatgggagtttgttttggcaccaaaatcaacgggactttccaaaatgtcgtaacaactccgccccattgacgcaaatgggcggtaggcgtgtacggtgggaggtctatataagcagagctctctggctaactagagaacccactgcttactggcttatcgaaattaatacgactcactatagggagacccaagctggctagccaccatggagacagacacactcctgctatgggtactgctgctctgggttccaggttccactggtgacgcggcccagccggccaggcgcgccgtacgaagcttggtaccgagctcggatccactagtccagtgtggtggaattctgcagatatccagcacagtggcggccgctcgagtctagagggcccgaacaaaaactcatctcagaagaggatctgaatagcgccgtcgaccatcatcatcatcatcattgagtttaaacccgctgatcagcctcgactgtgccttctagttgccagccatctgttgtttgcccctcccccgtgccttccttgaccctggaaggtgccactcccactgtcctttcctaataaaatgaggaaattgcatcgcattgtctgagtaggtgtcattctattctggggggtggggtggggcaggacagcaagggggaggattgggaagacaatagcaggcatgctggggatgcggtgggctctatggcttctgaggcggaaagaaccagctggggctctagggggtatccccacgcgccctgtagcggcgcattaagcgcggcgggtgtggtggttacgcgcagcgtgaccgctacacttgccagcgccctagcgcccgctcctttcgctttcttcccttcctttctcgccacgttcgccggctttccccgtcaagctctaaatcggggcatccctttagggttccgatttagtgctttacggcacctcgaccccaaaaaacttgattagggtgatggttcacgtagtgggccatcgccctgatagacggtttttcgccctttgacgttggagtccacgttctttaatagtggactcttgttccaaactggaacaacactcaaccctatctcggtctattcttttgatttataagggattttggggatttcggcctattggttaaaaaatgagctgatttaacaaaaatttaacgcgaattaattctgtggaatgtgtgtcagttagggtgtggaaagtccccaggctccccagcaggcagaagtatgcaaagcatgcatctcaattagtcagcaaccaggtgtggaaagtccccaggctccccagcaggcagaagtatgcaaagcatgcatctcaattagtcagcaaccatagtcccgcccctaactccgcccatcccgcccctaactccgcccagttccgcccattctccgccccatggctgactaattttttttatttatgcagaggccgaggccgcctctgcctctgagctattccagaagtagtgaggaggcttttttggaggcctaggcttttgcaaaaagctcccgggagcttgtatatccattttcggatctgatcagcacgtgttgacaattaatcatcggcatagtatatcggcatagtataatacgacaaggtgaggaactaaaccatggccaagttgaccagtgccgttccggtgctcaccgcgcgcgacgtcgccggagcggtcgagttctggaccgaccggctcgggttctcccgggacttcgtggaggacgacttcgccggtgtggtccgggacgacgtgaccctgttcatcagcgcggtccaggaccaggtggtgccggacaacaccctggcctgggtgtgggtgcgcggcctggacgagctgtacgccgagtggtcggaggtcgtgtccacgaacttccgggacgcctccgggccggccatgaccgagatcggcgagcagccgtgggggcgggagttcgccctgcgcgacccggccggcaactgcgtgcacttcgtggccgaggagcaggactgacacgtgctacgagatttcgattccaccgccgccttctatgaaaggttgggcttcggaatcgttttccgggacgccggctggatgatcctccagcgcggggatctcatgctggagttcttcgcccaccccaacttgtttattgcagcttataatggttacaaataaagcaatagcatcacaaatttcacaaataaagcatttttttcactgcattctagttgtggtttgtccaaactcatcaatgtatcttatcatgtctgtataccgtcgacctctagctagagcttggcgtaatcatggtcatagctgtttcctgtgtgaaattgttatccgctcacaattccacacaacatacgagccggaagcataaagtgtaaagcctggggtgcctaatgagtgagctaactcacattaattgcgttgcgctcactgcccgctttccagtcgggaaacctgtcgtgccagctgcattaatgaatcggccaacgcgcggggagaggcggtttgcgtattgggcgctcttccgcttcctcgctcactgactcgctgcgctcggtcgttcggctgcggcgagcggtatcagctcactcaaaggcggtaatacggttatccacagaatcaggggataacgcaggaaagaacatgtgagcaaaaggccagcaaaaggccaggaaccgtaaaaaggccgcgttgctggcgtttttccataggctccgcccccctgacgagcatcacaaaaatcgacgctcaagtcagaggtggcgaaacccgacaggactataaagataccaggcgtttccccctggaagctccctcgtgcgctctcctgttccgaccctgccgcttaccggatacctgtccgcctttctcccttcgggaagcgtggcgctttctcaatgctcacgctgtaggtatctcagttcggtgtaggtcgttcgctccaagctgggctgtgtgcacgaaccccccgttcagcccgaccgctgcgccttatccggtaactatcgtcttgagtccaacccggtaagacacgacttatcgccactggcagcagccactggtaacaggattagcagagcgaggtatgtaggcggtgctacagagttcttgaagtggtggcctaactacggctacactagaaggacagtatttggtatctgcgctctgctgaagccagttaccttcggaaaaagagttggtagctcttgatccggcaaacaaaccaccgctggtagcggtggtttttttgtttgcaagcagcagattacgcgcagaaaaaaaggatctcaagaagatcctttgatcttttctacggggtctgacgctcagtggaacgaaaactcacgttaagggattttggtcatgagattatcaaaaaggatcttcacctagatccttttaaattaaaaatgaagttttaaatcaatctaaagtatatatgagtaaacttggtctgacagttaccaatgcttaatcagtgaggcacctatctcagcgatctgtctatttcgttcatccatagttgcctgactccccgtcgtgtagataactacgatacgggagggcttaccatctggccccagtgctgcaatgataccgcgagacccacgctcaccggctccagatttatcagcaataaaccagccagccggaagggccgagcgcagaagtggtcctgcaactttatccgcctccatccagtctattaattgttgccgggaagctagagtaagtagttcgccagttaatagtttgcgcaacgttgttgccattgctacaggcatcgtggtgtcacgctcgtcgtttggtatggcttcattcagctccggttcccaacgatcaaggcgagttacatgatcccccatgttgtgcaaaaaagcggttagctccttcggtcctccgatcgttgtcagaagtaagttggccgcagtgttatcactcatggttatggcagcactgcataattctcttactgtcatgccatccgtaagatgcttttctgtgactggtgagtactcaaccaagtcattctgagaatagtgtatgcggcgaccgagttgctcttgcccggcgtcaatacgggataataccgcgccacatagcagaactttaaaagtgctcatcattggaaaacgttcttcggggcgaaaactctcaaggatcttaccgctgttgagatccagttcgatgtaacccactcgtgcacccaactgatcttcagcatcttttactttcaccagcgtttctgggtgagcaaaaacaggaaggcaaaatgccgcaaaaaagggaataagggcgacacggaaatgttgaatactcatactcttcctttttcaatattattgaagcatttatcagggttattgtctcatgagcggatacatatttgaatgtatttagaaaaataaacaaataggggttccgcgcacatttccccgaaaagtgccacctgacgtc

SEQ ID NO: 30 - DNA, 5812 bp, synthetic construct
  source 1..5812: mol_type = other DNA
gacggatcgggagatctcccgatcccctatggtcgactctcagtacaatctgctctgatgccgcatagttaagccagtatctgctccctgcttgtgtgttggaggtcgctgagtagtgcgcgagcaaaatttaagctacaacaaggcaaggcttgaccgacaattgcatgaagaatctgcttagggttaggcgttttgcgctgcttcgcgatgtacgggccagatatacgcgttgacattgattattgactagttattaatagtaatcaattacggggtcattagttcatagcccatatatggagttccgcgttacataacttacggtaaatggcccgcctggctgaccgcccaacgacccccgcccattgacgtcaataatgacgtatgttcccatagtaacgccaatagggactttccattgacgtcaatgggtggactatttacggtaaactgcccacttggcagtacatcaagtgtatcatatgccaagtacgccccctattgacgtcaatgacggtaaatggcccgcctggcattatgcccagtacatgaccttatgggactttcctacttggcagtacatctacgtattagtcatcgctattaccatggtgatgcggttttggcagtacatcaatgggcgtggatagcggtttgactcacggggatttccaagtctccaccccattgacgtcaatgggagtttgttttggcaccaaaatcaacgggactttccaaaatgtcgtaacaactccgccccattgacgcaaatgggcggtaggcgtgtacggtgggaggtctatataagcagagctctctggctaactagagaacccactgcttactggcttatcgaaattaatacgactcactatagggagacccaagctggctagcatgaactccttctccacaagcgccttcggtccagttgccttctccctgggcctgctcctggtgttgcctgctgccttccctgccccagtcttcacactcgaagatttcgttggggactggcgacagacagccggctacaacctggaccaagtccttgaacagggaggtgtgtccagtttgtttcagaatctcggggtgtccgtaactccgatccaaaggattgtcctgagcggtgaaaatgggctgaagatcgacatccatgtcatcatcccgtatgaaggtctgagcggcgaccaaatgggccagatcgaaaaaatttttaaggtggtgtaccctgtggatgatcatcactttaaggtgatcctgcactatggcacactggtaatcgacggggttacgccgaacatgatcgactatttcggacggccctatgaaggcatcgccgtgttcgacggcaaaaagatcactgtaacagggaccctgtggaacggcaacaaaattatcgacgagcgcctgatcaaccccgacggctccctgctgttccgagtaaccatcaacggagtgaccggctggcggctgtgcgaacgcattctggcgctcgagaaaattgaagttatgtatcctcctccttacctagacaatgagaagagcaatggaaccattatccatgtgaaagggaaacacctttgtccaagtcccctatttcccggaccttctaagcccttttgggtgctggtggtggttgggggagtcctggcttgctatagcttgctagtaacagtggcctttattattttctgggtgaggagtaagaggagctgatctagagggcccgaacaaaaactcatctcagaagaggatctgaatagcgccgtcgaccatcatcatcatcatcattgagtttaaacccgctgatcagcctcgactgtgccttctagttgccagccatctgttgtttgcccctcccccgtgccttccttgaccctggaaggtgccactcccactgtcctttcctaataaaatgaggaaattgcatcgcattgtctgagtaggtgtcattctattctggggggtggggtggggcaggacagcaagggggaggattgggaagacaatagcaggcatgctggggatgcggtgggctctatggcttctgaggcggaaagaaccagctggggctctagggggtatccccacgcgccctgtagcggcgcattaagcgcggcgggtgtggtggttacgcgcagcgtgaccgctacacttgccagcgccctagcgcccgctcctttcgctttcttcccttcctttctcgccacgttcgccggctttccccgtcaagctctaaatcggggcatccctttagggttccgatttagtgctttacggcacctcgaccccaaaaaacttgattagggtgatggttcacgtagtgggccatcgccctgatagacggtttttcgccctttgacgttggagtccacgttctttaatagtggactcttgttccaaactggaacaacactcaaccctatctcggtctattcttttgatttataagggattttggggatttcggcctattggttaaaaaatgagctgatttaacaaaaatttaacgcgaattaattctgtggaatgtgtgtcagttagggtgtggaaagtccccaggctccccagcaggcagaagtatgcaaagcatgcatctcaattagtcagcaaccaggtgtggaaagtccccaggctccccagcaggcagaagtatgcaaagcatgcatctcaattagtcagcaaccatagtcccgcccctaactccgcccatcccgcccctaactccgcccagttccgcccattctccgccccatggctgactaattttttttatttatgcagaggccgaggccgcctctgcctctgagctattccagaagtagtgaggaggcttttttggaggcctaggcttttgcaaaaagctcccgggagcttgtatatccattttcggatctgatcagcacgtgttgacaattaatcatcggcatagtatatcggcatagtataatacgacaaggtgaggaactaaaccatggccaagttgaccagtgccgttccggtgctcaccgcgcgcgacgtcgccggagcggtcgagttctggaccgaccggctcgggttctcccgggacttcgtggaggacgacttcgccggtgtggtccgggacgacgtgaccctgttcatcagcgcggtccaggaccaggtggtgccggacaacaccctggcctgggtgtgggtgcgcggcctggacgagctgtacgccgagtggtcggaggtcgtgtccacgaacttccgggacgcctccgggccggccatgaccgagatcggcgagcagccgtgggggcgggagttcgccctgcgcgacccggccggcaactgcgtgcacttcgtggccgaggagcaggactgacacgtgctacgagatttcgattccaccgccgccttctatgaaaggttgggcttcggaatcgttttccgggacgccggctggatgatcctccagcgcggggatctcatgctggagttcttcgcccaccccaacttgtttattgcagcttataatggttacaaataaagcaatagcatcacaaatttcacaaataaagcatttttttcactgcattctagttgtggtttgtccaaactcatcaatgtatcttatcatgtctgtataccgtcgacctctagctagagcttggcgtaatcatggtcatagctgtttcctgtgtgaaattgttatccgctcacaattccacacaacatacgagccggaagcataaagtgtaaagcctggggtgcctaatgagtgagctaactcacattaattgcgttgcgctcactgcccgctttccagtcgggaaacctgtcgtgccagctgcattaatgaatcggccaacgcgcggggagaggcggtttgcgtattgggcgctcttccgcttcctcgctcactgactcgctgcgctcggtcgttcggctgcggcgagcggtatcagctcactcaaaggcggtaatacggttatccacagaatcaggggataacgcaggaaagaacatgtgagcaaaaggccagcaaaaggccaggaaccgtaaaaaggccgcgttgctggcgtttttccataggctccgcccccctgacgagcatcacaaaaatcgacgctcaagtcagaggtggcgaaacccgacaggactataaagataccaggcgtttccccctggaagctccctcgtgcgctctcctgttccgaccctgccgcttaccggatacctgtccgcctttctcccttcgggaagcgtggcgctttctcaatgctcacgctgtaggtatctcagttcggtgtaggtcgttcgctccaagctgggctgtgtgcacgaaccccccgttcagcccgaccgctgcgccttatccggtaactatcgtcttgagtccaacccggtaagacacgacttatcgccactggcagcagccactggtaacaggattagcagagcgaggtatgtaggcggtgctacagagttcttgaagtggtggcctaactacggctacactagaaggacagtatttggtatctgcgctctgctgaagccagttaccttcggaaaaagagttggtagctcttgatccggcaaacaaaccaccgctggtagcggtggtttttttgtttgcaagcagcagattacgcgcagaaaaaaaggatctcaagaagatcctttgatcttttctacggggtctgacgctcagtggaacgaaaactcacgttaagggattttggtcatgagattatcaaaaaggatcttcacctagatccttttaaattaaaaatgaagttttaaatcaatctaaagtatatatgagtaaacttggtctgacagttaccaatgcttaatcagtgaggcacctatctcagcgatctgtctatttcgttcatccatagttgcctgactccccgtcgtgtagataactacgatacgggagggcttaccatctggccccagtgctgcaatgataccgcgagacccacgctcaccggctccagatttatcagcaataaaccagccagccggaagggccgagcgcagaagtggtcctgcaactttatccgcctccatccagtctattaattgttgccgggaagctagagtaagtagttcgccagttaatagtttgcgcaacgttgttgccattgctacaggcatcgtggtgtcacgctcgtcgtttggtatggcttcattcagctccggttcccaacgatcaaggcgagttacatgatcccccatgttgtgcaaaaaagcggttagctccttcggtcctccgatcgttgtcagaagtaagttggccgcagtgttatcactcatggttatggcagcactgcataattctcttactgtcatgccatccgtaagatgcttttctgtgactggtgagtactcaaccaagtcattctgagaatagtgtatgcggcgaccgagttgctcttgcccggcgtcaatacgggataataccgcgccacatagcagaactttaaaagtgctcatcattggaaaacgttcttcggggcgaaaactctcaaggatcttaccgctgttgagatccagttcgatgtaacccactcgtgcacccaactgatcttcagcatcttttactttcaccagcgtttctgggtgagcaaaaacaggaaggcaaaatgccgcaaaaaagggaataagggcgacacggaaatgttgaatactcatactcttcctttttcaatattattgaagcatttatcagggttattgtctcatgagcggatacatatttgaatgtatttagaaaaataaacaaataggggttccgcgcacatttccccgaaaagtgccacctgacgtc

SEQ ID NO: 31 - DNA, 7703 bp, synthetic construct
  source 1..7703: mol_type = other DNA
ccaatgatatcggaaagaacatgtgagcaaaaggccagcaaaaggccaggaaccgtaaaaaggccgcgttgctggcgtttttccataggctccgcccccctgacgagcatcacaaaaatcgacgctcaagtcagaggtggcgaaacccgacaggactataaagataccaggcgtttccccctggaagctccctcgtgcgctctcctgttccgaccctgccgcttaccggatacctgtccgcctttctcccttcgggaagcgtggcgctttctcatagctcacgctgtaggtatctcagttcggtgtaggtcgttcgctccaagctgggctgtgtgcacgaaccccccgttcagcccgaccgctgcgccttatccggtaactatcgtcttgagtccaacccggtaagacacgacttatcgccactggcagcagccactggtaacaggattagcagagcgaggtatgtaggcggtgctacagagttcttgaagtggtggcctaactacggctacactagaagaacagtatttggtatctgcgctctgctgaagccagttaccttcggaaaaagagttggtagctcttgatccggcaaacaaaccaccgctggtagcggtggtttttttgtttgcaagcagcagattacgcgcagaaaaaaaggatctcaagaagatcctttgatcttttctacggggtctgacgctcagtggaacgaaaactcacgttaagggattttggtcatgagattatcaaaaaggatcttcacctagatccttttaaattaaaaatgaagttttaaatcaatctaaagtatatatgagtaaacttggtctgacagttaccaatgcttaatcagtgaggcacctatctcagcgatctgtctatttcgttcatccatagttgcctgactccccgtcgtgtagataactacgatacgggagggcttaccatctggccccagtgctgcaatgataccgcgagacccacgctcaccggctccagatttatcagcaataaaccagccagccggaagggccgagcgcagaagtggtcctgcaactttatccgcctccatccagtctattaattgttgccgggaagctagagtaagtagttcgccagttaatagtttgcgcaacgttgttgccattgctacaggcatcgtggtgtcacgctcgtcgtttggtatggcttcattcagctccggttcccaacgatcaaggcgagttacatgatcccccatgttgtgcaaaaaagcggttagctccttcggtcctccgatcgttgtcagaagtaagttggccgcagtgttatcactcatggttatggcagcactgcataattctcttactgtcatgccatccgtaagatgcttttctgtgactggtgagtactcaaccaagtcattctgagaatagtgtatgcggcgaccgagttgctcttgcccggcgtcaatacgggataataccgcgccacatagcagaactttaaaagtgctcatcattggaaaacgttcttcggggcgaaaactctcaaggatcttaccgctgttgagatccagttcgatgtaacccactcgtgcacccaactgatcttcagcatcttttactttcaccagcgtttctgggtgagcaaaaacaggaaggcaaaatgccgcaaaaaagggaataagggcgacacggaaatgttgaatactcatactcttcctttttcaatattattgaagcatttatcagggttattgtctcatgagcggatacatatttgaatgtatttagaaaaataaacaaataggggttccgcgcacatttccccgaaaagtgccacctgacgtcgccatagagcccaccgcatccccagcatgcctgctattgtcttcccaatcctcccccttgctgtcctgccccaccccaccccccagaatagaatgacacctactcagacaatgcgatgcaatttcctcattttattaggaaaggacagtgggagtggcaccttccagggtcaaggaaggcacgggggaggggcaaacaacagatggctggcaactagaaggcacagacaacaccacggaattatcagtgcccagcaacctagcccctgtccagcagcgggcaaggcaggcggcgatgagttctgccgtggcgatcgggagggggaaagcgaaagtcccagaaaggagttgacaggtggtggcaatgccccagccagtgggggttgcgtcagcaaacacagagcacaccacgccacgttgacggacaacgggccacaactcctctaaaagagacagcaaccaggatttatacaaggaggagaaaacgaaagccgtacgggaagcaatagctagatacagaggctataaagcagcatatccacacagcgtaaaaggagcaacatagttaagaatatcagtcaatctttcacaaattttgtaatccagaggttgattaacaggaacagagcgtaaataacgggaaagtttcttaacatgtttgtcttgtggcaatacacctgaactagtaattacatatccctaaaaatgtaaatgattgccccaccattttgttttattaacatttaaatgtatacccaaatcaagaaaaacagaacaaatatgggaataaatggcggtaagatgctccgccggcttaactgtgctggatatctgcagaattccaccacactggactagtggatcccatagcgtggatgatgttcagcttgtcgttgatgaaggcggtcagtctgttgaagatgcagggtccgatggtcagcaggagcagcagagtcagcagtggtcccaggaaaggcagcaggtaagggagcagtccttgcaggccggtccacagaggattggaggccaggtcctttctccgccgttccagttcctcttgcagtgtcttgatcttgtcgcgcacgatgccgctcttgttcacgtagaagcagcacttctcttgcagggccagacaaattccgccttgctcggctgtcagcaggtccagtcctcttctgttctggagcaccacttcggccagagagtccacctgatcctggaggtcctggatggtgctgctcaggatctgcacgtcggagatcagctggttgctcagcttggtgtactgtgtcacggacacgcccagtcctgtagcgcctgttgtaaaagcggcggtgattcccagtccggccagcagtgggatgaactggatagcccgcttgggtctgtagatgaagtggtcgatggcaggaataggcacgggctcgtcgccagggatgatgtcgatgtcaggcagcagtgtagccagcacgcacagtccggtccagttggtaggcaggtaggtgtaggccatgttgttgccacacaggaacacgctgccattcacggcgcagatagggcctgtcacgttggtgatggaggtgcagttggagaaggccacgtgtcccaggtcgatttcctcggtgctgttgtagctggggctgaacaggcaggaggagttgctgaactgcatgggctgcacgagcagaggtgggataatcaggcagctgatgttgtcgctgcttctggtcacgtagctcagcaggaagttgggaattgccagaggtgtaggaggtcccagtttcaggcacagccagcaatcgtccaccaggctggtgttgctcatcagcagcagattgtaggtggcgttcaggatattcagtgtctgggcgtccaccatcaggttgtcccgcactttggggatagccagagggtgatactggagttcggggtacagagccttgtggatctcttccagcttccgctgcacgctcttgattctggtggtgtccagaggtccgccgccatctgacacgtggataggggctgttgtggaccagcagatgctctggcccttgatgccgttgcaggggctctgaatcagcttgttggtgctgcccagcacctgaacatcggatgtgccgccggtctgggttttcagcagtgtggcggtgtagtaggtcttgttgccgcttctgcactgctggtagcttgtgtagcaggagctgtgcacgctgctctggtagctattacaggggcactcttgcagagggccgctagggcttgtgtccttggggatgctcttgcacttccatctctggtcaggcatcaggtaggcggtcttgccgctacaggtcacttgggacactctgtcgctaggaggctcagaaacttggccgccagagcaatcgcagggtctgccgtatctcttctgcaccagctcgatggcctttctaggatcgtcgaagccggcgtacaccagcaccaggttgtacaggaagatgatcttggtcgtaaagccggggcctggattttcttccacgtcgccacaagtcagcagggagcctctgccttcgccagagccctcggacctagggcttggcaggccggcagggatctctggtgtcactctgaacaggcccagcacggttgctccctgtgtcagctgccatgcgtggcgggcccttgcctcggtgtgcaggtgcactcccagcctctgtccggcggacaggtgcagcagtctgccctggaagccaaaggcgctgttccgtgcctcgctagaggctggaggcagatccacggtcagggccagggcggcggccccggcggcgctccgcagtggctgcaggtgcagggccaggctcacagagccggagccctcgccggccaccactctcctcagctccagctggaagaacacgtagtacacgccggccttggccaccaccagctcctttgtgtcctccttatagctcagtcctccggtcagagacacgccggccaggcctgggtcagagtaccaggacagagggccatcgatcagcagcacattctgggccaccagctgggcaaacattccctgcctcagatccagcaggccggcaggatcgtctgggctcagctcaggtccctctctcagccttgggctggcggcagagcctggggaggctctggcgccggacacggcccagggacaggccaggaacacggcgcaggcggcggccagcagcagcagtaataacaggccggccaccagggcccaaggcagcacccggcaggcccttgcccttggggcgggtggccatggggcctcggggtccaggctggcgtcagaggcgtactccattgggccagggttctcctccacgtcgccacaggtcagcagggagccccttccctctccgctgcccttctttctgccccgcttgcaatacagggtgatgaccaggctcagcagcagcacgccacaggttccggccagaggtgcccagatgtagatatcgcaggcaaagtccagtcccctggtgtgcactgccccccctgcggcagggcgacaggcctcgggcctcagagacagtggctgggaggcgatggttggggctggtgtaggtggcctaggggcgggggttgtggtagaggggtcgcgcttgatctccagcttggtgccgctgccgaaggtgaaggggttggagctccactgctggcaatagtaggttgctgcatcctctgcctccattccgctgatggtcaggctataagatgtgccggagccgctgcccctgaagtgtgcaggcactccgctggccagcttagatgtgtcgtagatccatctcttgggggaggtgccgctcttctgctgataccaattcatgtagctcacgctggagctggcggagcaggtcattgtcaccttctctcctggagaggcggacatgatggctggggactgggtcatcacgatatcgctgccgccgccgccagagcctcctccgccggagcctcctcctccagaggacacggtcaccagtgtgccctggccccaatagtccagacagtagtgatcgtcatagtagccggcgcaatagtacacggcagaatcctcggatgtcaggctagacagctgcatgtaggcggtggagctagacttgtctgtggtcagtgtggccttatccttgaacttctgattatagtttgtgtagccgcggctggggttgatgtagccgatccactccagtccctgtcctggcctctgcttcacccagtgcatggtatacctggtgaaggtgtagccggaggccttacagctcatcttcacagaggctcctggccgggccagctctgctccggactccagcagctgcacctgagggcgggcggcgtgcagcagcagggccagaggcagcagcagggctgtcactggcagggctggtccaggattctcctccacgtcgccgcaggtcagcaggctgccccttccctctccagagccgaaacaggtatcggacttgtcgcaggagcttgtcttagaggacttaaacactctctgggcctcatcgctccgctctgggatgtggatcttctctctcttcttggtctgctcagactcctcccgctccatggtgtttgtgccacacttgtaggaattgcgaggccgcttcttcttcttccacttccacaggatcagacagaacaccatcacgcagatgatcacggttggcagcacggctgtgatccaagggatgtgatctggaggtggctgggggtcctccagctcgatagaaaatgggctagacagcaggcgggtcttgtctgtctccaggatgcagaagatggtcatgttggatgtcacatctggaaagctcacagacagggagatgctcacgtcatacagctcggtcacgttatcctgggacttctgcatgatgccgtcgtactcgatggtgctgttctttgtcctcagcagcacgctcatcttcttgggctctggatagccgtggatggagctacaggtcaggttgatgtacacgttctctgtgatgttagagattggcacgatctcaggctgggaaaagttggccagcacgctcagctcgctgttcatctggtggattctgatcatgccggtaggcttcttgtggtggatgatgcactggtacaggcccttatccttgatctgcagattgtgcagcctcagggtccaagaatcggagtcgaagctggtccggcccatatacttggagtgcacgctgtcaaacttctccttgcccaggtacacctcattcagcaccaggttctcctgatcctgccagaacaccaccagctcgctcagagactgattctgggagttggcgaactgacagggcaggtcggctgtctcgttaaagtaggcctggatcttcagtggtgctgctccgctcagcaggaaggccatcacaaacaggatattagacaggcccatggtgcactgggggtccatggtggcggccctgcaggcttctatggaagtcaaaacagcgtggatggcgtctccaggcgatctgacggttcactaaacgagctctgcttatatagagctcggggagcagaagcgcgcgaacagaagcgagaagcgaactgattggttagttcaaataaggcacagggtcatttcaggtccttggggcaccctggaaacatctgatggttctctagaaactgctgagggcgggaccgcatctggggaccatctgttcttggccctgagccggggcaggaactgcttaccacagatatcctgtttggcccatattctgctgttccaactgttcttggccctgagccggggcaggaactgcttaccacagatatcctgtttggcccatattctcctgtttctctgttcctagacgtc

SEQ ID NO: 32 - DNA, 7595 bp, synthetic construct
  source 1..7595: mol_type = other DNA
ccaatgatatcggaaagaacatgtgagcaaaaggccagcaaaaggccaggaaccgtaaaaaggccgcgttgctggcgtttttccataggctccgcccccctgacgagcatcacaaaaatcgacgctcaagtcagaggtggcgaaacccgacaggactataaagataccaggcgtttccccctggaagctccctcgtgcgctctcctgttccgaccctgccgcttaccggatacctgtccgcctttctcccttcgggaagcgtggcgctttctcatagctcacgctgtaggtatctcagttcggtgtaggtcgttcgctccaagctgggctgtgtgcacgaaccccccgttcagcccgaccgctgcgccttatccggtaactatcgtcttgagtccaacccggtaagacacgacttatcgccactggcagcagccactggtaacaggattagcagagcgaggtatgtaggcggtgctacagagttcttgaagtggtggcctaactacggctacactagaagaacagtatttggtatctgcgctctgctgaagccagttaccttcggaaaaagagttggtagctcttgatccggcaaacaaaccaccgctggtagcggtggtttttttgtttgcaagcagcagattacgcgcagaaaaaaaggatctcaagaagatcctttgatcttttctacggggtctgacgctcagtggaacgaaaactcacgttaagggattttggtcatgagattatcaaaaaggatcttcacctagatccttttaaattaaaaatgaagttttaaatcaatctaaagtatatatgagtaaacttggtctgacagttaccaatgcttaatcagtgaggcacctatctcagcgatctgtctatttcgttcatccatagttgcctgactccccgtcgtgtagataactacgatacgggagggcttaccatctggccccagtgctgcaatgataccgcgagacccacgctcaccggctccagatttatcagcaataaaccagccagccggaagggccgagcgcagaagtggtcctgcaactttatccgcctccatccagtctattaattgttgccgggaagctagagtaagtagttcgccagttaatagtttgcgcaacgttgttgccattgctacaggcatcgtggtgtcacgctcgtcgtttggtatggcttcattcagctccggttcccaacgatcaaggcgagttacatgatcccccatgttgtgcaaaaaagcggttagctccttcggtcctccgatcgttgtcagaagtaagttggccgcagtgttatcactcatggttatggcagcactgcataattctcttactgtcatgccatccgtaagatgcttttctgtgactggtgagtactcaaccaagtcattctgagaatagtgtatgcggcgaccgagttgctcttgcccggcgtcaatacgggataataccgcgccacatagcagaactttaaaagtgctcatcattggaaaacgttcttcggggcgaaaactctcaaggatcttaccgctgttgagatccagttcgatgtaacccactcgtgcacccaactgatcttcagcatcttttactttcaccagcgtttctgggtgagcaaaaacaggaaggcaaaatgccgcaaaaaagggaataagggcgacacggaaatgttgaatactcatactcttcctttttcaatattattgaagcatttatcagggttattgtctcatgagcggatacatatttgaatgtatttagaaaaataaacaaataggggttccgcgcacatttccccgaaaagtgccacctgacgtcgccatagagcccaccgcatccccagcatgcctgctattgtcttcccaatcctcccccttgctgtcctgccccaccccaccccccagaatagaatgacacctactcagacaatgcgatgcaatttcctcattttattaggaaaggacagtgggagtggcaccttccagggtcaaggaaggcacgggggaggggcaaacaacagatggctggcaactagaaggcacagacaacaccacggaattatcagtgcccagcaacctagcccctgtccagcagcgggcaaggcaggcggcgatgagttctgccgtggcgatcgggagggggaaagcgaaagtcccagaaaggagttgacaggtggtggcaatgccccagccagtgggggttgcgtcagcaaacacagagcacaccacgccacgttgacggacaacgggccacaactcctctaaaagagacagcaaccaggatttatacaaggaggagaaaacgaaagccgtacgggaagcaatagctagatacagaggctataaagcagcatatccacacagcgtaaaaggagcaacatagttaagaatatcagtcaatctttcacaaattttgtaatccagaggttgattaacaggaacagagcgtaaataacgggaaagtttcttaacatgtttgtcttgtggcaatacacctgaactagtaattacatatccctaaaaatgtaaatgattgccccaccattttgttttattaacatttaaatgtatacccaaatcaagaaaaacagaacaaatatgggaataaatggcggtaagatgctccgccggcttatgagatttcctcaggaggggtgcctttgatgtcattaacatcagatcgtgggctggcaggccggtccaggggtctgcggtagatcttagtcttggactgcatcttgggctccatttgtagttttacagcttcgattctggaagagacaaagttaacaaggaggttaaagatacaggggccgaacagcagcagcagaatgatggcggccagaggtcccaggaagggcagaatccaaggcatccactggctcagcaggccccaaggtcctgtgtttctcagttcctcggctctccgctggattcgatctcgaatttctttaactttctcagtgacgattccggactggttcacgtagtagcagcactcttcgcccagaaacagacaggtgccgcctctctcggctgtcagcagatcgagtgctctccgattctggagcaccacggcagccagagaattgagctggtcctggagtgtgaccaggctgtcggccactctttccatgtccccatttagttcttgagatagtttgtagtagaactgagtagaggtggtgatgcctccgattccagttccgagggctcccagcacgccagctccaatcacaaaaggcaggatgggcacccgcttgttccgaggcttggagatcacgtagctgtacaggtcctgctcggtgtagatggtcataggaggcaccaggaagctcaggaagcacatagactcgctgctgccattcaggcagcggtaggcgcttgtgccacacacgaagaagatgccgctgggcagacacacgatctgtgttggaggggtgacccatctgatgcactggctgttggtggtgtaggtggtgttggagaacttcacgcaggtcaggttgctggtgtgggtgatttccagattggacaccaggggtcccacgagcacgctggtggtattgatctcggtgctgaagttgttccactgctcaggcacggggattgacacgtagggtctgaagttcagaggcaggcagatccagcagttggtaggattctgagcggacacctcgtgcagtccggtcagtgtggtgttgaacagggacaccagccgtgtgtgggttctcagtgtctcgtgcagcttggacaggtccagtcctttgtaagggctgcttgtgccgtgcactctggtcagctgggagatcacttctttcacgtgcttttctctggcctggtcttgaactccgccaccatcggacatgccggtctgggtaaagtaggtccaacaaactgtcacgcccaggccgccagggcagctagggttaatcatcttgccggtccagtagtgtgtgttggcgtgcatacacagtgtggcgctatggtagcagttccggggcatgtgtgtgtgggctgtgaaggtaggggtgcccttgctcaggcttctgtagctaggggcgtcaatgttgccgggcctctgcattcgccacaggaactcttggtaggggctgctgcttgtcatacagcggcatggagggggtgcgtcaccagtggaacctggaacccagagcagcagtacccatagcaggagtgtgtctgtctccatggggcctggattttcttccacgtcgccacaagtcagcagggagcctctgccttcgccagagccctcggacctagggcttggcaggccggcagggatctctggtgtcactctgaacaggcccagcacggttgctccctgtgtcagctgccatgcgtggcgggcccttgcctcggtgtgcaggtgcactcccagcctctgtccggcggacaggtgcagcagtctgccctggaagccaaaggcgctgttccgtgcctcgctagaggctggaggcagatccacggtcagggccagggcggcggccccggcggcgctccgcagtggctgcaggtgcagggccaggctcacagagccggagccctcgccggccaccactctcctcagctccagctggaagaacacgtagtacacgccggccttggccaccaccagctcctttgtgtcctccttatagctcagtcctccggtcagagacacgccggccaggcctgggtcagagtaccaggacagagggccatcgatcagcagcacattctgggccaccagctgggcaaacattccctgcctcagatccagcaggccggcaggatcgtctgggctcagctcaggtccctctctcagccttgggctggcggcagagcctggggaggctctggcgccggacacggcccagggacaggccaggaacacggcgcaggcggcggccagcagcagcagtaataacaggccggccaccagggcccaaggcagcacccggcaggcccttgcccttggggcgggtggccatggggcctcggggtccaggctggcgtcagaggcgtactccattgggccagggttctcctccacgtcgccacaggtcagcagggagccccttccctctccgctgcccttctttctgccccgcttgcaatacagggtgatgaccaggctcagcagcagcacgccacaggttccggccagaggtgcccagatgtagatatcgcaggcaaagtccagtcccctggtgtgcactgccccccctgcggcagggcgacaggcctcgggcctcagagacagtggctgggaggcgatggttggggctggtgtaggtggcctaggggcgggggttgtggtagaggggtcgcgcttgatctccagcttggtgccgctgccgaaggtgaaggggttggagctccactgctggcaatagtaggttgctgcatcctctgcctccattccgctgatggtcaggctataagatgtgccggagccgctgcccctgaagtgtgcaggcactccgctggccagcttagatgtgtcgtagatccatctcttgggggaggtgccgctcttctgctgataccaattcatgtagctcacgctggagctggcggagcaggtcattgtcaccttctctcctggagaggcggacatgatggctggggactgggtcatcacgatatcgctgccgccgccgccagagcctcctccgccggagcctcctcctccagaggacacggtcaccagtgtgccctggccccaatagtccagacagtagtgatcgtcatagtagccggcgcaatagtacacggcagaatcctcggatgtcaggctagacagctgcatgtaggcggtggagctagacttgtctgtggtcagtgtggccttatccttgaacttctgattatagtttgtgtagccgcggctggggttgatgtagccgatccactccagtccctgtcctggcctctgcttcacccagtgcatggtatacctggtgaaggtgtagccggaggccttacagctcatcttcacagaggctcctggccgggccagctctgctccggactccagcagctgcacctgagggcgggcggcgtgcagcagcagggccagaggcagcagcagggctgtcactggcagggctggtccaggattctcctccacgtcgccgcaggtcagcaggctgccccttccctctccagagccgaaacaggtatcggacttgtcgcaggagcttgtcttagaggacttaaacactctctgggcctcatcgctccgctctgggatgtggatcttctctctcttcttggtctgctcagactcctcccgctccatggtgtttgtgccacacttgtaggaattgcgaggccgcttcttcttcttccacttccacaggatcagacagaacaccatcacgcagatgatcacggttggcagcacggctgtgatccaagggatgtgatctggaggtggctgggggtcctccagctcgatagaaaatgggctagacagcaggcgggtcttgtctgtctccaggatgcagaagatggtcatgttggatgtcacatctggaaagctcacagacagggagatgctcacgtcatacagctcggtcacgttatcctgggacttctgcatgatgccgtcgtactcgatggtgctgttctttgtcctcagcagcacgctcatcttcttgggctctggatagccgtggatggagctacaggtcaggttgatgtacacgttctctgtgatgttagagattggcacgatctcaggctgggaaaagttggccagcacgctcagctcgctgttcatctggtggattctgatcatgccggtaggcttcttgtggtggatgatgcactggtacaggcccttatccttgatctgcagattgtgcagcctcagggtccaagaatcggagtcgaagctggtccggcccatatacttggagtgcacgctgtcaaacttctccttgcccaggtacacctcattcagcaccaggttctcctgatcctgccagaacaccaccagctcgctcagagactgattctgggagttggcgaactgacagggcaggtcggctgtctcgttaaagtaggcctggatcttcagtggtgctgctccgctcagcaggaaggccatcacaaacaggatattagacaggcccatggtgcactgggggtccatggtggcggccctgcaggcttctatggaagtcaaaacagcgtggatggcgtctccaggcgatctgacggttcactaaacgagctctgcttatatagagctcggggagcagaagcgcgcgaacagaagcgagaagcgaactgattggttagttcaaataaggcacagggtcatttcaggtccttggggcaccctggaaacatctgatggttctctagaaactgctgagggcgggaccgcatctggggaccatctgttcttggccctgagccggggcaggaactgcttaccacagatatcctgtttggcccatattctgctgttccaactgttcttggccctgagccggggcaggaactgcttaccacagatatcctgtttggcccatattctcctgtttctctgttcctagacgtc

SEQ ID NO: 33 - DNA, 10 bp, synthetic construct
  source 1..10: mol_type = other DNA
attgagctct

SEQ ID NO: 34 - DNA, 10 bp, synthetic construct
  source 1..10: mol_type = other DNA
atggatctct

SEQ ID NO: 35 - DNA, 10 bp, synthetic construct
  source 1..10: mol_type = other DNA
gttgatctct

SEQ ID NO: 36 - DNA, 1692 bp, synthetic construct
  source 1..1692: mol_type = other DNA
atgggattcacaacaaagataatcttcttatacaacctagtactggtctacgcggggtttgacgaccctcgcaaagccatagaactagtacaaaagcgatatggccgaccatgcgattgcagcggaggacaagtgtccgagcccccgtcagacagggtcagtcaagtgacttgctcaggcaagacagcttacttaatgcccgaccaaagatggaaatgtaagtcaattccaaaagacacctccccaagcgggccactccaagagtgcccctgtaattcttaccagtcctcagtacacagttcttgttatacctcataccaacaatgcagatcaggcaataagacatattatacggctactctgctaaaaacacaaactgggggcaccagtgatgtacaagtattaggatccaccaacaaacttatacaatctccctgtaatggcataaaagggcagtctatttgctggagcactacagctcctatccacgtctctgatggaggaggtccattagacaccacaagaattaaaagtgttcagagaaaactggaagaaattcataaagccctatatcctgaacttcagtatcaccctttggccatacctaaggttagagataacctcatggtcgatgcccagactttaaacattctcaatgccacttacaacttactcctaatgtccaacacgagcctagtggacgactgttggctttgtttaaaattaggtccccctactcccctcgcaatacctaacttcctattatcctacgtgactcgctcctcggataatatctcttgtttaataattcccccccttctagttcaaccgatgcagttttccaattcatcttgcctcttttccccctcctacaacagtacagaagaaatagatctaggccatgttgccttcagcaactgtacctccataaccaatgtcaccggtcccatatgcgctgtaaatggttcggtctttctctgtggcaataacatggcatacacttatctacccacgaactggacggggctttgcgtcctagcaactctcctccccgacattgacatcattcccggagatgaaccggtccccatccctgctattgatcattttatatatagacctaaacgggccatacagtttattcctttactagcagggctagggatcaccgcagccttcacaacaggagctacaggcctaggtgtctctgtgacccaatatacaaaattatctaatcagctaatttctgatgtacaaatcttatctagcaccatacaagatctgcaagatcaagtagactcattagccgaagtggttctccagaacagaagggggctagatctacttacagcagaacaaggaggaatctgtttagccctgcaagaaaaatgctgcttttatgttaacaagtcagggattgtgagagacaaaataaaaaccttacaagaagaactagaaagacgtagaaaagatctagcttccaacccactttggactgggcttcaagggctcctcccttacctcctgccctttcttggccctctacttaccctcctgctcttactcaccattgggccgtgcatttttaaccgtctaaccgcttttattaatgataagttaaacataatacacgctatggtgctaacccaacagtatcaggtgctcagaaccgatgaagaagctcaagattga

SEQ ID NO: 37 - DNA, 1638 bp, synthetic construct
  source 1..1638: mol_type = other DNA
atgggattcacaacaaagataatcttcttatacaacctagtactggtctacgcggggtttgacgaccctcgcaaagccatagaactagtacaaaagcgatatggccgaccatgcgattgcagcggaggacaagtgtccgagcccccgtcagacagggtcagtcaagtgacttgctcaggcaagacagcttacttaatgcccgaccaaagatggaaatgtaagtcaattccaaaagacacctccccaagcgggccactccaagagtgcccctgtaattcttaccagtcctcagtacacagttcttgttatacctcataccaacaatgcagatcaggcaataagacatattatacggctactctgctaaaaacacaaactgggggcaccagtgatgtacaagtattaggatccaccaacaaacttatacaatctccctgtaatggcataaaagggcagtctatttgctggagcactacagctcctatccacgtctctgatggaggaggtccattagacaccacaagaattaaaagtgttcagagaaaactggaagaaattcataaagccctatatcctgaacttcagtatcaccctttggccatacctaaggttagagataacctcatggtcgatgcccagactttaaacattctcaatgccacttacaacttactcctaatgtccaacacgagcctagtggacgactgttggctttgtttaaaattaggtccccctactcccctcgcaatacctaacttcctattatcctacgtgactcgctcctcggataatatctcttgtttaataattcccccccttctagttcaaccgatgcagttttccaattcatcttgcctcttttccccctcctacaacagtacagaagaaatagatctaggccatgttgccttcagcaactgtacctccataaccaatgtcaccggtcccatatgcgctgtaaatggttcggtctttctctgtggcaataacatggcatacacttatctacccacgaactggacggggctttgcgtcctagcaactctcctccccgacattgacatcattcccggagatgaaccggtccccatccctgctattgatcattttatatatagacctaaacgggccatacagtttattcctttactagcagggctagggatcaccgcagccttcacaacaggagctacaggcctaggtgtctctgtgacccaatatacaaaattatctaatcagctaatttctgatgtacaaatcttatctagcaccatacaagatctgcaagatcaagtagactcattagccgaagtggttctccagaacagaagggggctagatctacttacagcagaacaaggaggaatctgtttagccctgcaagaaaaatgctgcttttatgttaacaagtcagggattgtgagagacaaaataaaaaccttacaagaagaactagaaagacgtagaaaagatctagcttccaacccactttggactgggcttcaagggctcctcccttacctcctgccctttcttggccctctacttaccctcctgctcttactcaccattgggccgtgcatttttaaccgtctaaccgcttttattaatgataagttaaacataatacacgctatg

SEQ ID NO: 38 - DNA, 1689 bp, synthetic construct
  source 1..1689: mol_type = other DNA
atgggattcacaacaaagataatcttcttatacaacctagtactggtctacgcggggtttgacgaccctcgcaaagccatagaactagtacaaaagcgatatggccgaccatgcgattgcagcggaggacaagtgtccgagcccccgtcagacagggtcagtcaagtgacttgctcaggcaagacagcttacttaatgcccgaccaaagatggaaatgtaagtcaattccaaaagacacctccccaagcgggccactccaagagtgcccctgtaattcttaccagtcctcagtacacagttcttgttatacctcataccaacaatgcagatcaggcaataagacatattatacggctactctgctaaaaacacaaactgggggcaccagtgatgtacaagtattaggctccaccaacaaacttatacaatctccctgtaatggcataaaagggcagtctatttgctggagcactacagctcctatccacgtctctgatggaggaggtccattagacaccacaagaattaaaagtgttcagagaaaactggaagaaattcataaagccctatatcctgaacttcagtatcaccctttggccatacctaaggttagagataacctcatggtcgatgcccagactttaaacattctcaatgccacttacaacttactcctaatgtccaacacgagcctagtggacgactgttggctttgtttaaaattaggtccccctactcccctcgcaatacctaacttcctattatcctacgtgactcgctcctcggataatatctcttgtttaataattcccccccttctagttcaaccgatgcagttttccaattcatcttgcctcttttccccctcctacaacagtacagaagaaatagatctaggccatgttgccttcagcaactgtacctccataaccaatgtcaccggtcccatatgcgctgtaaatggttcggtctttctctgtggcaataacatggcatacacttatctacccacgaactggacggggctttgcgtcctagcaactctcctccccgacattgacatcattcccggagatgaaccggtccccatccctgctattgatcattttatatatagacctaaacgggccatacagtttattcctttactagcagggctagggatcaccgcagccttcacaacaggagctacaggcctaggtgtctctgtgacccaatatacaaaattatctaatcagctaatttctgatgtacaaatcttatctagcaccatacaagatctgcaagatcaagtagactcattagccgaagtggttctccagaacagaagggggctagatctacttacagcagaacaaggaggaatctgtttagccctgcaagaaaaatgctgcttttatgttaacaagtcagggattgtgagagacaaaataaaaaccttacaagaagaactagaaagacgtagaaaagatctagcttccaacccactttggactgggcttcaagggctcctcccttacctcctgccctttcttggccctctacttaccctcctgctcttactcaccattgggccgtgcatttttaaccgtctagtccagttcgttaaggatagaatatctgtcgtccaagcacttgtcctgacgcagcagtaccatcaattgaagccgttggagtacgagccatga

SEQ ID NO: 39 - DNA, 1692 bp, synthetic construct
  source 1..1692: mol_type = other DNA
atgggattcacaacaaagataatcttcttatacaacctagtactggtctacgcggggtttgacgaccctcgcaaagccatagaactagtacaaaagcgatatggccgaccatgcgattgcagcggaggacaagtgtccgagcccccgtcagacagggtcagtcaagtgacttgctcaggcaagacagcttacttaatgcccgaccaaagatggaaatgtaagtcaattccaaaagacacctccccaagcgggccactccaagagtgcccctgtaattcttaccagtcctcagtacacagttcttgttatacctcataccaacaatgcagatcaggcaataagacatattatacggctactctgctaaaaacacaaactgggggcaccagtgatgtacaagtattaggctccaccaacaaacttatacaatctccctgtaatggcataaaagggcagtctatttgctggagcactacagctcctatccacgtctctgatggaggaggtccattagacaccacaagaattaaaagtgttcagagaaaactggaagaaattcataaagccctatatcctgaacttcagtatcaccctttggccatacctaaggttagagataacctcatggtcgatgcccagactttaaacattctcaatgccacttacaacttactcctaatgtccaacacgagcctagtggacgactgttggctttgtttaaaattaggtccccctactcccctcgcaatacctaacttcctattatcctacgtgactcgctcctcggataatatctcttgtttaataattcccccccttctagttcaaccgatgcagttttccaattcatcttgcctcttttccccctcctacaacagtacagaagaaatagatctaggccatgttgccttcagcaactgtacctccataaccaatgtcaccggtcccatatgcgctgtaaatggttcggtctttctctgtggcaataacatggcatacacttatctacccacgaactggacggggctttgcgtcctagcaactctcctccccgacattgacatcattcccggagatgaaccggtccccatccctgctattgatcattttatatatagacctaaacgggccatacagtttattcctttactagcagggctagggatcaccgcagccttcacaacaggagctacaggcctaggtgtctctgtgacccaatatacaaaattatctaatcagctaatttctgatgtacaaatcttatctagcaccatacaagatctgcaagatcaagtagactcattagccgaagtggttctccagaacagaagggggctagatctacttacagcagaacaaggaggaatctgtttagccctgcaagaaaaatgctgcttttatgttaacaagtcagggattgtgagagacaaaataaaaaccttacaagaagaactagaaagacgtagaaaagatctagcttccaacccactttggactgggcttcaagggctcctcccttacctcctgccctttcttggccctctacttaccctcctgctcttactcaccattgggccgtgcatttttaaccgtctaaccgcttttattaatgataagttaaacataatacacgctatggtgctaacccaacagtatcaggtgctcagaaccgatgaagaagctcaagattga

SEQ ID NO: 40 - DNA, 1692 bp, synthetic construct
  source 1..1692: mol_type = other DNA
atgggctttacgaccaagatcatcttcctgtacaacctggtgctggtgtacgccggcttcgacgatcctagaaaggccatcgagctggtgcagaagagatacggcagaccctgcgattgctctggcggccaagtttctgagcctcctagcgacagagtgtcccaagtgacctgtagcggcaagaccgcctacctgatgcctgaccagagatggaagtgcaagagcatccccaaggacacaagccctagcggccctctgcaagagtgcccctgtaatagctaccagagcagcgtgcacagctcctgctacacaagctaccagcagtgcagaagcggcaacaagacctactacaccgccacactgctgaaaacccagaccggcggcacatccgatgttcaggtgctgggcagcaccaacaagctgattcagagcccctgcaacggcatcaagggccagagcatctgctggtccacaacagcccctatccacgtgtcagatggcggcggacctctggacaccaccagaatcaagagcgtgcagcggaagctggaagagatccacaaggctctgtaccccgaactccagtatcaccctctggctatccccaaagtgcgggacaacctgatggtggacgcccagacactgaatatcctgaacgccacctacaatctgctgctgatgagcaacaccagcctggtggacgattgctggctgtgcctgaaactgggacctcctacacctctggcaattcccaacttcctgctgagctacgtgaccagaagcagcgacaacatcagctgcctgattatcccacctctgctcgtgcagcccatgcagttcagcaactcctcctgcctgttcagccccagctacaacagcaccgaggaaatcgacctgggacacgtggccttctccaactgcacctccatcaccaacgtgacaggccctatctgcgccgtgaatggcagcgtgttcctgtgtggcaacaacatggcctacacctacctgcctaccaactggaccggactgtgcgtgctggctacactgctgcctgacatcgacatcatccctggcgacgagcccgtgcctattcctgccatcgaccacttcatctacagacccaagcgggctatccagttcatcccactgctggccggactgggaatcaccgccgcttttacaacaggcgctacaggactgggcgtgtccgtgacacagtacaccaagctgagcaaccagctgatctccgacgtgcagatcctgagcagcaccatccaggacctccaggatcaggtggactctctggccgaagtggtgctccagaacagaagaggactggacctgctgacagccgagcaaggcggaatttgtctggccctgcaagagaagtgctgcttctacgtgaacaagagcggcatcgtgcgcgacaagatcaagacactgcaagaggaactggaacggcggagaaaggacctggcctccaatcctctgtggaccggcctgcaaggactgctcccttacctgctgcctttcctgggaccactgctgactctgctgctcctgctgaccatcggaccctgcatcttcaacagactgaccgccttcatcaacgacaagctgaacatcatccacgctatggtgctgacacagcagtaccaggtgctgcggacagatgaggaagcccaggattga

SEQ ID NO: 41 - DNA, 1617 bp, Homo sapiens
  source 1..1617: mol_type = unassigned DNA
atggccctcccttatcatatttttctctttactgttcttttaccctctttcactctcactgcaccccctccatgccgctgtatgaccagtagctccccttaccaagagtttctatggagaatgcagcgtcccggaaatattgatgccccatcgtataggagtctttctaagggaacccccaccttcactgcccacacccatatgccccgcaactgctatcactctgccactctttgcatgcatgcaaatactcattattggacaggaaaaatgattaatcctagttgtcctggaggacttggagtcactgtctgttggacttacttcacccaaactggtatgtctgatgggggtggagttcaagatcaggcaagagaaaaacatgtaaaagaagtaatctcccaactcacccgggtacatggcacctctagcccctacaaaggactagatctctcaaaactacatgaaaccctccgtacccatactcgcctggtaagcctatttaataccaccctcactgggctccatgaggtctcggcccaaaaccctactaactgttggatatgcctccccctgaacttcaggccatatgtttcaatccctgtacctgaacaatggaacaacttcagcacagaaataaacaccacttccgttttagtaggacctcttgtttccaatctggaaataacccatacctcaaacctcacctgtgtaaaatttagcaatactacatacacaaccaactcccaatgcatcaggtgggtaactcctcccacacaaatagtctgcctaccctcaggaatattttttgtctgtggaacctcagcctatcgttgtttgaatggctcttcagaatctatgtgcttcctctcattcttagtgccccctatgaccatctacactgaacaagatttatacagttatgtcatatctaagccccgcaacaaaagagtacccattcttccttttgttataggagcaggagtgctaggtgcactaggtactggcattggcggtatcacaacctctactcagttctactacaaactatctcaagaactaaatggggacatggaacgggtcgccgactccctggtcaccttgcaagatcaacttaactccctagcagcagtagtccttcaaaatcgaagagctttagacttgctaaccgctgaaagagggggaacctgtttatttttaggggaagaatgctgttattatgttaatcaatccggaatcgtcactgagaaagttaaagaaattcgagatcgaatacaacgtagagcagaggagctccgaaacactggaccctggggcctcctcagccaatggatgccctggattctccccttcttaggacctctagcagctataatattgctactcctctttggaccctgtatctttaacctccttgttaactttgtctcttccagaatcgaagctgtaaaactacaaatggagcccaagatgcagtccaagactaagatctaccgcagacccctggaccggcctgccagcccacgatctgatgttaatgacatcaaaggcacccctcctgaggaaatctcagctgcacaacctctactacgccccaattcagcaggaagcagttag

SEQ ID NO: 42 - DNA, 1617 bp, synthetic construct
  source 1..1617: mol_type = other DNA
atgggactgctgctgctggtgctgatcctgacaccttctctggccgcctacagacaccctgacttcccactgctggaaaaggcccagcagctcctgcaaagcacaggcagcccctacagcaccaactgctggctgtgtaccagctccagcacagagacacccggcacagcctatcctgcctctccaagagagtggacctctatcgaggccgagctgcacatcagctacagatgggaccccaacctgaagggcctgatgaggccagccaatagcctgctgagcaccgtgaagcaggacttccccgacatcagacagaagcctccaatcttcggccccatcttcaccaacatcaacctgatgggaatcgcccctatctgcgtgatggctaagcggaagaacggcaccaacgtgggcacactgcctagcaccgtgtgcaacgtgaccttcaccgtggacagcaaccagcagacctaccagacatacacccacaaccagttccggcaccagcctcggtttcccaagcctcctaacatcacctttccacagggcaccctgctggacaagagcagcagattctgtcagggcagaccctccagctgctctacccggaacttctggttcagacccgccgactacaaccagtgcctccagatcagcaacctgagcagcacagccgaatgggtgctgctggaccagaccagaaacagcctgttctgggagaacaagaccaagggcgctaaccagagccagacaccttgtgtgcaggttctggccggcatgacaatcgccacaagctacctgggcatcagcgccgtgtctgagttcttcggcacaagcctgacaccactgttccacttccacatcagcacatgcctgaaaacccagggcgctttctacatctgcggccagtccatccaccagtgtctgccatctaactggaccggcacctgtaccatcggctacgtgacccctgacatctttatcgcccctggcaacctgtctctgcccattcctatctacggcaacagccctctgcctagagtgcggagagccatccacttcattcctctgctggccggcctgggaatcctggctggaacaggcactggaatcgccggcattacaaaggccagcctgacctacagccagctgagcaaagagatcgccaacaacatcgacacaatggctaaggccctgaccaccatgcaagagcagatcgactctctggctgccgtggtgctccagaatagacgcggactggacatgctgacagccgctcaaggcggaatttgtctggccctggatgagaagtgctgcttctgggtcaaccagagcggcaaggtgcaggacaacatccggcagctgctgaatcaggccagcagcctgagagagagagccacacaaggctggctgaactgggaaggtacctggaagtggttcagctgggtgctccctctgaccggacctctggtttctctgctcctcctgctgctgttcggcccctgtctgctgaacctgattacccagtttgtgtccagccggctccaggccatcaagctccagaccaatttgagcgccggcagacaccccagaaacatccaagagtccccattctga

SEQ ID NO: 43 - DNA, 1620 bp, synthetic construct
  source 1..1620: mol_type = other DNA
atggagacagacacactcctgctatgggtactgctgctctgggttccaggttccactggtgacgcaccccctccatgccgctgtatgacaagcagcagcccctaccaagagttcctgtggcgaatgcagaggcccggcaacattgacgcccctagctacagaagcctgagcaagggcacccctaccttcacagcccacacacacatgccccggaactgctaccatagcgccacactgtgtatgcacgccaacacacactactggaccggcaagatgattaaccctagctgccctggcggcctgggcgtgacagtttgttggacctactttacccagaccggcatgtccgatggtggcggagttcaagaccaggccagagaaaagcacgtgaaagaagtgatctcccagctgaccagagtgcacggcacaagcagcccttacaaaggactggacctgtccaagctgcacgagacactgagaacccacacacggctggtgtccctgttcaacaccacactgaccggactgcacgaggtgtccgctcagaatcctaccaactgctggatctgcctgcctctgaacttcagaccctacgtgtcaatccccgtgcctgagcagtggaacaacttcagcaccgagatcaataccaccagcgtgctcgtgggacccctggtgtccaatctggaaatcacccacaccagcaacctgacctgcgtgaagttctccaacaccacctacaccaccaacagccagtgcatcagatgggtcacccctccaacacagatcgtgtgtctgcccagcggcatcttcttcgtgtgtggcacaagcgcctaccgctgcctgaatggcagcagcgagtctatgtgcttcctgagcttcctggtgcctcctatgaccatctacaccgagcaggacctgtacagctacgtgatctccaagcctcggaacaagcgggtgcccatcctgccttttgtgattggagctggcgtgctgggagccctcggaactggaatcggaggcatcaccacctctactcagttctactacaaactatctcaagaactaaatggggacatggaaagagtggccgacagcctggtcacactccaggaccagctcaattctctggctgccgtggtgctccagaatcggagagcactcgatctgctgacagccgagagaggcggcacctgtctgtttctgggcgaagagtgctgctactacgtgaaccagtccggaatcgtcactgagaaagttaaagaaattcgagatcgaatccagcggagagccgaggaactgagaaacacaggaccttggggcctgctgagccagtggatgccttggattctgcccttcctgggacctctggccgccatcattctgctgctgctgttcggcccctgtatctttaacctccttgttaactttgtctcttccagaatcgaagctgtaaaactacaaatggagcccaagatgcagtccaagactaagatctaccgcagacccctggaccggcctgccagcccacgatctgatgttaatgacatcaaaggcacccctcctgaggaaatctcagctgcacaacctctactacgccccaattcagcaggaagcagttga

SEQ ID NO: 44 - DNA, 1626 bp, synthetic construct
  source 1..1626: mol_type = other DNA
atggccctgccttaccacacctttctgttcaccgtgctgctgcctccattcgctctgacagctcctcctccttgctgctgtaccacaagcagcagcccctaccaagagttcctgtggcggacaagactgcccggcaacattgacgcccctagctacagaagcctgagcaagggcaacagcaccttcacagcccacacacacatgccccggaactgctacaatagcgccacactgtgtatgcacgccaacacacactactggaccggcaagatgattaaccctagctgccctggcggactgggagccacagtgtgttggacctacttcacccacaccagcatgtccgatggcggcggaatccaaggacaggccagagaaaagcaagtgaaagaggccatcagccagctgaccagaggccactctaccccatctccatacaaaggactggtgctgagcaagctgcacgaaaccctgcggacccacacaagactggtgtccctgttcaacaccacactgaccagactgcacgaagtgtccgctcagaaccccaccaactgctggatgtgtctgcccctgcacttcagaccctacatcagcatccctgtgcctgagcagtggaacaacttcagcaccgagatcaataccacctccgtgcttgtgggacccctggtgtccaacctggaaatcacacacacctccaacctgacctgcgtgaagttcagcaacaccatcgacaccaccagcagccagtgcatcagatgggtcacccctccaaccagaatcgtgtgcctgcctagcggcatcttcttcgtgtgtggcacaagcgcctaccactgcctgaatggcagcagcgagtctatgtgcttcctgagcttcctggtgcctcctatgaccatctacaccgagcaggacctgtacaatcacgtggtgcccaagcctcacaacaagcgggtgcccatcctgcctttcgtgattagagctggcgtgctgggcagactcggaacaggcatcggcagcatcacaaccagcacacagttctactacaagctgagccaagagatcaacggcgacatggaacaagtgaccgacagcctggtcacactccaggaccagctgaatagtctggccgccgtggtgctccagaatcggagagcactggatctgctgaccgccaagagaggcggcacctgtctgtttctgggcgaagaacggtgctactacgtgaaccagagccggatcgtgaccgagaaagtcaaagagatccgggacagaatccagtgcagagccgaggaactccagaacaccgagagatggggactgctgagccagtggatgccttggacactgccctttctgggacctctggccgctatcatcttcctgctgctgttcggcccctgtatcttcaacttcctggtcaagttcgtgtccagcagaatcgaggccgtgaagctccagatcgtgctgcaaatggaaccccagatgcagagcatgaccaaaatctacagaggccctctggacagacccgccagactgtgctctgacgtgaacgacatcgaagtgacccctccagaggaaatcagcacagcccagcctctgctgcacagcaattctgtgggaagcagc

SEQ ID NO: 45 - DNA, 1653 bp, synthetic construct
  source 1..1653: mol_type = other DNA
atggagacagacacactcctgctatgggtactgctgctctgggttccaggttccactggtgacgctttcgaaggatctacgcgtgctcctcctccttgctgctgtaccacaagcagcagcccctaccaagagttcctgtggcggacaagactgcccggcaacattgacgcccctagctacagaagcctgagcaagggcaacagcaccttcacagcccacacacacatgccccggaactgctacaatagcgccacactgtgtatgcacgccaacacacactactggaccggcaagatgattaaccctagctgccctggcggactgggagccacagtgtgttggacctacttcacccacaccagcatgtccgatggcggcggaatccaaggacaggccagagaaaagcaagtgaaagaggccatcagccagctgaccagaggccactctaccccatctccatacaaaggactggtgctgagcaagctgcacgaaaccctgcggacccacacaagactggtgtccctgttcaacaccacactgaccagactgcacgaagtgtccgctcagaaccccaccaactgctggatgtgtctgcccctgcacttcagaccctacatcagcatccctgtgcctgagcagtggaacaacttcagcaccgagatcaataccacctccgtgcttgtgggacccctggtgtccaacctggaaatcacacacacctccaacctgacctgcgtgaagttcagcaacaccatcgacaccaccagcagccagtgcatcagatgggtcacccctccaaccagaatcgtgtgcctgcctagcggcatcttcttcgtgtgtggcacaagcgcctaccactgcctgaatggcagcagcgagtctatgtgcttcctgagcttcctggtgcctcctatgaccatctacaccgagcaggacctgtacaatcacgtggtgcccaagcctcacaacaagcgggtgcccatcctgcctttcgtgattagagctggcgtgctgggcagactcggaacaggcatcggcagcatcacaaccagcacacagttctactacaagctgagccaagagatcaacggcgacatggaacaagtgaccgacagcctggtcacactccaggaccagctgaatagtctggccgccgtggtgctccagaatcggagagcactggatctgctgaccgccaagagaggcggcacctgtctgtttctgggcgaagaacggtgctactacgtgaaccagagccggatcgtgaccgagaaagtcaaagagatccgggacagaatccagtgcagagccgaggaactccagaacaccgagagatggggactgctgagccagtggatgccttggacactgccctttctgggacctctggccgctatcatcttcctgctgctgttcggcccctgtatcttcaacttcctggtcaagttcgtgtccagcagaatcgaggccgtgaagctccagatcgtgctgcaaatggaaccccagatgcagagcatgaccaaaatctacagaggccctctggacagacccgccagactgtgctctgacgtgaacgacatcgaagtgacccctccagaggaaatcagcacagcccagcctctgctgcacagcaattctgtgggaagcagctga

SEQ ID NO: 46 - DNA, 1710 bp, synthetic construct
  source 1..1710: mol_type = other DNA
atgagattcctgtggcggatcattgccctgtacaacatcgtgaccgtgtacgccggcttcggcgaccctagaaaagctagaggactgctgcggaagcagtacggccagccttgtgactgtagaggcggacagattagcgagcctcctagcgacagaatcacccaagtgacctgcagcggcaagaccgcctatctgatgccagaccagagctggaagtgcaagagcacccctagagacacaagccccaacggacctctgctggaatgcccttgcagcagctttcagagcagcgtgcacagctcctgctacaccagctaccagcagtgcaagtccggcaacaagacctactacaccgccacactgctgaaaacccagaccggcagcaccaacgatgtgcaggttctgggcaccaccaacaagctggtgcagagcagctgtaacggccagaaaggcaagcccgtgtgctggtctacaacagcccctatccacatctccgatggcggaggccctctggacattgccagaatcaagaccgtgcagaagaagctggaaaagatccacaaggctctgtaccccgagctgcagtatcaccctctggctctgcccgagatccgggacaactttagactggacgcccagaccttcgacatcctgaacgccacctacaacctgctgcagatgagcaacacctctctggcccacgattgctggctgtgcctgaagatgggacctcctattcctctggctatccccaacttcctgctgagctacgtgaactacagcaacgagagcctggtcaacaacccctgtcctatcatcagccctctgctgatccagcctatgaccttcagcaacagcttctgcctgttcagccccagctacagctccaccaaagagatcgacctgggctacgtggtgttcgacaactgcacctccatcatccacgccaccgatcctctgtgtgccgtgaatggcagcgtgttcgtgtgcggcaacaacatggcctacacctacctgcctaccaactggaccggactgtgcgtgctggctacactgctgcctgacatcgacatcatccctggcgacgagcctattccaattcctgccatcgagcacttcatctacagacccaagcgggctatccagttcatcccactgctggccggactgggcatcaccaccgcttttacaacaggcgctacaggactgggcgtgtccctgacacagtacaccaagctgagcaaccagctgatctccgacgtgcagaccctgagcagcaccatccaggatctgcaggatcaggtggacagcctggctgaagtggtgctgcagaacagaagaggactggacctgctgacagccgagcaaggcggaatttgtctggccctgcaagagaagtgctgcttctacgccaacaagagcggcatcgtgcgggacaagatcaagacactgcaagaggaactcgaaaagcggcggaaaggactggccgccaatccactgtggacaggacttgatggcctgctgccttacctgctgccatttctgggaccactgctgaccctgctgctgttcctgacactgggacccatcattctgaacaagctgatggccttcgtgcggcagcagatcgaagcctttcaggccaagcctatccaggtgcactaccaccggctggaaatgaccgagaacggcgagagctatctgccccaa

SEQ ID NO: 47 - DNA, 1722 bp, synthetic construct
  source 1..1722: mol_type = other DNA
atggagacagacacactcctgctatgggtactgctgctctgggttccaggttccactggtgacggcttcggcgaccctagaaaagctagaggactgctgcggaagcagtacggccagccttgtgactgtagaggcggacagattagcgagcctcctagcgacagaatcacccaagtgacctgcagcggcaagaccgcctatctgatgccagaccagagctggaagtgcaagagcacccctagagacacaagccccaacggacctctgctggaatgcccttgcagcagctttcagagcagcgtgcacagctcctgctacaccagctaccagcagtgcaagtccggcaacaagacctactacaccgccacactgctgaaaacccagaccggcagcaccaacgatgtgcaggttctgggcaccaccaacaagctggtgcagagcagctgtaacggccagaaaggcaagcccgtgtgctggtctacaacagcccctatccacatctccgatggcggaggccctctggacattgccagaatcaagaccgtgcagaagaagctggaaaagattcacaaggctctgtaccctgagctgcagtatcaccctctggctctgcctgagatccgggacaactttagactggacgcccagaccttcgacatcctgaacgccacctacaacctgctgcagatgagcaacacctctctggcccacgattgctggctgtgcctgaagatgggacctcctattcctctggctatccccaacttcctgctgagctacgtgaactacagcaacgagagcctggtcaacaacccctgtcctatcatcagccctctgctgatccagcctatgaccttcagcaacagcttctgcctgttcagccccagctacagctccaccaaagagatcgacctgggctacgtggtgttcgacaactgcacctccatcatccacgccaccgatcctctgtgtgccgtgaatggcagcgtgttcgtgtgcggcaacaacatggcctacacctacctgcctaccaactggaccggactgtgcgtgctggctacactgctgcctgacatcgacatcatccctggcgacgagcctattccaattcctgccatcgagcacttcatctacagacccaagcgggctatccagttcatcccactgctggccggactgggcatcaccaccgcttttacaacaggcgctacaggactgggcgtgtccctgacacagtacaccaagctgagcaaccagctgatctccgacgtgcagaccctgagcagcaccatccaggatctgcaggatcaggtggacagcctggctgaagtggtgctgcagaacagaagaggactggacctgctgacagccgagcaaggcggaatttgtctggccctgcaagagaagtgctgcttctacgccaacaagagcggcatcgtgcgggacaagatcaagacactgcaagaggaactcgaaaagcggcggaaaggactggccgccaatccactgtggacaggacttgatggcctgctgccttacctgctgccatttctgggaccactgctgaccctgctgctgttcctgacactgggacccatcattctgaacaagctgatggccttcgtgcggcagcagatcgaagcctttcaggccaagcctatccaggtgcactaccaccggctggaaatgaccgagaacggcgagagctatctgccccaatga

SEQ ID NO: 48 - DNA, 1722 bp, synthetic construct
  source 1..1722: mol_type = other DNA
atggagacagacacactcctgctatgggtactgctgctctgggttccaggttccactggtgacggcttcggagacccacgaaaggctcgcgggcttctgcgcaagcagtatggccaaccgtgcgactgccgggggggccagatatccgagccaccgtctgataggatcacccaagtaacatgctccggtaagacggcgtatcttatgccagatcaatcttggaagtgtaaatcaactcccagagatactagcccgaatggacctctcctggagtgcccttgctcaagtttccagtcttctgtccattcctcatgctacactagctaccagcaatgtaaatcaggaaacaaaacgtactacactgctacactcttgaaaacacagacggggtcaactaacgacgttcaggttcttggtacgaccaacaaactggttcagtcctcttgtaacggacagaaaggcaagcccgtgtgttggtctacgacagccccgatacatatttcagatggtggggggccgttggacatcgcaaggataaagactgttcagaaaaagctggagaaaatccataaggcgttgtacccggaactgcaataccatcccctcgcacttcctgaaattagagacaattttcgacttgacgcgcagaccttcgatattcttaacgcaacatataatcttttgcaaatgagtaataccagccttgcccacgactgctggctttgccttaagatgggacccccaattccgttggcgatcccgaattttcttctgtcctatgtaaattactctaacgaatcacttgtcaataatccgtgccccattatatctcctctcctcatacagcccatgacgttctctaactccttctgccttttctctccaagctattccagcaccaaagagatcgatcttgggtacgtagtgttcgacaactgtacgagtattatacatgcaacggaccctttgtgcgctgtgaatggttcagtcttcgtgtgcggcaataatatggcctatacctatctccccaccaattggacgggcttgtgtgtccttgcaaccttgctcccagacattgatataatacctggtgatgagcccatacccatcccagctatagaacactttatctacaggccaaagcgggccattcaattcattcccctcctcgcgggtcttggtatcacgaccgctttcactacgggcgccacaggacttggtgtgagtcttacacagtatacgaaactctctaatcaattgataagtgatgtacagactttgagctccacaatacaagacttgcaagatcaggttgacagcctcgctgaggttgtattgcagaaccgaagaggattggatctccttaccgctgagcaaggtggaatatgtttggcgttgcaagaaaagtgttgtttttacgcgaacaagtcaggcatagtaagggataagatcaaaacactgcaagaagaattggagaaacggcgcaaaggactcgcagctaatcctctttggaccgggctggatggcttgctcccttacctgttgccgtttttgggtccattgctgaccttgctcttgttcctgaccttgggtcccatcattctgaacaagctgatggccttcgtgcggcagcagatcgaagcctttcaggccaagcctatccaggtgcactaccaccggctggaaatgaccgagaacggcgagagctatctgccccaatga

SEQ ID NO: 49 - DNA, 1695 bp, synthetic construct
  source 1..1695: mol_type = other DNA
atgaagctgcctaccggcatggtcatcctgtgcagcctgattatcgtcagagccggcttcgacgaccccagaaaggctattgccctggtgcagaagcagcacggcaagccttgtgaatgctctggcggccaagtgtctgaggcccctcctaactctatccagcaagtgacatgccccggcaagaccgcctacctgatgaccaaccagaaatggaagtgccgcgtgacccctaagaatctgacaccttctggcggcgaactccagaactgcccctgcaacaccttccaggactccatgcactccagctgctacaccgagtacagacagtgccgggccaacaacaagacctactacaccgccacactgctgaagatcagaagcggcagcctgaacgaggtgcagatcctccagaatcctaaccagctgctgcaaagcccttgcagaggcagcatcaaccagcctgtgtgttggagcgccaccgctcctatccacatctctgatggcggaggccctctggacaccaagagagtgtggaccgtccagaagagactggaacagatccacaaggccatgcatcccgagctgcaatatcaccctctggctctgcccaaagtgcgggacgatctgtctctggacgcccggacattcgacatcctgaacaccaccttccggctgctccagatgagcaacttcagcctggctcaggactgctggctgtgtctgaagctgggcacacctacacctctggctatccccacacctagcctgacatacagcctggccgatagcctggctaatgccagctgccagatcatccctccactgctggttcagcccatgcagttcagcaacagcagctgcctgagcagccccttcatcaacgacaccgagcagattgacctgggagccgtgaccttcaccaactgcacctctgtggctaacgtgtcctctcctctgtgcgccctgaatggcagcgtgttcctgtgcggcaacaacatggcctacacctacctgcctcagaactggaccggactgtgcgtgcaggcttctctgctgcctgacatcgacatcatccctggcgacgagcccgtgcctattcctgccatcgaccactacatccaccggcctaaaagagccgtgcagttcatccctctgctggccggactgggaatcaccgccgcttttacaacaggcgctacaggactgggcgtgtccgtgacacagtacaccaagctgagccaccagctgatctccgacgtgcaggttctgagcggcaccattcaggacctccaggatcaggtggactctctggctgaagtggccctccagaaccgcagaggactggatctgctgacagccgagcaaggcggaatctgtctggccctgcaagagaagtgctgcttttacgccaacaagagcggcatcgtgcggaacaagatcaggacactgcaagaggaactgcaaaagcggagagagagcctggcctccaatcctctgtggacaggactgcaaggcttcctgccttacctgctgccactgcttggacctctgctgaccctgctgctgatcctgacaatcggcccttgcgtgttcagcagactgatggcctttatcaacgatcggctgaatgtggtgcacgctatggtgctggcccagcagtatcaggccctgaaggccgaagaagaggcccaggat

SEQ ID NO: 50 - DNA, 1707 bp, synthetic construct
  source 1..1707: mol_type = other DNA
atggagacagacacactcctgctatgggtactgctgctctgggttccaggttccactggtgacggcttcgacgaccccagaaaggctattgccctggtgcagaagcagcacggcaagccttgtgaatgctctggcggccaagtgtctgaggcccctcctaactctatccagcaagtgacatgccccggcaagaccgcctacctgatgaccaaccagaaatggaagtgccgcgtgacccctaagaatctgacaccttctggcggcgaactccagaactgcccctgcaacaccttccaggactccatgcactccagctgctacaccgagtacagacagtgccgggccaacaacaagacctactacaccgccacactgctgaagatcagaagcggcagcctgaacgaggtgcagatcctccagaatcctaaccagctgctgcaaagcccttgcagaggcagcatcaaccagcctgtgtgttggagcgccaccgctcctatccacatctctgatggcggaggccctctggacaccaagagagtgtggaccgtccagaagagactggaacagatccacaaggccatgcatcccgagctgcaatatcaccctctggctctgcccaaagtgcgggacgatctgtctctggacgcccggacattcgacatcctgaacaccaccttccggctgctccagatgagcaacttcagcctggctcaggactgctggctgtgtctgaagctgggcacacctacacctctggctatccccacacctagcctgacatacagcctggccgatagcctggctaatgccagctgccagatcatccctccactgctggttcagcccatgcagttcagcaacagcagctgcctgagcagccccttcatcaacgacaccgagcagattgacctgggagccgtgaccttcaccaactgcacctctgtggctaacgtgtcctctcctctgtgcgccctgaatggcagcgtgttcctgtgcggcaacaacatggcctacacctacctgcctcagaactggaccggactgtgcgtgcaggcttctctgctgcctgacatcgacatcatccctggcgacgagcccgtgcctattcctgccatcgaccactacatccaccggcctaaaagagccgtgcagttcatccctctgctggccggactgggaatcaccgccgcttttacaacaggcgctacaggactgggcgtgtccgtgacacagtacaccaagctgagccaccagctgatctccgacgtgcaggttctgagcggcaccattcaggacctccaggatcaggtggactctctggctgaagtggccctccagaaccgcagaggactggatctgctgacagccgagcaaggcggaatctgtctggccctgcaagagaagtgctgcttttacgccaacaagagcggcatcgtgcggaacaagatcaggacactgcaagaggaactgcaaaagcggagagagagcctggcctccaatcctctgtggacaggactgcaaggcttcctgccttacctgctgccactgcttggacctctgctgaccctgctgctgatcctgacaatcggcccttgcgtgttcagcagactgatggcctttatcaacgatcggctgaatgtggtgcacgctatggtgctggcccagcagtatcaggccctgaaggccgaagaagaggcccaggattga

SEQ ID NO: 51 - DNA, 1695 bp, synthetic construct
  source 1..1695: mol_type = other DNA
atgaagctgcctaccggcatggtcatcctgtgcagcctgatcatcgtcagagccggcttcgacgaccccagaaaggctattgccctggtgcagaagcagcacggcaagccttgtgaatgctctggcggccaagtgtctgaggcccctcctaactctatccagcaagtgacatgccccggcaagaccgcctacctgatgaccaaccagaaatggaagtgccgcgtgacccctaagaatctgacaccttctggcggcgaactccagaactgcccctgcaacaccttccaggactccatgcactccagctgctacaccgagtacagacagtgccgggccaacaacaagacctactacaccgccacactgctgaagatcagaagcggcagcctgaacgaggtgcagatcctccagaatcctaaccagctgctgcaaagcccttgcagaggcagcatcaaccagcctgtgtgttggagcgccaccgctcctatccacatctctgatggcggaggccctctggacaccaagagagtgtggaccgtccagaagagactggaacagatccacaaggccatgcatcccgagctgcaatatcaccctctggctctgcccaaagtgcgggacgatctgtctctggacgcccggacattcgacatcctgaacaccaccttccggctgctccagatgagcaacttcagcctggctcaggactgctggctgtgtctgaagctgggcacacctacacctctggctatccccacacctagcctgacatacagcctggccgatagcctggccaatgccagctgtcagatcatccctccactgctggtgcagcccatgcagttcagcaatagcagctgcctgagcagccccttcatcaacgacaccgagcagattgatctgggcgccgtgaccttcaccaactgtacatctgtggccaacgtgtcctctcctctgtgcgccctgaatggcagcgtgttcctgtgcggcaacaacatggcctacacctacctgcctcagaactggaccggactgtgcgtgcaggcttctctgctgcctgacatcgacatcatccctggcgacgagcccgtgcctattcctgccatcgaccactacatccaccggcctaaaagagccgtgcagttcatccctctgctggccggactgggaatcaccgccgcttttacaacaggcgctacaggactgggcgtgtccgtgacacagtacaccaagctgagccaccagctgatctccgacgtgcaggttctgagcggcaccattcaggacctccaggatcaggtggactctctggccgaagtggtgctccagaaccgcagaggactggatctgctgacagccgagcaaggcggaatctgtctggccctgcaagagaagtgctgcttttacgccaacaagagcggcatcgtgcggaacaagatcaggacactgcaagaggaactgcaaaagcggagagagtccctggccagcaatcctctgtggacaggactgcaaggcttcctgccttacctgctgccactgcttggacctctgctgaccctgctgctgatcctgacaatcggcccttgcgtgttcagcagactgatggcctttatcaacgatcggctgaatgtggtgcacgctatggtgctggcccagcagtatcaggccctgaaggccgaagaagaggcccaggat

SEQ ID NO: 52 - DNA, 1740 bp, synthetic construct
  source 1..1740: mol_type = other DNA
atgagcctgctgatcgagatggcccctaaggacatccctttctggcgggtgctgctgatcttccagaccgccagagtgtatgccggcttcggcgatcctagagaagccatcaccatgatccaccagcagcacggcaagccctgtgattgtgctggcggctatgtgaacgccgctcctacagtgtatctggccaccgtgtcttgcagcagccacacagcctatcagcccagcgatagcctgaagtggcgctgcgtgtccaatcctacactggccaacggcgagaacatcggcaactgcccttgcaagaccttcaaagaaagcgtgcacagctcctgctacaccgcctaccaagagtgcttcttcggcaacaagacctactacacagccatcctggccagcaacagagcccctacaatcggcaccagcaatgtgcctaccgtgctgggcaacacccacaatctgctgtctgccggctgtaccggcaatgtgggccagcctatctgctggaaccctaaggctcctgtgcacatctctgatggcggcggacctcaagacaaggccagagaaattgccgtgcagaagcggctggaagagatccacaagtctctgttccccgagctgcggtatcaccctctggctctgcctaaagccagaggcaaagagaagatcgacgcccagacctttaacctgctgaccgccacatactccctgctgaacaagagcaaccccaacctggccaatgagtgctggctgtgtctgcccagcggcaaccctattcctctggctatccccagcaacgacagcttcctgggcagcaatctgagctgccctatcatccctccactgctggtgcagcccctggaatttcgggacctgatcaacgtgtcctgcttctacagccccttccagaacaacagcttcgacgtggacgtcggcctggtggaatttgccaactgctccaccacactgaacatcagccacagcctgtgcgcccctaacagcagcgtgttcgtgtgcggcaacaacaaagcctacacctacctgcctaccaactggaccggcacctgtgtgctggctacactgctgcctgacatcgacattgtgcctggcgacgctcctgttcctgtgcctgccatcgatcactacctgcatagagccagacgggccgtgcagttcatccctctgcttgttggcctgggaatcacagccgccgtgtctactggaacagccggcctgggctacagcatcacccagtacacaaagctgagccggcagctgatctccgacgtgcaggccatcagctccaccatccaggacctgcaagatcaggtggactctctggccgaagtggtgctccagaacagaagaggactggatctgctgacagccgagcaaggcggaatctgtctggccctgcaagagaagtgctgcttttacgccaacaagagcggcatcgtgcgggacaagatcaagagactgcaagaggacctggaaaagcgccggaaagagatcatcgacaaccccttttggaccggactgcacgggctgctgccttatctgctgcctcttctgggacctctgctgtgcctcctgctgctcatcacattcggccctctgatcttcaacaagatcattgccttcgtgaagcagcagatcgatgccatccaggccaagcctatccaggtgcactaccaccggctggaacaagaggataacggcggcgtgtacctgagagtgtct

SEQ ID NO: 53 - DNA, 1713 bp, synthetic construct
  source 1..1713: mol_type = other DNA
atgaacttcaactacaagcccctgtggacaatggtgctgatctgtcaggccctgcaggtctacgccggctttggaaatcctcacgaggcccggaagtacatccggcagagatacggcaagccctgcgattgtctcggcggctacgttaccagcctgcctaacacctatatcagcgccgtgtcctgcagcgcctacacagcctatctgagcagcgacagcctgaagtggcgctgcgttagcacccctagaatcttctctggcggcgacaccaccacctgtccttgcgataccttcgagacagccatgcactccagctgctacaccacatacctggaatgtaccagcggcggcaagacctactacaccgccatcctgaccagaagcagaacccctaccatcggcgccaatagcgtgccaacagtcgtgggcagcaccaacaatctgatctccgctggctgtaccggcacagtgggacagcctgtgtgctggaacattcaccctccactgcacacctctgatggcggcggacctcaagacaaagtgcgcgagatccgggtgtacaagaagctggaagaactgcagcgctctctgtaccccgagatccactatcaccctctggctctgcctaaggccagaggcaaagagaagatcgacgcccagacattcgccctgctgaccgccacacacaacctgctgaacaacagcaacagcagcctggccgacgattgctggctgtgtctgcaatctggcgaccctgtgccactggctatccccagcaacaacctgaactacaccagcaacaccccttgcacaatcatcccacctctgaaggtgcagcccctggaatttcctagcagcagctgcatctacagcccaccactgaacaatacctacgacctggacgtgggcttcaaccagttcaacaactgcagcaccatcgtgaacatcttccagagcctgtgcgcccctaacagcagcgtgttcatctgcggcaacaaccgggcctacacctacctgcctaccaactggacaggcagatgcgtgctggctaccctgctgcctgacatcgatatcatccctggcgacgagcccgtgcctattcctgccatcgatcactttctgggcagaaacaagcgggccatccagttcattcctctgctggccggactgggcatcacaacagcagttgcaacaggcgcaacaggactgggcgttagcgtgacccagtacaccaagctgagccggcagctgattagcgacatgcaggccatcagctccaccatccaggatctgcaggatcaggtggactctctggccgaggtggtcctgcagaatagaagaggcctggacctgctgacagccgagcaaggcggaatttgcctggcactgcaagagaagtgctgcttctacgccaacaagagcggcatcgtgcgggacaagatcagacggctgcaagaggacctggaaaagcggcggaaagagatcaccgacaatcctttctggaccggcttccacggcttgctgccttacctgatgcctttcctgggacctctgctgtgcctgctgctgctcctttctgttggccctctggtgttcaacaagctgatgaccttcatcaagcagcaggtcgaagccatccaggccaagcctatccaggtgcactaccaccggctggaacaagaggatagaggcggcagctactctcacccactt

SEQ ID NO: 54 - DNA, 1743 bp, synthetic construct
  source 1..1743: mol_type = other DNA
atgaacttcgagcacaagctgatctggtccctgatggtcatcagccagatcctgcctatctacgccggcttcggcgatcctagagaagccctgacacacatccagaacaagcacggcaagccctgcgagtgcaaaggcggctatgtgaacagacctcctagctctcacgtggccagcatcagctgtggaagccacacagcctatcagcccaccaacaacctgaagtggcagtgcgtgtccacacctaagaccacatctggcggccacatgggccagtgtccaagcgcctgtagcgacaagagctacgacagcgtgcacagcacctgttacagcagctaccagcagtgcaccatcggcaacaagacctacttcaccgccacactgaccggcgagagaacagccacaatcggcgtgtccaatgtgcccacagtgatcggcagcggccagaacctgatttctgccggctgtcccaaggacgagctgggcaaaacagcttgttggagcgccacacctccagtgcatgtgtctgatggcggaggccctcaggacaaagtgcgggaaattctggtgcagaagaagttcgaggaactgcacaagaatctgttccccgagctgagctatcaccctctggctctgcctaaggccagaggcaaagagaagatcgacgcccagaccgtggacatcctgaccgccgttcacaacctgctgaacctgaccagacctgatctggcccaggattgctggctgtgtctgcagatcggcaaccctgttccactggcactgcccagcaactacacctacgagaatctgaccagcttcaactgctccaagaactgcagctgccctatcgtgtccccattcctggtgcagcccttcaacttcaccgagagcgtgtgtctgtacgccccttaccagaacaactcctacgacatcgacgttggcctggccgccttcatcaattgcagcagcacccacaatgtgtctacccctctgtgcgcccctaacggctctgtgtttgcctgcggcaacaaccaggcttacacctacctgcctaccaactggaccggcagatgcgtgctggttacactgctgcctgacatcgacatcatccccggctctgaacctgtgcctgtgccagccatcgatcacttcatcggcaggaccaagagagccgtgcagttcatccctctgctcgtcggcctgggaatcaccacagctgtttctactggcgccgctggcctgggccacagcatcacacagtacaccaagctgagccggcagctgatctctgacgtgctggccatcagctccaccatccaggatctgcaggatcaggtggactctctggccgaagtggtgctgcagaacagaagaggactggacctgctgacagccgagcaaggcggaatttgtctggccctgcaagagaagtgctgcttctacaccaacaagagcggcgtcgtgcgggacaagatcaagagactgcaggacgacctggaaaagcggcggcagcagctgattgacaaccccttctggacctccttccacggcctgctgccttatatcctgcctctgctgggacctctgctgtgcctgctcctgatcatcagcttcggccctctgatcctgaacaaactgatggcctttatcaagcaccagatcgaggccatccaggccaagcctatccaggtgcactaccaccggctggaacaagaggaaagaggcggctcctacctgcagatt

SEQ ID NO: 55 - DNA, 1758 bp, synthetic construct
  source 1..1758: mol_type = other DNA
atgaacttcaactaccacttcatctggtccctggtcatcctgagccagatctctcaggtgcaggccggctttggcgatcctagagaagccctggccgagatccagcagaagcacggaaagccttgcgattgcgctggcggctatgtgtctagccctcctatcaacagcctgaccaccgtgtcctgtagcacccacacagcctacagcgtgaccaatagcctgaagtggcagtgcgtgtccacacctaccacaccaagcaacacccacatcggctcttgccctggcgagtgcaacaccatcagctacgattctgtgcacgccagctgctacaaccactaccagcagtgcaacatcggcaacaagacctacctgaccgccaccatcaccggcgatagaacaccagccatcggcgacggcaatgtgcctacagtgctgggcacaagccacaacctgatcaccgccggctgtcccaatggcaagaaaggccaggtcgtgtgctggaacagcagaccctctgtgcacatctctgatggcggcggacctcaggacaaggccagagacatcatcgtgaacaagaagttcgaggaactgcaccgctctctgttccccgagctgagctatcatcctctggctctgcctgaggccagaggcaaagagaagatcgacgcccacacactggatctgctggccacagtgcacagcctgctgaatgcctctcagccttctctggccgaggattgctggctgtgtctgcagagcggagatcctgttccactggcactgccctacaacgacaccctgtgcagcaatttcgcctgcctgagcaaccacagctgccctctgacacctccatttctggtgcagcccttcaacttcaccgacagcaactgcctgtacgcccactatcagaacaacagcttcgacatcgacgtcggcctggccagcttcaccaattgcagcagctactacaacgtgtccaccgccagcaagcccagcaattctctgtgcgcccctaacagcagcgtgttcgtgtgcggaaacaacaaggcctacacctacctgcctaccaactggacaggcagctgcgtgctggctacactgctgcccgacatcgatatcatcccaggcagcgagcccgtgcctattcctgccatcgatcactttctgggaaaagccaagcgggctatccagctgatccctctgtttgttggcctgggcatcaccaccgcagtgtctacaggtgctgctggcctgggagtgtctatcacccagtacaccaagctgagccaccagctgattagcgacgtgcaggccatcagctccaccatccaggatctgcaggatcaggtggacagcctggcagaagtggtgctgcagaacagaagaggcctggacctgctgacagccgagcaaggcggaatttgtctggccctgcaagagaagtgctgcttctacgccaacaagagcggcatcgtgcgggacaagatcaagaacctgcaggacgacctggaacggcggagaaggcagctgatcgacaaccctttctggaccagcttccacggctttctgccctacgtgatgcctctgctgggacctctgctttgcctgctgctggtgctgagcttcggccccatcatcttcaacaagctgatgaccttcatcaagcaccagatcgagagcatccaggccaagcctatccaggtgcactaccaccggctggaacaagaggatagcggcggcagctacctgacactgaca

SEQ ID NO: 56 - DNA, 1728 bp, synthetic construct
  source 1..1728: mol_type = other DNA
atgaagctgatccacattgccatctggtccctcgtgatattcttccaagtgtccctgagcagagccggcttcggcgatcctagagaagccctggctcacatccagaacaagcacggcaagccctgcgattgtggcggcggatatacacagacccagcctaccacatacgtgaccagcatcagctgtggcagccacaccgcctatagccaagtgggctctctgaagtggctgtgcatcaaggcccctagcacaccttctggacagcacgtgggacactgccctcaggactgtaacacccagagctacgagagcatgcactccagctgctacaccagctaccagcagtgtaccctgggcaacaagacctacttcaccgccgccatcatcaagaatcggagcccttctgtgggccagagcgtgctgggaagcagccacaatctgatcaccgccggctgtcacgataccggcaaaaccgcctgctggaacacacaccctccagtgcatgtgtccgatggcggaggacctcaggacaaagtgcgcgagatcatcgtggaaaagaagctggaagagatccagaagtctctgttccccgagctgagctatcaccctctggctctgcctgagacacggggcaaagagatgatcgaccctcagaccttcgagatcctgaccaccgtgcacagcctgctgaatgccaccaaacctgatctggcccaggactgctggctgtgtctgagatctggaacccctgtgccactggcactgccctacaacaacatctccctgctgaacttcacctgtagcagcaactacagctacctcgtgacaagcccattcctggtgcagcccttcaacttcagcgagagcgactgtctgtacgccccttaccagaacaacagcttcgacatcgacgtgggcacagcccagttcaccaactgcaccaacacacacaacagaagcagcagcacccctctgtgcgcctacaatggcagcgtgttcgtgtgcggcaacaacaaggcctacacctacctgcctaccaactggaccggactgtgtgccgtggccacactgatccccgacatcgatattatccccggcgacgagcctgtgcctgtgccagccatcgactacttcatcagcagacccaagcgggccgtgcagttcatccctctgcttgttggcctgggcatcaccaccgcagtttctacaggtgctgccggcctgggccacagcatcacacagtacacaaagctgagccaccagctgatctccgacgtgcaggccatcagctccaccatccaggatctgcaggatcaggtggactctctggccgaagtggtgctgcagaacagaagaggcctggatctgctgacagccgagcaaggcggaatttgtctggccctgcaagagaagtgctgcttttacaccaacaagagcggcgtcgtgcgggacaagatcaagagactgcaggacgacctggaaaagcggcggcagcagctgatcgagagccctttttggaccggcctgaatggcctgctgccttacctgcttcctctgctgggacctctgctgtgtttgctgctggtgctgacattcggccctctgatcctgaacaagctcatggccttcatccggcagcagatcgagtccatccaggccaagcctatccaggtgcactaccaccggctggaacaagaggatagatgcggcagctacctgcggatcaca

SEQ ID NO: 57 - DNA, 1755 bp, synthetic construct
  source 1..1755: mol_type = other DNA
atgagcagcaagaagatcctgatctggggactcgccctgttcatccacatcacacaggtgctggccggcttcggcgatcctagagaagccctgacactgatccaccagaagcacggcaagccctgcgattgtgctggcggcatcgttagctctccacctacagcctatgtggccagcgtgtcctgtagcacccacaccgcctaccaagtgaccacctctctgaagtggcagtgcgtgaacttccccaccagatccaatggcgcctctgccggaatctgcgcctgcgaagttatcctgccttccgtgcacgccacctgttacagcagctaccagacctgcaagagcaacggcaccacctacaacaccgccaagctgctgagcgccagaaatcccacaatgggccagagcaacgtgccaagcgtgctgggcaatagccacaacctgatcagcagcggctgcgacaagaacaacgtgggcaagcaagtctgttggagcgtgacccctcctgtgcacatgtctgatggcggaggacctcaggaccaggccagagaaattctggtgcacaagaagctggaagaactgcagaaggccctgtttcctgagctgagctatcaccctctggctctgcctaaggccagaggcaaagagaagatcgacgcccagacactggatctgctggccaccgttcacagcctgctgaacgagagcagacccgatctgaccgatggctgctggctgtgtctgagaagcggcacccctattcctctggctatccccacacagaacctgagcctggccaatgccagcgacctgagccagttcaacagagcccctaacgacacccagctgatcacccctccattcctcgtgcagcccttcaacttcacattcagcccctgcctgtacgcctcctaccagaacaacagctacgacatcgacgtgtccctcgtgcggttcaccaactgcactttcgccctgaacgtgtcaagccccagcacacctctgtgtgcccctaatggcagcgtgttcatctgcggcaacaaccaggcctacacctacctgcctcacaactggacaggcagctgtgccctggctacactgctgcccgacatcgatattgtgcccggcgatcagcctgtgcctgtgccaacaatcgatcacctggccggcaggtctaagagagccgtgcagtttatccctctgctcgtcggcctgggcatcaccacagctgtttctaccggaacagccagcctgggctacaccgtgacacaagtgacaaagctgagccggcagctgattaccgacgtgcaggccatctctagcaccatccaggacctgcaggatcaagtggatagcctggccgaagtggtgctgcagaacagaagaggactggacctgctgacagccgagcaaggcggaatttgcctggcactgcaagagaagtgctgcttctacgccaacaagtccggcatcgtgcgggacaagatcaagagactgcaggacgacctggaaaagcggcggaagcagctgatcgacaaccctttctggaccggcttcaacggcctgctgccttacattgtgcctctgctgggaccactgctgtgcctgctgctcgtgatcacaatcggccccatcatcttcaaccggctggtggccttcatcaagacccagatcgaagccatccaggccaagagcatccaggtgcactaccaccggctggaaatggaagatagaggcgagccctacctgagcatc

SEQ ID NO: 58 - DNA, 1749 bp, synthetic construct
  source 1..1749: mol_type = other DNA
atgaagctgtgcctgttcatcctgctgatctgcagcagctgtacctacgccggctttggccctccacctaatcctcaagagctgatcagactgctgtacggcaacccctgcgattgtggcggcggaaccacaaccatcacacccagcagctacaccaagaccatcgactgcagctccaagatcgcctacctggcctacagccagacctacagcggaatctctgagcagcagtggacctgcgtgtccaagcctacagtgatccctagcacacagggcagccctggaccttgtcctagcagctgttctagcggcgtgtacaccgccatccactccagctgttacaccagcgtgcagagctgcaccctgaacaacaagacctactacacagccatcctgcagcggagcagccctgtgccttctggatctgctcagcccgaggacaccaagaagtatgcccaggcctcttgtctgggcaccgtgggcaaagatgtgtgctggcacacaatcgcccctatccacatctctgatggcggaggccctagcgacatccagaaacagtctcaggtggcccaccggctggaagaactggcccaatgtctgaaccctctgctggactatcaccctctggctctgcccaagcctcgggatattgccctcgatcctcagacacagaacatcctgaaaaccaccttcagcctgctgaacgccaccaatccatctctggcccaggattgctggctgtgtgtgacatctggcacccctctgcctaccgccattcctacctacaacgtgtcctacattcccctggacgaccggaccaactgcagcttcagccctccattcagagtgcagcccagcggctttaatagcagcggctgtctgcagggacccagccagaacaacagctacgatgtggaagtgggcttcatcaccttctccaactgccacaccatcaccaacatcagcaccccagtgtgtagcccaccaggccaggttttcgtgtgtggcggcaatctggcctataccgtgctgcccacaaattggaccggcctgtgtatcctggcctctctgctgcccgacatcagcattatccctggcgaggaacctgtgccactgcctagcttcgatctggccgtgggacgaagaagaagggctctgcaggctatcccactgctgatcggcctgggaatcaccaccgctatggctacaggcggagctggtgttggagtggccacacacacctacaacaagctgagcctgcagctgatcaacgacgtgcagacactgagcggcaccatcaacgatctgcaggaccagatcgatagcctggccgaagtggtgctgcagaatcggagaggactggacctgctgacagctgagcaaggcggaatttgtctggccctgcaagagcggtgctgcttctacgccaacaagtctggcatcgtgcgggacaagatcaagaagctgcaagaggacctgatcaagcggcggaaagagctgttcgagaatcccctgtggacaggcctgaatggcctgctgccttacctgctgccaattctgggacccctgctgtgtctgctgctgctgattacatttggcccctgggccttccggcacttcaccgatctgatcaagggacagatcgacgccatcctggccaagcctatccagatccactaccagagactggccatcgaggatggcttcggcgaggaccactatggcagtctgccaaccggcaccacatgt

SEQ ID NO: 59 - DNA, 1749 bp, synthetic construct
  source 1..1749: mol_type = other DNA
atgaagcccgtgcggctgctgattctggccgctctgaatgctgttctgcagctgggagatgccggactgcagcctcctgtgtctaagagcgagctgtacgacaccctgtacggcaagccctgtgattgcagaggcggaatcgccaccaactacgccattcctcggatcaagttcaagaccgtggactgcggccagagaacagcctacctggccagcgatcactctaagctcggcggactgagaacccctcagtggcagtgtaccaacaagcctcctatcatccccaccatcaagggcagacctggcacctgtccttgcaccagcttcagcaaccagatgcacagctcctgctacgagagcgtgcaagagtgcacctacaacaacaagacctacttcaccgccatcctgcagagacagtggggcggagctgttggcggagattggggacctattctgcctggcggaagccactctaagtacgcccaggcctcttgttctggcacagtggccaaagccgtgtgctggtctaaagaggcccctatccacgtttccgatggcggcggacctcaggacaagatcaaagaggccaagacacagaagcggctggaacagatcatggaacagctgtaccccaagatcaactatcaccctctggctctgcccaagagcagaggcgttgacctggatacccagaccatcgacatcctggacgccacacacaaggccctgaacatcagcaaccctatgctggccgctgactgctggctgtgtatgacactgggcacccctatgcctgtggcactgcccgtgaatatcaccagctacaaacataacaacaactgcaactacagcctgcctttcggcgtgcagcctatgggctttagcagccccagctgctttaagggcagattccagaacaacagctacgacatcgacgtgggctttatcgccttcgccaactgcagcaactacatcgagtacaatatcagcatgtgccccgacagaggcaccgtgtttgtgtgcggagacaacctggcctactctgccctgcctcagaattggaccggcatctgtgtgctggccacactgctgcccgacatcgatatcatcagcggcgacgaccccgtgcctattcctagcttcgattacctggccggcagaagcaagcgggctatcagctttatccctctgctcgtcggcctgggagtttctggtgctctggccactggaacagtcggcatcggaatgagcctgcacacctacaccaagctgagcaaccagctgatcgacgacgtgcaggccctgagcagcacaatccaggacctgcaggaccagctggacagcctggaagaagtggtgctgcagaatcggagaggactggatctgctgacagccgagcaaggcggaatttgtctggccctgcaagagaagtgctgcttctacgccaacaagagcggcatcgtgcgggataagatcaagcagctgcaggacgacctggtcaagcggcggaaagagctgttcgacaatcccctttggagcggcctgaatggcgtgctgccttatctgctgcctctgctgggacctctgcttggactgcttctgctgctgagcttcggccccatgatcttcaacaagattaaggccttcattaagcagcagatcgaggccattaaggtgcagcagattcaggtgcactaccactgcctggaacaggccgaacagggcatcccctactttgacacaatggcc

SEQ ID NO: 60 - DNA, 54 bp, synthetic construct
  source 1..54: mol_type = other DNA
atgggctttacgaccaagatcatcttcctgtacaacctggtgctggtgtacgcc

SEQ ID NO: 61 - DNA, 1635 bp, synthetic construct
  source 1..1635: mol_type = other DNA
ggcttcgacgatcctagaaaggccatcgagctggtgcagaagagatacggcagaccctgcgattgctctggcggccaagtttctgagcctcctagcgacagagtgtcccaagtgacctgtagcggcaagaccgcctacctgatgcctgaccagagatggaagtgcaagagcatccccaaggacacaagccctagcggccctctgcaagagtgcccctgtaatagctaccagagcagcgtgcacagctcctgctacacaagctaccagcagtgcagaagcggcaacaagacctactacaccgccacactgctgaaaacccagaccggcggcacatccgatgttcaggtgctgggcagcaccaacaagctgattcagagcccctgcaacggcatcaagggccagagcatctgctggtccacaacagcccctatccacgtgtcagatggcggcggacctctggacaccaccagaatcaagagcgtgcagcggaagctggaagagatccacaaggctctgtaccccgaactccagtatcaccctctggctatccccaaagtgcgggacaacctgatggtggacgcccagacactgaatatcctgaacgccacctacaatctgctgctgatgagcaacaccagcctggtggacgattgctggctgtgcctgaaactgggacctcctacacctctggcaattcccaacttcctgctgagctacgtgaccagaagcagcgacaacatcagctgcctgattatcccacctctgctcgtgcagcccatgcagttcagcaactcctcctgcctgttcagccccagctacaacagcaccgaggaaatcgacctgggacacgtggccttctccaactgcacctccatcaccaacgtgacaggccctatctgcgccgtgaatggcagcgtgttcctgtgtggcaacaacatggcctacacctacctgcctaccaactggaccggactgtgcgtgctggctacactgctgcctgacatcgacatcatccctggcgacgagcccgtgcctattcctgccatcgaccacttcatctacagacccaagcgggctatccagttcatcccactgctggccggactgggaatcaccgccgcttttacaacaggcgctacaggactgggcgtgtccgtgacacagtacaccaagctgagcaaccagctgatctccgacgtgcagatcctgagcagcaccatccaggacctccaggatcaggtggactctctggccgaagtggtgctccagaacagaagaggactggacctgctgacagccgagcaaggcggaatttgtctggccctgcaagagaagtgctgcttctacgtgaacaagagcggcatcgtgcgcgacaagatcaagacactgcaagaggaactggaacggcggagaaaggacctggcctccaatcctctgtggaccggcctgcaaggactgctcccttacctgctgcctttcctgggaccactgctgactctgctgctcctgctgaccatcggaccctgcatcttcaacagactgaccgccttcatcaacgacaagctgaacatcatccacgctatggtgctgacacagcagtaccaggtgctgcggacagatgaggaagcccaggat

SEQ ID NO: 62 - DNA, 1455 bp, synthetic construct
  source 1..1455: mol_type = other DNA
ggcttcgacgatcctagaaaggccatcgagctggtgcagaagagatacggcagaccctgcgattgctctggcggccaagtttctgagcctcctagcgacagagtgtcccaagtgacctgtagcggcaagaccgcctacctgatgcctgaccagagatggaagtgcaagagcatccccaaggacacaagccctagcggccctctgcaagagtgcccctgtaatagctaccagagcagcgtgcacagctcctgctacacaagctaccagcagtgcagaagcggcaacaagacctactacaccgccacactgctgaaaacccagaccggcggcacatccgatgttcaggtgctgggcagcaccaacaagctgattcagagcccctgcaacggcatcaagggccagagcatctgctggtccacaacagcccctatccacgtgtcagatggcggcggacctctggacaccaccagaatcaagagcgtgcagcggaagctggaagagatccacaaggctctgtaccccgaactccagtatcaccctctggctatccccaaagtgcgggacaacctgatggtggacgcccagacactgaatatcctgaacgccacctacaatctgctgctgatgagcaacaccagcctggtggacgattgctggctgtgcctgaaactgggacctcctacacctctggcaattcccaacttcctgctgagctacgtgaccagaagcagcgacaacatcagctgcctgattatcccacctctgctcgtgcagcccatgcagttcagcaactcctcctgcctgttcagccccagctacaacagcaccgaggaaatcgacctgggacacgtggccttctccaactgcacctccatcaccaacgtgacaggccctatctgcgccgtgaatggcagcgtgttcctgtgtggcaacaacatggcctacacctacctgcctaccaactggaccggactgtgcgtgctggctacactgctgcctgacatcgacatcatccctggcgacgagcccgtgcctattcctgccatcgaccacttcatctacagacccaagcgggctatccagttcatcccactgctggccggactgggaatcaccgccgcttttacaacaggcgctacaggactgggcgtgtccgtgacacagtacaccaagctgagcaaccagctgatctccgacgtgcagatcctgagcagcaccatccaggacctccaggatcaggtggactctctggccgaagtggtgctccagaacagaagaggactggacctgctgacagccgagcaaggcggaatttgtctggccctgcaagagaagtgctgcttctacgtgaacaagagcggcatcgtgcgcgacaagatcaagacactgcaagaggaactggaacggcggagaaaggacctggcctccaatcctctgtggaccggcctgcaagga

SEQ ID NO: 63 - DNA, 63 bp, synthetic construct
  source 1..63: mol_type = other DNA
ctgctcccttacctgctgcctttcctgggaccactgctgactctgctgctcctgctgaccatc

SEQ ID NO: 64 - DNA, 117 bp, synthetic construct
  source 1..117: mol_type = other DNA
ggaccctgcatcttcaacagactgaccgccttcatcaacgacaagctgaacatcatccacgctatggtgctgacacagcagtaccaggtgctgcggacagatgaggaagcccaggat

SEQ ID NO: 65 - DNA, 1572 bp, synthetic construct
  source 1..1572: mol_type = other DNA
atgggctttacgaccaagatcatcttcctgtacaacctggtgctggtgtacgccggcttcgacgatcctagaaaggccatcgagctggtgcagaagagatacggcagaccctgcgattgctctggcggccaagtttctgagcctcctagcgacagagtgtcccaagtgacctgtagcggcaagaccgcctacctgatgcctgaccagagatggaagtgcaagagcatccccaaggacacaagccctagcggccctctgcaagagtgcccctgtaatagctaccagagcagcgtgcacagctcctgctacacaagctaccagcagtgcagaagcggcaacaagacctactacaccgccacactgctgaaaacccagaccggcggcacatccgatgttcaggtgctgggcagcaccaacaagctgattcagagcccctgcaacggcatcaagggccagagcatctgctggtccacaacagcccctatccacgtgtcagatggcggcggacctctggacaccaccagaatcaagagcgtgcagcggaagctggaagagatccacaaggctctgtaccccgaactccagtatcaccctctggctatccccaaagtgcgggacaacctgatggtggacgcccagacactgaatatcctgaacgccacctacaatctgctgctgatgagcaacaccagcctggtggacgattgctggctgtgcctgaaactgggacctcctacacctctggcaattcccaacttcctgctgagctacgtgaccagaagcagcgacaacatcagctgcctgattatcccacctctgctcgtgcagcccatgcagttcagcaactcctcctgcctgttcagccccagctacaacagcaccgaggaaatcgacctgggacacgtggccttctccaactgcacctccatcaccaacgtgacaggccctatctgcgccgtgaatggcagcgtgttcctgtgtggcaacaacatggcctacacctacctgcctaccaactggaccggactgtgcgtgctggctacactgctgcctgacatcgacatcatccctggcgacgagcccgtgcctattcctgccatcgaccacttcatctacagacccaagcgggctatccagttcatcccactgctggccggactgggaatcaccgccgcttttacaacaggcgctacaggactgggcgtgtccgtgacacagtacaccaagctgagcaaccagctgatctccgacgtgcagatcctgagcagcaccatccaggacctccaggatcaggtggactctctggccgaagtggtgctccagaacagaagaggactggacctgctgacagccgagcaaggcggaatttgtctggccctgcaagagaagtgctgcttctacgtgaacaagagcggcatcgtgcgcgacaagatcaagacactgcaagaggaactggaacggcggagaaaggacctggcctccaatcctctgtggaccggcctgcaaggactgctcccttacctgctgcctttcctgggaccactgctgactctgctgctcctgctgaccatc

SEQ ID NO: 66 - DNA, 66 bp, synthetic construct
  source 1..66: mol_type = other DNA
ggaccctgcatcttcaacagactgaccgccttcatcaacgacaagctgaacatcatccacgctatg

SEQ ID NO: 67 - DNA, 1638 bp, synthetic construct
  source 1..1638: mol_type = other DNA
atgggctttacgaccaagatcatcttcctgtacaacctggtgctggtgtacgccggcttcgacgatcctagaaaggccatcgagctggtgcagaagagatacggcagaccctgcgattgctctggcggccaagtttctgagcctcctagcgacagagtgtcccaagtgacctgtagcggcaagaccgcctacctgatgcctgaccagagatggaagtgcaagagcatccccaaggacacaagccctagcggccctctgcaagagtgcccctgtaatagctaccagagcagcgtgcacagctcctgctacacaagctaccagcagtgcagaagcggcaacaagacctactacaccgccacactgctgaaaacccagaccggcggcacatccgatgttcaggtgctgggcagcaccaacaagctgattcagagcccctgcaacggcatcaagggccagagcatctgctggtccacaacagcccctatccacgtgtcagatggcggcggacctctggacaccaccagaatcaagagcgtgcagcggaagctggaagagatccacaaggctctgtaccccgaactccagtatcaccctctggctatccccaaagtgcgggacaacctgatggtggacgcccagacactgaatatcctgaacgccacctacaatctgctgctgatgagcaacaccagcctggtggacgattgctggctgtgcctgaaactgggacctcctacacctctggcaattcccaacttcctgctgagctacgtgaccagaagcagcgacaacatcagctgcctgattatcccacctctgctcgtgcagcccatgcagttcagcaactcctcctgcctgttcagccccagctacaacagcaccgaggaaatcgacctgggacacgtggccttctccaactgcacctccatcaccaacgtgacaggccctatctgcgccgtgaatggcagcgtgttcctgtgtggcaacaacatggcctacacctacctgcctaccaactggaccggactgtgcgtgctggctacactgctgcctgacatcgacatcatccctggcgacgagcccgtgcctattcctgccatcgaccacttcatctacagacccaagcgggctatccagttcatcccactgctggccggactgggaatcaccgccgcttttacaacaggcgctacaggactgggcgtgtccgtgacacagtacaccaagctgagcaaccagctgatctccgacgtgcagatcctgagcagcaccatccaggacctccaggatcaggtggactctctggccgaagtggtgctccagaacagaagaggactggacctgctgacagccgagcaaggcggaatttgtctggccctgcaagagaagtgctgcttctacgtgaacaagagcggcatcgtgcgcgacaagatcaagacactgcaagaggaactggaacggcggagaaaggacctggcctccaatcctctgtggaccggcctgcaaggactgctcccttacctgctgcctttcctgggaccactgctgactctgctgctcctgctgaccatcggaccctgcatcttcaacagactgaccgccttcatcaacgacaagctgaacatcatccacgctatg

SEQ ID NO: 68 - DNA, 51 bp, synthetic construct
  source 1..51: mol_type = other DNA
gtgctaacccaacagtatcaggtgctcagaaccgatgaagaagctcaagat

SEQ ID NO: 69 - DNA, 51 bp, synthetic construct
  source 1..51: mol_type = other DNA
gtgctgacacagcagtaccaggtgctgcggacagatgaggaagcccaggat

SEQ ID NO: 70 - DNA, 1641 bp, synthetic construct
  source 1..1641: mol_type = other DNA
atgggctttacgaccaagatcatcttcctgtacaacctggtgctggtgtacgccggcttcgacgatcctagaaaggccatcgagctggtgcagaagagatacggcagaccctgcgattgctctggcggccaagtttctgagcctcctagcgacagagtgtcccaagtgacctgtagcggcaagaccgcctacctgatgcctgaccagagatggaagtgcaagagcatccccaaggacacaagccctagcggccctctgcaagagtgcccctgtaatagctaccagagcagcgtgcacagctcctgctacacaagctaccagcagtgcagaagcggcaacaagacctactacaccgccacactgctgaaaacccagaccggcggcacatccgatgttcaggtgctgggcagcaccaacaagctgattcagagcccctgcaacggcatcaagggccagagcatctgctggtccacaacagcccctatccacgtgtcagatggcggcggacctctggacaccaccagaatcaagagcgtgcagcggaagctggaagagatccacaaggctctgtaccccgaactccagtatcaccctctggctatccccaaagtgcgggacaacctgatggtggacgcccagacactgaatatcctgaacgccacctacaatctgctgctgatgagcaacaccagcctggtggacgattgctggctgtgcctgaaactgggacctcctacacctctggcaattcccaacttcctgctgagctacgtgaccagaagcagcgacaacatcagctgcctgattatcccacctctgctcgtgcagcccatgcagttcagcaactcctcctgcctgttcagccccagctacaacagcaccgaggaaatcgacctgggacacgtggccttctccaactgcacctccatcaccaacgtgacaggccctatctgcgccgtgaatggcagcgtgttcctgtgtggcaacaacatggcctacacctacctgcctaccaactggaccggactgtgcgtgctggctacactgctgcctgacatcgacatcatccctggcgacgagcccgtgcctattcctgccatcgaccacttcatctacagacccaagcgggctatccagttcatcccactgctggccggactgggaatcaccgccgcttttacaacaggcgctacaggactgggcgtgtccgtgacacagtacaccaagctgagcaaccagctgatctccgacgtgcagatcctgagcagcaccatccaggacctccaggatcaggtggactctctggccgaagtggtgctccagaacagaagaggactggacctgctgacagccgagcaaggcggaatttgtctggccctgcaagagaagtgctgcttctacgtgaacaagagcggcatcgtgcgcgacaagatcaagacactgcaagaggaactggaacggcggagaaaggacctggcctccaatcctctgtggaccggcctgcaaggactgctcccttacctgctgcctttcctgggaccactgctgactctgctgctcctgctgaccatcggaccctgcatcttcaacagactgaccgccttcatcaacgacaagctgaacatcatccacgctatggtg

SEQ ID NO: 71 - DNA, 1644 bp, synthetic construct
  source 1..1644: mol_type = other DNA
atgggctttacgaccaagatcatcttcctgtacaacctggtgctggtgtacgccggcttcgacgatcctagaaaggccatcgagctggtgcagaagagatacggcagaccctgcgattgctctggcggccaagtttctgagcctcctagcgacagagtgtcccaagtgacctgtagcggcaagaccgcctacctgatgcctgaccagagatggaagtgcaagagcatccccaaggacacaagccctagcggccctctgcaagagtgcccctgtaatagctaccagagcagcgtgcacagctcctgctacacaagctaccagcagtgcagaagcggcaacaagacctactacaccgccacactgctgaaaacccagaccggcggcacatccgatgttcaggtgctgggcagcaccaacaagctgattcagagcccctgcaacggcatcaagggccagagcatctgctggtccacaacagcccctatccacgtgtcagatggcggcggacctctggacaccaccagaatcaagagcgtgcagcggaagctggaagagatccacaaggctctgtaccccgaactccagtatcaccctctggctatccccaaagtgcgggacaacctgatggtggacgcccagacactgaatatcctgaacgccacctacaatctgctgctgatgagcaacaccagcctggtggacgattgctggctgtgcctgaaactgggacctcctacacctctggcaattcccaacttcctgctgagctacgtgaccagaagcagcgacaacatcagctgcctgattatcccacctctgctcgtgcagcccatgcagttcagcaactcctcctgcctgttcagccccagctacaacagcaccgaggaaatcgacctgggacacgtggccttctccaactgcacctccatcaccaacgtgacaggccctatctgcgccgtgaatggcagcgtgttcctgtgtggcaacaacatggcctacacctacctgcctaccaactggaccggactgtgcgtgctggctacactgctgcctgacatcgacatcatccctggcgacgagcccgtgcctattcctgccatcgaccacttcatctacagacccaagcgggctatccagttcatcccactgctggccggactgggaatcaccgccgcttttacaacaggcgctacaggactgggcgtgtccgtgacacagtacaccaagctgagcaaccagctgatctccgacgtgcagatcctgagcagcaccatccaggacctccaggatcaggtggactctctggccgaagtggtgctccagaacagaagaggactggacctgctgacagccgagcaaggcggaatttgtctggccctgcaagagaagtgctgcttctacgtgaacaagagcggcatcgtgcgcgacaagatcaagacactgcaagaggaactggaacggcggagaaaggacctggcctccaatcctctgtggaccggcctgcaaggactgctcccttacctgctgcctttcctgggaccactgctgactctgctgctcctgctgaccatcggaccctgcatcttcaacagactgaccgccttcatcaacgacaagctgaacatcatccacgctatggtgctg

SEQ ID NO: 72 - DNA, 1647 bp, synthetic construct
  source 1..1647: mol_type = other DNA
atgggctttacgaccaagatcatcttcctgtacaacctggtgctggtgtacgccggcttcgacgatcctagaaaggccatcgagctggtgcagaagagatacggcagaccctgcgattgctctggcggccaagtttctgagcctcctagcgacagagtgtcccaagtgacctgtagcggcaagaccgcctacctgatgcctgaccagagatggaagtgcaagagcatccccaaggacacaagccctagcggccctctgcaagagtgcccctgtaatagctaccagagcagcgtgcacagctcctgctacacaagctaccagcagtgcagaagcggcaacaagacctactacaccgccacactgctgaaaacccagaccggcggcacatccgatgttcaggtgctgggcagcaccaacaagctgattcagagcccctgcaacggcatcaagggccagagcatctgctggtccacaacagcccctatccacgtgtcagatggcggcggacctctggacaccaccagaatcaagagcgtgcagcggaagctggaagagatccacaaggctctgtaccccgaactccagtatcaccctctggctatccccaaagtgcgggacaacctgatggtggacgcccagacactgaatatcctgaacgccacctacaatctgctgctgatgagcaacaccagcctggtggacgattgctggctgtgcctgaaactgggacctcctacacctctggcaattcccaacttcctgctgagctacgtgaccagaagcagcgacaacatcagctgcctgattatcccacctctgctcgtgcagcccatgcagttcagcaactcctcctgcctgttcagccccagctacaacagcaccgaggaaatcgacctgggacacgtggccttctccaactgcacctccatcaccaacgtgacaggccctatctgcgccgtgaatggcagcgtgttcctgtgtggcaacaacatggcctacacctacctgcctaccaactggaccggactgtgcgtgctggctacactgctgcctgacatcgacatcatccctggcgacgagcccgtgcctattcctgccatcgaccacttcatctacagacccaagcgggctatccagttcatcccactgctggccggactgggaatcaccgccgcttttacaacaggcgctacaggactgggcgtgtccgtgacacagtacaccaagctgagcaaccagctgatctccgacgtgcagatcctgagcagcaccatccaggacctccaggatcaggtggactctctggccgaagtggtgctccagaacagaagaggactggacctgctgacagccgagcaaggcggaatttgtctggccctgcaagagaagtgctgcttctacgtgaacaagagcggcatcgtgcgcgacaagatcaagacactgcaagaggaactggaacggcggagaaaggacctggcctccaatcctctgtggaccggcctgcaaggactgctcccttacctgctgcctttcctgggaccactgctgactctgctgctcctgctgaccatcggaccctgcatcttcaacagactgaccgccttcatcaacgacaagctgaacatcatccacgctatggtgctgaca

SEQ ID NO: 73 - DNA, 1650 bp, synthetic construct
  source 1..1650: mol_type = other DNA
atgggctttacgaccaagatcatcttcctgtacaacctggtgctggtgtacgccggcttcgacgatcctagaaaggccatcgagctggtgcagaagagatacggcagaccctgcgattgctctggcggccaagtttctgagcctcctagcgacagagtgtcccaagtgacctgtagcggcaagaccgcctacctgatgcctgaccagagatggaagtgcaagagcatccccaaggacacaagccctagcggccctctgcaagagtgcccctgtaatagctaccagagcagcgtgcacagctcctgctacacaagctaccagcagtgcagaagcggcaacaagacctactacaccgccacactgctgaaaacccagaccggcggcacatccgatgttcaggtgctgggcagcaccaacaagctgattcagagcccctgcaacggcatcaagggccagagcatctgctggtccacaacagcccctatccacgtgtcagatggcggcggacctctggacaccaccagaatcaagagcgtgcagcggaagctggaagagatccacaaggctctgtaccccgaactccagtatcaccctctggctatccccaaagtgcgggacaacctgatggtggacgcccagacactgaatatcctgaacgccacctacaatctgctgctgatgagcaacaccagcctggtggacgattgctggctgtgcctgaaactgggacctcctacacctctggcaattcccaacttcctgctgagctacgtgaccagaagcagcgacaacatcagctgcctgattatcccacctctgctcgtgcagcccatgcagttcagcaactcctcctgcctgttcagccccagctacaacagcaccgaggaaatcgacctgggacacgtggccttctccaactgcacctccatcaccaacgtgacaggccctatctgcgccgtgaatggcagcgtgttcctgtgtggcaacaacatggcctacacctacctgcctaccaactggaccggactgtgcgtgctggctacactgctgcctgacatcgacatcatccctggcgacgagcccgtgcctattcctgccatcgaccacttcatctacagacccaagcgggctatccagttcatcccactgctggccggactgggaatcaccgccgcttttacaacaggcgctacaggactgggcgtgtccgtgacacagtacaccaagctgagcaaccagctgatctccgacgtgcagatcctgagcagcaccatccaggacctccaggatcaggtggactctctggccgaagtggtgctccagaacagaagaggactggacctgctgacagccgagcaaggcggaatttgtctggccctgcaagagaagtgctgcttctacgtgaacaagagcggcatcgtgcgcgacaagatcaagacactgcaagaggaactggaacggcggagaaaggacctggcctccaatcctctgtggaccggcctgcaaggactgctcccttacctgctgcctttcctgggaccactgctgactctgctgctcctgctgaccatcggaccctgcatcttcaacagactgaccgccttcatcaacgacaagctgaacatcatccacgctatggtgctgacacag

SEQ ID NO: 74 - DNA, 1653 bp, synthetic construct
  source 1..1653: mol_type = other DNA
atgggctttacgaccaagatcatcttcctgtacaacctggtgctggtgtacgccggcttcgacgatcctagaaaggccatcgagctggtgcagaagagatacggcagaccctgcgattgctctggcggccaagtttctgagcctcctagcgacagagtgtcccaagtgacctgtagcggcaagaccgcctacctgatgcctgaccagagatggaagtgcaagagcatccccaaggacacaagccctagcggccctctgcaagagtgcccctgtaatagctaccagagcagcgtgcacagctcctgctacacaagctaccagcagtgcagaagcggcaacaagacctactacaccgccacactgctgaaaacccagaccggcggcacatccgatgttcaggtgctgggcagcaccaacaagctgattcagagcccctgcaacggcatcaagggccagagcatctgctggtccacaacagcccctatccacgtgtcagatggcggcggacctctggacaccaccagaatcaagagcgtgcagcggaagctggaagagatccacaaggctctgtaccccgaactccagtatcaccctctggctatccccaaagtgcgggacaacctgatggtggacgcccagacactgaatatcctgaacgccacctacaatctgctgctgatgagcaacaccagcctggtggacgattgctggctgtgcctgaaactgggacctcctacacctctggcaattcccaacttcctgctgagctacgtgaccagaagcagcgacaacatcagctgcctgattatcccacctctgctcgtgcagcccatgcagttcagcaactcctcctgcctgttcagccccagctacaacagcaccgaggaaatcgacctgggacacgtggccttctccaactgcacctccatcaccaacgtgacaggccctatctgcgccgtgaatggcagcgtgttcctgtgtggcaacaacatggcctacacctacctgcctaccaactggaccggactgtgcgtgctggctacactgctgcctgacatcgacatcatccctggcgacgagcccgtgcctattcctgccatcgaccacttcatctacagacccaagcgggctatccagttcatcccactgctggccggactgggaatcaccgccgcttttacaacaggcgctacaggactgggcgtgtccgtgacacagtacaccaagctgagcaaccagctgatctccgacgtgcagatcctgagcagcaccatccaggacctccaggatcaggtggactctctggccgaagtggtgctccagaacagaagaggactggacctgctgacagccgagcaaggcggaatttgtctggccctgcaagagaagtgctgcttctacgtgaacaagagcggcatcgtgcgcgacaagatcaagacactgcaagaggaactggaacggcggagaaaggacctggcctccaatcctctgtggaccggcctgcaaggactgctcccttacctgctgcctttcctgggaccactgctgactctgctgctcctgctgaccatcggaccctgcatcttcaacagactgaccgccttcatcaacgacaagctgaacatcatccacgctatggtgctgacacagcag

SEQ ID NO: 75 - DNA, 1656 bp, synthetic construct
  source 1..1656: mol_type = other DNA
atgggctttacgaccaagatcatcttcctgtacaacctggtgctggtgtacgccggcttcgacgatcctagaaaggccatcgagctggtgcagaagagatacggcagaccctgcgattgctctggcggccaagtttctgagcctcctagcgacagagtgtcccaagtgacctgtagcggcaagaccgcctacctgatgcctgaccagagatggaagtgcaagagcatccccaaggacacaagccctagcggccctctgcaagagtgcccctgtaatagctaccagagcagcgtgcacagctcctgctacacaagctaccagcagtgcagaagcggcaacaagacctactacaccgccacactgctgaaaacccagaccggcggcacatccgatgttcaggtgctgggcagcaccaacaagctgattcagagcccctgcaacggcatcaagggccagagcatctgctggtccacaacagcccctatccacgtgtcagatggcggcggacctctggacaccaccagaatcaagagcgtgcagcggaagctggaagagatccacaaggctctgtaccccgaactccagtatcaccctctggctatccccaaagtgcgggacaacctgatggtggacgcccagacactgaatatcctgaacgccacctacaatctgctgctgatgagcaacaccagcctggtggacgattgctggctgtgcctgaaactgggacctcctacacctctggcaattcccaacttcctgctgagctacgtgaccagaagcagcgacaacatcagctgcctgattatcccacctctgctcgtgcagcccatgcagttcagcaactcctcctgcctgttcagccccagctacaacagcaccgaggaaatcgacctgggacacgtggccttctccaactgcacctccatcaccaacgtgacaggccctatctgcgccgtgaatggcagcgtgttcctgtgtggcaacaacatggcctacacctacctgcctaccaactggaccggactgtgcgtgctggctacactgctgcctgacatcgacatcatccctggcgacgagcccgtgcctattcctgccatcgaccacttcatctacagacccaagcgggctatccagttcatcccactgctggccggactgggaatcaccgccgcttttacaacaggcgctacaggactgggcgtgtccgtgacacagtacaccaagctgagcaaccagctgatctccgacgtgcagatcctgagcagcaccatccaggacctccaggatcaggtggactctctggccgaagtggtgctccagaacagaagaggactggacctgctgacagccgagcaaggcggaatttgtctggccctgcaagagaagtgctgcttctacgtgaacaagagcggcatcgtgcgcgacaagatcaagacactgcaagaggaactggaacggcggagaaaggacctggcctccaatcctctgtggaccggcctgcaaggactgctcccttacctgctgcctttcctgggaccactgctgactctgctgctcctgctgaccatcggaccctgcatcttcaacagactgaccgccttcatcaacgacaagctgaacatcatccacgctatggtgctgacacagcagtac

SEQ ID NO: 76 - DNA, 1659 bp, synthetic construct
  source 1..1659: mol_type = other DNA
atgggctttacgaccaagatcatcttcctgtacaacctggtgctggtgtacgccggcttcgacgatcctagaaaggccatcgagctggtgcagaagagatacggcagaccctgcgattgctctggcggccaagtttctgagcctcctagcgacagagtgtcccaagtgacctgtagcggcaagaccgcctacctgatgcctgaccagagatggaagtgcaagagcatccccaaggacacaagccctagcggccctctgcaagagtgcccctgtaatagctaccagagcagcgtgcacagctcctgctacacaagctaccagcagtgcagaagcggcaacaagacctactacaccgccacactgctgaaaacccagaccggcggcacatccgatgttcaggtgctgggcagcaccaacaagctgattcagagcccctgcaacggcatcaagggccagagcatctgctggtccacaacagcccctatccacgtgtcagatggcggcggacctctggacaccaccagaatcaagagcgtgcagcggaagctggaagagatccacaaggctctgtaccccgaactccagtatcaccctctggctatccccaaagtgcgggacaacctgatggtggacgcccagacactgaatatcctgaacgccacctacaatctgctgctgatgagcaacaccagcctggtggacgattgctggctgtgcctgaaactgggacctcctacacctctggcaattcccaacttcctgctgagctacgtgaccagaagcagcgacaacatcagctgcctgattatcccacctctgctcgtgcagcccatgcagttcagcaactcctcctgcctgttcagccccagctacaacagcaccgaggaaatcgacctgggacacgtggccttctccaactgcacctccatcaccaacgtgacaggccctatctgcgccgtgaatggcagcgtgttcctgtgtggcaacaacatggcctacacctacctgcctaccaactggaccggactgtgcgtgctggctacactgctgcctgacatcgacatcatccctggcgacgagcccgtgcctattcctgccatcgaccacttcatctacagacccaagcgggctatccagttcatcccactgctggccggactgggaatcaccgccgcttttacaacaggcgctacaggactgggcgtgtccgtgacacagtacaccaagctgagcaaccagctgatctccgacgtgcagatcctgagcagcaccatccaggacctccaggatcaggtggactctctggccgaagtggtgctccagaacagaagaggactggacctgctgacagccgagcaaggcggaatttgtctggccctgcaagagaagtgctgcttctacgtgaacaagagcggcatcgtgcgcgacaagatcaagacactgcaagaggaactggaacggcggagaaaggacctggcctccaatcctctgtggaccggcctgcaaggactgctcccttacctgctgcctttcctgggaccactgctgactctgctgctcctgctgaccatcggaccctgcatcttcaacagactgaccgccttcatcaacgacaagctgaacatcatccacgctatggtgctgacacagcagtaccag

SEQ ID NO: 77 - DNA, 1662 bp, synthetic construct
  source 1..1662: mol_type = other DNA
atgggctttacgaccaagatcatcttcctgtacaacctggtgctggtgtacgccggcttcgacgatcctagaaaggccatcgagctggtgcagaagagatacggcagaccctgcgattgctctggcggccaagtttctgagcctcctagcgacagagtgtcccaagtgacctgtagcggcaagaccgcctacctgatgcctgaccagagatggaagtgcaagagcatccccaaggacacaagccctagcggccctctgcaagagtgcccctgtaatagctaccagagcagcgtgcacagctcctgctacacaagctaccagcagtgcagaagcggcaacaagacctactacaccgccacactgctgaaaacccagaccggcggcacatccgatgttcaggtgctgggcagcaccaacaagctgattcagagcccctgcaacggcatcaagggccagagcatctgctggtccacaacagcccctatccacgtgtcagatggcggcggacctctggacaccaccagaatcaagagcgtgcagcggaagctggaagagatccacaaggctctgtaccccgaactccagtatcaccctctggctatccccaaagtgcgggacaacctgatggtggacgcccagacactgaatatcctgaacgccacctacaatctgctgctgatgagcaacaccagcctggtggacgattgctggctgtgcctgaaactgggacctcctacacctctggcaattcccaacttcctgctgagctacgtgaccagaagcagcgacaacatcagctgcctgattatcccacctctgctcgtgcagcccatgcagttcagcaactcctcctgcctgttcagccccagctacaacagcaccgaggaaatcgacctgggacacgtggccttctccaactgcacctccatcaccaacgtgacaggccctatctgcgccgtgaatggcagcgtgttcctgtgtggcaacaacatggcctacacctacctgcctaccaactggaccggactgtgcgtgctggctacactgctgcctgacatcgacatcatccctggcgacgagcccgtgcctattcctgccatcgaccacttcatctacagacccaagcgggctatccagttcatcccactgctggccggactgggaatcaccgccgcttttacaacaggcgctacaggactgggcgtgtccgtgacacagtacaccaagctgagcaaccagctgatctccgacgtgcagatcctgagcagcaccatccaggacctccaggatcaggtggactctctggccgaagtggtgctccagaacagaagaggactggacctgctgacagccgagcaaggcggaatttgtctggccctgcaagagaagtgctgcttctacgtgaacaagagcggcatcgtgcgcgacaagatcaagacactgcaagaggaactggaacggcggagaaaggacctggcctccaatcctctgtggaccggcctgcaaggactgctcccttacctgctgcctttcctgggaccactgctgactctgctgctcctgctgaccatcggaccctgcatcttcaacagactgaccgccttcatcaacgacaagctgaacatcatccacgctatggtgctgacacagcagtaccaggtg

SEQ ID NO: 78 - DNA, 1665 bp, synthetic construct
  source 1..1665: mol_type = other DNA
atgggctttacgaccaagatcatcttcctgtacaacctggtgctggtgtacgccggcttcgacgatcctagaaaggccatcgagctggtgcagaagagatacggcagaccctgcgattgctctggcggccaagtttctgagcctcctagcgacagagtgtcccaagtgacctgtagcggcaagaccgcctacctgatgcctgaccagagatggaagtgcaagagcatccccaaggacacaagccctagcggccctctgcaagagtgcccctgtaatagctaccagagcagcgtgcacagctcctgctacacaagctaccagcagtgcagaagcggcaacaagacctactacaccgccacactgctgaaaacccagaccggcggcacatccgatgttcaggtgctgggcagcaccaacaagctgattcagagcccctgcaacggcatcaagggccagagcatctgctggtccacaacagcccctatccacgtgtcagatggcggcggacctctggacaccaccagaatcaagagcgtgcagcggaagctggaagagatccacaaggctctgtaccccgaactccagtatcaccctctggctatccccaaagtgcgggacaacctgatggtggacgcccagacactgaatatcctgaacgccacctacaatctgctgctgatgagcaacaccagcctggtggacgattgctggctgtgcctgaaactgggacctcctacacctctggcaattcccaacttcctgctgagctacgtgaccagaagcagcgacaacatcagctgcctgattatcccacctctgctcgtgcagcccatgcagttcagcaactcctcctgcctgttcagccccagctacaacagcaccgaggaaatcgacctgggacacgtggccttctccaactgcacctccatcaccaacgtgacaggccctatctgcgccgtgaatggcagcgtgttcctgtgtggcaacaacatggcctacacctacctgcctaccaactggaccggactgtgcgtgctggctacactgctgcctgacatcgacatcatccctggcgacgagcccgtgcctattcctgccatcgaccacttcatctacagacccaagcgggctatccagttcatcccactgctggccggactgggaatcaccgccgcttttacaacaggcgctacaggactgggcgtgtccgtgacacagtacaccaagctgagcaaccagctgatctccgacgtgcagatcctgagcagcaccatccaggacctccaggatcaggtggactctctggccgaagtggtgctccagaacagaagaggactggacctgctgacagccgagcaaggcggaatttgtctggccctgcaagagaagtgctgcttctacgtgaacaagagcggcatcgtgcgcgacaagatcaagacactgcaagaggaactggaacggcggagaaaggacctggcctccaatcctctgtggaccggcctgcaaggactgctcccttacctgctgcctttcctgggaccactgctgactctgctgctcctgctgaccatcggaccctgcatcttcaacagactgaccgccttcatcaacgacaagctgaacatcatccacgctatggtgctgacacagcagtaccaggtgctg

SEQ ID NO: 79 - DNA, 1668 bp, synthetic construct
  source 1..1668: mol_type = other DNA
atgggctttacgaccaagatcatcttcctgtacaacctggtgctggtgtacgccggcttcgacgatcctagaaaggccatcgagctggtgcagaagagatacggcagaccctgcgattgctctggcggccaagtttctgagcctcctagcgacagagtgtcccaagtgacctgtagcggcaagaccgcctacctgatgcctgaccagagatggaagtgcaagagcatccccaaggacacaagccctagcggccctctgcaagagtgcccctgtaatagctaccagagcagcgtgcacagctcctgctacacaagctaccagcagtgcagaagcggcaacaagacctactacaccgccacactgctgaaaacccagaccggcggcacatccgatgttcaggtgctgggcagcaccaacaagctgattcagagcccctgcaacggcatcaagggccagagcatctgctggtccacaacagcccctatccacgtgtcagatggcggcggacctctggacaccaccagaatcaagagcgtgcagcggaagctggaagagatccacaaggctctgtaccccgaactccagtatcaccctctggctatccccaaagtgcgggacaacctgatggtggacgcccagacactgaatatcctgaacgccacctacaatctgctgctgatgagcaacaccagcctggtggacgattgctggctgtgcctgaaactgggacctcctacacctctggcaattcccaacttcctgctgagctacgtgaccagaagcagcgacaacatcagctgcctgattatcccacctctgctcgtgcagcccatgcagttcagcaactcctcctgcctgttcagccccagctacaacagcaccgaggaaatcgacctgggacacgtggccttctccaactgcacctccatcaccaacgtgacaggccctatctgcgccgtgaatggcagcgtgttcctgtgtggcaacaacatggcctacacctacctgcctaccaactggaccggactgtgcgtgctggctacactgctgcctgacatcgacatcatccctggcgacgagcccgtgcctattcctgccatcgaccacttcatctacagacccaagcgggctatccagttcatcccactgctggccggactgggaatcaccgccgcttttacaacaggcgctacaggactgggcgtgtccgtgacacagtacaccaagctgagcaaccagctgatctccgacgtgcagatcctgagcagcaccatccaggacctccaggatcaggtggactctctggccgaagtggtgctccagaacagaagaggactggacctgctgacagccgagcaaggcggaatttgtctggccctgcaagagaagtgctgcttctacgtgaacaagagcggcatcgtgcgcgacaagatcaagacactgcaagaggaactggaacggcggagaaaggacctggcctccaatcctctgtggaccggcctgcaaggactgctcccttacctgctgcctttcctgggaccactgctgactctgctgctcctgctgaccatcggaccctgcatcttcaacagactgaccgccttcatcaacgacaagctgaacatcatccacgctatggtgctgacacagcagtaccaggtgctgcgg

SEQ ID NO: 80 - DNA, 1671 bp, synthetic construct
  source 1..1671: mol_type = other DNA
atgggctttacgaccaagatcatcttcctgtacaacctggtgctggtgtacgccggcttcgacgatcctagaaaggccatcgagctggtgcagaagagatacggcagaccctgcgattgctctggcggccaagtttctgagcctcctagcgacagagtgtcccaagtgacctgtagcggcaagaccgcctacctgatgcctgaccagagatggaagtgcaagagcatccccaaggacacaagccctagcggccctctgcaagagtgcccctgtaatagctaccagagcagcgtgcacagctcctgctacacaagctaccagcagtgcagaagcggcaacaagacctactacaccgccacactgctgaaaacccagaccggcggcacatccgatgttcaggtgctgggcagcaccaacaagctgattcagagcccctgcaacggcatcaagggccagagcatctgctggtccacaacagcccctatccacgtgtcagatggcggcggacctctggacaccaccagaatcaagagcgtgcagcggaagctggaagagatccacaaggctctgtaccccgaactccagtatcaccctctggctatccccaaagtgcgggacaacctgatggtggacgcccagacactgaatatcctgaacgccacctacaatctgctgctgatgagcaacaccagcctggtggacgattgctggctgtgcctgaaactgggacctcctacacctctggcaattcccaacttcctgctgagctacgtgaccagaagcagcgacaacatcagctgcctgattatcccacctctgctcgtgcagcccatgcagttcagcaactcctcctgcctgttcagccccagctacaacagcaccgaggaaatcgacctgggacacgtggccttctccaactgcacctccatcaccaacgtgacaggccctatctgcgccgtgaatggcagcgtgttcctgtgtggcaacaacatggcctacacctacctgcctaccaactggaccggactgtgcgtgctggctacactgctgcctgacatcgacatcatccctggcgacgagcccgtgcctattcctgccatcgaccacttcatctacagacccaagcgggctatccagttcatcccactgctggccggactgggaatcaccgccgcttttacaacaggcgctacaggactgggcgtgtccgtgacacagtacaccaagctgagcaaccagctgatctccgacgtgcagatcctgagcagcaccatccaggacctccaggatcaggtggactctctggccgaagtggtgctccagaacagaagaggactggacctgctgacagccgagcaaggcggaatttgtctggccctgcaagagaagtgctgcttctacgtgaacaagagcggcatcgtgcgcgacaagatcaagacactgcaagaggaactggaacggcggagaaaggacctggcctccaatcctctgtggaccggcctgcaaggactgctcccttacctgctgcctttcctgggaccactgctgactctgctgctcctgctgaccatcggaccctgcatcttcaacagactgaccgccttcatcaacgacaagctgaacatcatccacgctatggtgctgacacagcagtaccaggtgctgcggaca

SEQ ID NO: 81 - DNA, 1674 bp, synthetic construct
  source 1..1674: mol_type = other DNA
atgggctttacgaccaagatcatcttcctgtacaacctggtgctggtgtacgccggcttcgacgatcctagaaaggccatcgagctggtgcagaagagatacggcagaccctgcgattgctctggcggccaagtttctgagcctcctagcgacagagtgtcccaagtgacctgtagcggcaagaccgcctacctgatgcctgaccagagatggaagtgcaagagcatccccaaggacacaagccctagcggccctctgcaagagtgcccctgtaatagctaccagagcagcgtgcacagctcctgctacacaagctaccagcagtgcagaagcggcaacaagacctactacaccgccacactgctgaaaacccagaccggcggcacatccgatgttcaggtgctgggcagcaccaacaagctgattcagagcccctgcaacggcatcaagggccagagcatctgctggtccacaacagcccctatccacgtgtcagatggcggcggacctctggacaccaccagaatcaagagcgtgcagcggaagctggaagagatccacaaggctctgtaccccgaactccagtatcaccctctggctatccccaaagtgcgggacaacctgatggtggacgcccagacactgaatatcctgaacgccacctacaatctgctgctgatgagcaacaccagcctggtggacgattgctggctgtgcctgaaactgggacctcctacacctctggcaattcccaacttcctgctgagctacgtgaccagaagcagcgacaacatcagctgcctgattatcccacctctgctcgtgcagcccatgcagttcagcaactcctcctgcctgttcagccccagctacaacagcaccgaggaaatcgacctgggacacgtggccttctccaactgcacctccatcaccaacgtgacaggccctatctgcgccgtgaatggcagcgtgttcctgtgtggcaacaacatggcctacacctacctgcctaccaactggaccggactgtgcgtgctggctacactgctgcctgacatcgacatcatccctggcgacgagcccgtgcctattcctgccatcgaccacttcatctacagacccaagcgggctatccagttcatcccactgctggccggactgggaatcaccgccgcttttacaacaggcgctacaggactgggcgtgtccgtgacacagtacaccaagctgagcaaccagctgatctccgacgtgcagatcctgagcagcaccatccaggacctccaggatcaggtggactctctggccgaagtggtgctccagaacagaagaggactggacctgctgacagccgagcaaggcggaatttgtctggccctgcaagagaagtgctgcttctacgtgaacaagagcggcatcgtgcgcgacaagatcaagacactgcaagaggaactggaacggcggagaaaggacctggcctccaatcctctgtggaccggcctgcaaggactgctcccttacctgctgcctttcctgggaccactgctgactctgctgctcctgctgaccatcggaccctgcatcttcaacagactgaccgccttcatcaacgacaagctgaacatcatccacgctatggtgctgacacagcagtaccaggtgctgcggacagat

SEQ ID NO: 82 - DNA, 1677 bp, synthetic construct
  source 1..1677: mol_type = other DNA
atgggctttacgaccaagatcatcttcctgtacaacctggtgctggtgtacgccggcttcgacgatcctagaaaggccatcgagctggtgcagaagagatacggcagaccctgcgattgctctggcggccaagtttctgagcctcctagcgacagagtgtcccaagtgacctgtagcggcaagaccgcctacctgatgcctgaccagagatggaagtgcaagagcatccccaaggacacaagccctagcggccctctgcaagagtgcccctgtaatagctaccagagcagcgtgcacagctcctgctacacaagctaccagcagtgcagaagcggcaacaagacctactacaccgccacactgctgaaaacccagaccggcggcacatccgatgttcaggtgctgggcagcaccaacaagctgattcagagcccctgcaacggcatcaagggccagagcatctgctggtccacaacagcccctatccacgtgtcagatggcggcggacctctggacaccaccagaatcaagagcgtgcagcggaagctggaagagatccacaaggctctgtaccccgaactccagtatcaccctctggctatccccaaagtgcgggacaacctgatggtggacgcccagacactgaatatcctgaacgccacctacaatctgctgctgatgagcaacaccagcctggtggacgattgctggctgtgcctgaaactgggacctcctacacctctggcaattcccaacttcctgctgagctacgtgaccagaagcagcgacaacatcagctgcctgattatcccacctctgctcgtgcagcccatgcagttcagcaactcctcctgcctgttcagccccagctacaacagcaccgaggaaatcgacctgggacacgtggccttctccaactgcacctccatcaccaacgtgacaggccctatctgcgccgtgaatggcagcgtgttcctgtgtggcaacaacatggcctacacctacctgcctaccaactggaccggactgtgcgtgctggctacactgctgcctgacatcgacatcatccctggcgacgagcccgtgcctattcctgccatcgaccacttcatctacagacccaagcgggctatccagttcatcccactgctggccggactgggaatcaccgccgcttttacaacaggcgctacaggactgggcgtgtccgtgacacagtacaccaagctgagcaaccagctgatctccgacgtgcagatcctgagcagcaccatccaggacctccaggatcaggtggactctctggccgaagtggtgctccagaacagaagaggactggacctgctgacagccgagcaaggcggaatttgtctggccctgcaagagaagtgctgcttctacgtgaacaagagcggcatcgtgcgcgacaagatcaagacactgcaagaggaactggaacggcggagaaaggacctggcctccaatcctctgtggaccggcctgcaaggactgctcccttacctgctgcctttcctgggaccactgctgactctgctgctcctgctgaccatcggaccctgcatcttcaacagactgaccgccttcatcaacgacaagctgaacatcatccacgctatggtgctgacacagcagtaccaggtgctgcggacagatgag

SEQ ID NO: 83 - DNA, 1680 bp, synthetic construct
  source 1..1680: mol_type = other DNA
atgggctttacgaccaagatcatcttcctgtacaacctggtgctggtgtacgccggcttcgacgatcctagaaaggccatcgagctggtgcagaagagatacggcagaccctgcgattgctctggcggccaagtttctgagcctcctagcgacagagtgtcccaagtgacctgtagcggcaagaccgcctacctgatgcctgaccagagatggaagtgcaagagcatccccaaggacacaagccctagcggccctctgcaagagtgcccctgtaatagctaccagagcagcgtgcacagctcctgctacacaagctaccagcagtgcagaagcggcaacaagacctactacaccgccacactgctgaaaacccagaccggcggcacatccgatgttcaggtgctgggcagcaccaacaagctgattcagagcccctgcaacggcatcaagggccagagcatctgctggtccacaacagcccctatccacgtgtcagatggcggcggacctctggacaccaccagaatcaagagcgtgcagcggaagctggaagagatccacaaggctctgtaccccgaactccagtatcaccctctggctatccccaaagtgcgggacaacctgatggtggacgcccagacactgaatatcctgaacgccacctacaatctgctgctgatgagcaacaccagcctggtggacgattgctggctgtgcctgaaactgggacctcctacacctctggcaattcccaacttcctgctgagctacgtgaccagaagcagcgacaacatcagctgcctgattatcccacctctgctcgtgcagcccatgcagttcagcaactcctcctgcctgttcagccccagctacaacagcaccgaggaaatcgacctgggacacgtggccttctccaactgcacctccatcaccaacgtgacaggccctatctgcgccgtgaatggcagcgtgttcctgtgtggcaacaacatggcctacacctacctgcctaccaactggaccggactgtgcgtgctggctacactgctgcctgacatcgacatcatccctggcgacgagcccgtgcctattcctgccatcgaccacttcatctacagacccaagcgggctatccagttcatcccactgctggccggactgggaatcaccgccgcttttacaacaggcgctacaggactgggcgtgtccgtgacacagtacaccaagctgagcaaccagctgatctccgacgtgcagatcctgagcagcaccatccaggacctccaggatcaggtggactctctggccgaagtggtgctccagaacagaagaggactggacctgctgacagccgagcaaggcggaatttgtctggccctgcaagagaagtgctgcttctacgtgaacaagagcggcatcgtgcgcgacaagatcaagacactgcaagaggaactggaacggcggagaaaggacctggcctccaatcctctgtggaccggcctgcaaggactgctcccttacctgctgcctttcctgggaccactgctgactctgctgctcctgctgaccatcggaccctgcatcttcaacagactgaccgccttcatcaacgacaagctgaacatcatccacgctatggtgctgacacagcagtaccaggtgctgcggacagatgaggaa

SEQ ID NO: 84 - DNA, 1683 bp, synthetic construct
  source 1..1683: mol_type = other DNA
atgggctttacgaccaagatcatcttcctgtacaacctggtgctggtgtacgccggcttcgacgatcctagaaaggccatcgagctggtgcagaagagatacggcagaccctgcgattgctctggcggccaagtttctgagcctcctagcgacagagtgtcccaagtgacctgtagcggcaagaccgcctacctgatgcctgaccagagatggaagtgcaagagcatccccaaggacacaagccctagcggccctctgcaagagtgcccctgtaatagctaccagagcagcgtgcacagctcctgctacacaagctaccagcagtgcagaagcggcaacaagacctactacaccgccacactgctgaaaacccagaccggcggcacatccgatgttcaggtgctgggcagcaccaacaagctgattcagagcccctgcaacggcatcaagggccagagcatctgctggtccacaacagcccctatccacgtgtcagatggcggcggacctctggacaccaccagaatcaagagcgtgcagcggaagctggaagagatccacaaggctctgtaccccgaactccagtatcaccctctggctatccccaaagtgcgggacaacctgatggtggacgcccagacactgaatatcctgaacgccacctacaatctgctgctgatgagcaacaccagcctggtggacgattgctggctgtgcctgaaactgggacctcctacacctctggcaattcccaacttcctgctgagctacgtgaccagaagcagcgacaacatcagctgcctgattatcccacctctgctcgtgcagcccatgcagttcagcaactcctcctgcctgttcagccccagctacaacagcaccgaggaaatcgacctgggacacgtggccttctccaactgcacctccatcaccaacgtgacaggccctatctgcgccgtgaatggcagcgtgttcctgtgtggcaacaacatggcctacacctacctgcctaccaactggaccggactgtgcgtgctggctacactgctgcctgacatcgacatcatccctggcgacgagcccgtgcctattcctgccatcgaccacttcatctacagacccaagcgggctatccagttcatcccactgctggccggactgggaatcaccgccgcttttacaacaggcgctacaggactgggcgtgtccgtgacacagtacaccaagctgagcaaccagctgatctccgacgtgcagatcctgagcagcaccatccaggacctccaggatcaggtggactctctggccgaagtggtgctccagaacagaagaggactggacctgctgacagccgagcaaggcggaatttgtctggccctgcaagagaagtgctgcttctacgtgaacaagagcggcatcgtgcgcgacaagatcaagacactgcaagaggaactggaacggcggagaaaggacctggcctccaatcctctgtggaccggcctgcaaggactgctcccttacctgctgcctttcctgggaccactgctgactctgctgctcctgctgaccatcggaccctgcatcttcaacagactgaccgccttcatcaacgacaagctgaacatcatccacgctatggtgctgacacagcagtaccaggtgctgcggacagatgaggaagcc

SEQ ID NO: 85 - DNA, 1686 bp, synthetic construct
  source 1..1686: mol_type = other DNA
atgggctttacgaccaagatcatcttcctgtacaacctggtgctggtgtacgccggcttcgacgatcctagaaaggccatcgagctggtgcagaagagatacggcagaccctgcgattgctctggcggccaagtttctgagcctcctagcgacagagtgtcccaagtgacctgtagcggcaagaccgcctacctgatgcctgaccagagatggaagtgcaagagcatccccaaggacacaagccctagcggccctctgcaagagtgcccctgtaatagctaccagagcagcgtgcacagctcctgctacacaagctaccagcagtgcagaagcggcaacaagacctactacaccgccacactgctgaaaacccagaccggcggcacatccgatgttcaggtgctgggcagcaccaacaagctgattcagagcccctgcaacggcatcaagggccagagcatctgctggtccacaacagcccctatccacgtgtcagatggcggcggacctctggacaccaccagaatcaagagcgtgcagcggaagctggaagagatccacaaggctctgtaccccgaactccagtatcaccctctggctatccccaaagtgcgggacaacctgatggtggacgcccagacactgaatatcctgaacgccacctacaatctgctgctgatgagcaacaccagcctggtggacgattgctggctgtgcctgaaactgggacctcctacacctctggcaattcccaacttcctgctgagctacgtgaccagaagcagcgacaacatcagctgcctgattatcccacctctgctcgtgcagcccatgcagttcagcaactcctcctgcctgttcagccccagctacaacagcaccgaggaaatcgacctgggacacgtggccttctccaactgcacctccatcaccaacgtgacaggccctatctgcgccgtgaatggcagcgtgttcctgtgtggcaacaacatggcctacacctacctgcctaccaactggaccggactgtgcgtgctggctacactgctgcctgacatcgacatcatccctggcgacgagcccgtgcctattcctgccatcgaccacttcatctacagacccaagcgggctatccagttcatcccactgctggccggactgggaatcaccgccgcttttacaacaggcgctacaggactgggcgtgtccgtgacacagtacaccaagctgagcaaccagctgatctccgacgtgcagatcctgagcagcaccatccaggacctccaggatcaggtggactctctggccgaagtggtgctccagaacagaagaggactggacctgctgacagccgagcaaggcggaatttgtctggccctgcaagagaagtgctgcttctacgtgaacaagagcggcatcgtgcgcgacaagatcaagacactgcaagaggaactggaacggcggagaaaggacctggcctccaatcctctgtggaccggcctgcaaggactgctcccttacctgctgcctttcctgggaccactgctgactctgctgctcctgctgaccatcggaccctgcatcttcaacagactgaccgccttcatcaacgacaagctgaacatcatccacgctatggtgctgacacagcagtaccaggtgctgcggacagatgaggaagcccag

SEQ ID NO: 86 - DNA, 1644 bp, synthetic construct
  source 1..1644: mol_type = other DNA
atgggctttacgaccaagatcatcttcctgtacaacctggtgctggtgtacgccggcttcgacgatcctagaaaggccatcgagctggtgcagaagagatacggcagaccctgcgattgctctggcggccaagtttctgagcctcctagcgacagagtgtcccaagtgacctgtagcggcaagaccgcctacctgatgcctgaccagagatggaagtgcaagagcatccccaaggacacaagccctagcggccctctgcaagagtgcccctgtaatagctaccagagcagcgtgcacagctcctgctacacaagctaccagcagtgcagaagcggcaacaagacctactacaccgccacactgctgaaaacccagaccggcggcacatccgatgttcaggtgctgggcagcaccaacaagctgattcagagcccctgcaacggcatcaagggccagagcatctgctggtccacaacagcccctatccacgtgtcagatggcggcggacctctggacaccaccagaatcaagagcgtgcagcggaagctggaagagatccacaaggctctgtaccccgaactccagtatcaccctctggctatccccaaagtgcgggacaacctgatggtggacgcccagacactgaatatcctgaacgccacctacaatctgctgctgatgagcaacaccagcctggtggacgattgctggctgtgcctgaaactgggacctcctacacctctggcaattcccaacttcctgctgagctacgtgaccagaagcagcgacaacatcagctgcctgattatcccacctctgctcgtgcagcccatgcagttcagcaactcctcctgcctgttcagccccagctacaacagcaccgaggaaatcgacctgggacacgtggccttctccaactgcacctccatcaccaacgtgacaggccctatctgcgccgtgaatggcagcgtgttcctgtgtggcaacaacatggcctacacctacctgcctaccaactggaccggactgtgcgtgctggctacactgctgcctgacatcgacatcatccctggcgacgagcccgtgcctattcctgccatcgaccacttcatctacagacccaagcgggctatccagttcatcccactgctggccggactgggaatcaccgccgcttttacaacaggcgctacaggactgggcgtgtccgtgacacagtacaccaagctgagcaaccagctgatctccgacgtgcagatcctgagcagcaccatccaggacctccaggatcaggtggactctctggccgaagtggtgctccagaacagaagaggactggacctgctgacagccgagcaaggcggaatttgtctggccctgcaagagaagtgctgcttctacgtgaacaagagcggcatcgtgcgcgacaagatcaagacactgcaagaggaactggaacggcggagaaaggacctggcctccaatcctctgtggaccggcctgcaaggactgctcccttacctgctgcctttcctgggaccactgctgactctgctgctcctgctgaccatcggaccctgcatcttcaacagactgaccgccttcatcaacgacaagctgaacatcatccacgctatgtggtaa

SEQ ID NO: 87 - DNA, 1644 bp, synthetic construct
  source 1..1644: mol_type = other DNA
atgggctttacgaccaagatcatcttcctgtacaacctggtgctggtgtacgccggcttcgacgatcctagaaaggccatcgagctggtgcagaagagatacggcagaccctgcgattgctctggcggccaagtttctgagcctcctagcgacagagtgtcccaagtgacctgtagcggcaagaccgcctacctgatgcctgaccagagatggaagtgcaagagcatccccaaggacacaagccctagcggccctctgcaagagtgcccctgtaatagctaccagagcagcgtgcacagctcctgctacacaagctaccagcagtgcagaagcggcaacaagacctactacaccgccacactgctgaaaacccagaccggcggcacatccgatgttcaggtgctgggcagcaccaacaagctgattcagagcccctgcaacggcatcaagggccagagcatctgctggtccacaacagcccctatccacgtgtcagatggcggcggacctctggacaccaccagaatcaagagcgtgcagcggaagctggaagagatccacaaggctctgtaccccgaactccagtatcaccctctggctatccccaaagtgcgggacaacctgatggtggacgcccagacactgaatatcctgaacgccacctacaatctgctgctgatgagcaacaccagcctggtggacgattgctggctgtgcctgaaactgggacctcctacacctctggcaattcccaacttcctgctgagctacgtgaccagaagcagcgacaacatcagctgcctgattatcccacctctgctcgtgcagcccatgcagttcagcaactcctcctgcctgttcagccccagctacaacagcaccgaggaaatcgacctgggacacgtggccttctccaactgcacctccatcaccaacgtgacaggccctatctgcgccgtgaatggcagcgtgttcctgtgtggcaacaacatggcctacacctacctgcctaccaactggaccggactgtgcgtgctggctacactgctgcctgacatcgacatcatccctggcgacgagcccgtgcctattcctgccatcgaccacttcatctacagacccaagcgggctatccagttcatcccactgctggccggactgggaatcaccgccgcttttacaacaggcgctacaggactgggcgtgtccgtgacacagtacaccaagctgagcaaccagctgatctccgacgtgcagatcctgagcagcaccatccaggacctccaggatcaggtggactctctggccgaagtggtgctccagaacagaagaggactggacctgctgacagccgagcaaggcggaatttgtctggccctgcaagagaagtgctgcttctacgtgaacaagagcggcatcgtgcgcgacaagatcaagacactgcaagaggaactggaacggcggagaaaggacctggcctccaatcctctgtggaccggcctgcaaggactgctcccttacctgctgcctttcctgggaccactgctgactctgctgctcctgctgaccatcggaccctgcatcttcaacagactgaccgccttcatcaacgacaagctgaacatcatccacgctatgagataa

SEQ ID NO: 88 - DNA, 1644 bp, synthetic construct
  source 1..1644: mol_type = other DNA
atgggctttacgaccaagatcatcttcctgtacaacctggtgctggtgtacgccggcttcgacgatcctagaaaggccatcgagctggtgcagaagagatacggcagaccctgcgattgctctggcggccaagtttctgagcctcctagcgacagagtgtcccaagtgacctgtagcggcaagaccgcctacctgatgcctgaccagagatggaagtgcaagagcatccccaaggacacaagccctagcggccctctgcaagagtgcccctgtaatagctaccagagcagcgtgcacagctcctgctacacaagctaccagcagtgcagaagcggcaacaagacctactacaccgccacactgctgaaaacccagaccggcggcacatccgatgttcaggtgctgggcagcaccaacaagctgattcagagcccctgcaacggcatcaagggccagagcatctgctggtccacaacagcccctatccacgtgtcagatggcggcggacctctggacaccaccagaatcaagagcgtgcagcggaagctggaagagatccacaaggctctgtaccccgaactccagtatcaccctctggctatccccaaagtgcgggacaacctgatggtggacgcccagacactgaatatcctgaacgccacctacaatctgctgctgatgagcaacaccagcctggtggacgattgctggctgtgcctgaaactgggacctcctacacctctggcaattcccaacttcctgctgagctacgtgaccagaagcagcgacaacatcagctgcctgattatcccacctctgctcgtgcagcccatgcagttcagcaactcctcctgcctgttcagccccagctacaacagcaccgaggaaatcgacctgggacacgtggccttctccaactgcacctccatcaccaacgtgacaggccctatctgcgccgtgaatggcagcgtgttcctgtgtggcaacaacatggcctacacctacctgcctaccaactggaccggactgtgcgtgctggctacactgctgcctgacatcgacatcatccctggcgacgagcccgtgcctattcctgccatcgaccacttcatctacagacccaagcgggctatccagttcatcccactgctggccggactgggaatcaccgccgcttttacaacaggcgctacaggactgggcgtgtccgtgacacagtacaccaagctgagcaaccagctgatctccgacgtgcagatcctgagcagcaccatccaggacctccaggatcaggtggactctctggccgaagtggtgctccagaacagaagaggactggacctgctgacagccgagcaaggcggaatttgtctggccctgcaagagaagtgctgcttctacgtgaacaagagcggcatcgtgcgcgacaagatcaagacactgcaagaggaactggaacggcggagaaaggacctggcctccaatcctctgtggaccggcctgcaaggactgctcccttacctgctgcctttcctgggaccactgctgactctgctgctcctgctgaccatcggaccctgcatcttcaacagactgaccgccttcatcaacgacaagctgaacatcatccacgctatggattaa

SEQ ID NO: 89 - DNA, 1644 bp, synthetic construct
  source 1..1644: mol_type = other DNA
atgggctttacgaccaagatcatcttcctgtacaacctggtgctggtgtacgccggcttcgacgatcctagaaaggccatcgagctggtgcagaagagatacggcagaccctgcgattgctctggcggccaagtttctgagcctcctagcgacagagtgtcccaagtgacctgtagcggcaagaccgcctacctgatgcctgaccagagatggaagtgcaagagcatccccaaggacacaagccctagcggccctctgcaagagtgcccctgtaatagctaccagagcagcgtgcacagctcctgctacacaagctaccagcagtgcagaagcggcaacaagacctactacaccgccacactgctgaaaacccagaccggcggcacatccgatgttcaggtgctgggcagcaccaacaagctgattcagagcccctgcaacggcatcaagggccagagcatctgctggtccacaacagcccctatccacgtgtcagatggcggcggacctctggacaccaccagaatcaagagcgtgcagcggaagctggaagagatccacaaggctctgtaccccgaactccagtatcaccctctggctatccccaaagtgcgggacaacctgatggtggacgcccagacactgaatatcctgaacgccacctacaatctgctgctgatgagcaacaccagcctggtggacgattgctggctgtgcctgaaactgggacctcctacacctctggcaattcccaacttcctgctgagctacgtgaccagaagcagcgacaacatcagctgcctgattatcccacctctgctcgtgcagcccatgcagttcagcaactcctcctgcctgttcagccccagctacaacagcaccgaggaaatcgacctgggacacgtggccttctccaactgcacctccatcaccaacgtgacaggccctatctgcgccgtgaatggcagcgtgttcctgtgtggcaacaacatggcctacacctacctgcctaccaactggaccggactgtgcgtgctggctacactgctgcctgacatcgacatcatccctggcgacgagcccgtgcctattcctgccatcgaccacttcatctacagacccaagcgggctatccagttcatcccactgctggccggactgggaatcaccgccgcttttacaacaggcgctacaggactgggcgtgtccgtgacacagtacaccaagctgagcaaccagctgatctccgacgtgcagatcctgagcagcaccatccaggacctccaggatcaggtggactctctggccgaagtggtgctccagaacagaagaggactggacctgctgacagccgagcaaggcggaatttgtctggccctgcaagagaagtgctgcttctacgtgaacaagagcggcatcgtgcgcgacaagatcaagacactgcaagaggaactggaacggcggagaaaggacctggcctccaatcctctgtggaccggcctgcaaggactgctcccttacctgctgcctttcctgggaccactgctgactctgctgctcctgctgaccatcggaccctgcatcttcaacagactgaccgccttcatcaacgacaagctgaacatcatccacgctatgtactaa

SEQ ID NO: 90 - DNA, 1644 bp, synthetic construct
  source 1..1644: mol_type = other DNA
atgggctttacgaccaagatcatcttcctgtacaacctggtgctggtgtacgccggcttcgacgatcctagaaaggccatcgagctggtgcagaagagatacggcagaccctgcgattgctctggcggccaagtttctgagcctcctagcgacagagtgtcccaagtgacctgtagcggcaagaccgcctacctgatgcctgaccagagatggaagtgcaagagcatccccaaggacacaagccctagcggccctctgcaagagtgcccctgtaatagctaccagagcagcgtgcacagctcctgctacacaagctaccagcagtgcagaagcggcaacaagacctactacaccgccacactgctgaaaacccagaccggcggcacatccgatgttcaggtgctgggcagcaccaacaagctgattcagagcccctgcaacggcatcaagggccagagcatctgctggtccacaacagcccctatccacgtgtcagatggcggcggacctctggacaccaccagaatcaagagcgtgcagcggaagctggaagagatccacaaggctctgtaccccgaactccagtatcaccctctggctatccccaaagtgcgggacaacctgatggtggacgcccagacactgaatatcctgaacgccacctacaatctgctgctgatgagcaacaccagcctggtggacgattgctggctgtgcctgaaactgggacctcctacacctctggcaattcccaacttcctgctgagctacgtgaccagaagcagcgacaacatcagctgcctgattatcccacctctgctcgtgcagcccatgcagttcagcaactcctcctgcctgttcagccccagctacaacagcaccgaggaaatcgacctgggacacgtggccttctccaactgcacctccatcaccaacgtgacaggccctatctgcgccgtgaatggcagcgtgttcctgtgtggcaacaacatggcctacacctacctgcctaccaactggaccggactgtgcgtgctggctacactgctgcctgacatcgacatcatccctggcgacgagcccgtgcctattcctgccatcgaccacttcatctacagacccaagcgggctatccagttcatcccactgctggccggactgggaatcaccgccgcttttacaacaggcgctacaggactgggcgtgtccgtgacacagtacaccaagctgagcaaccagctgatctccgacgtgcagatcctgagcagcaccatccaggacctccaggatcaggtggactctctggccgaagtggtgctccagaacagaagaggactggacctgctgacagccgagcaaggcggaatttgtctggccctgcaagagaagtgctgcttctacgtgaacaagagcggcatcgtgcgcgacaagatcaagacactgcaagaggaactggaacggcggagaaaggacctggcctccaatcctctgtggaccggcctgcaaggactgctcccttacctgctgcctttcctgggaccactgctgactctgctgctcctgctgaccatcggaccctgcatcttcaacagactgaccgccttcatcaacgacaagctgaacatcatccacgctatgcagtaa

SEQ ID NO: 91 - DNA, 1644 bp, synthetic construct
  source 1..1644: mol_type = other DNA
atgggctttacgaccaagatcatcttcctgtacaacctggtgctggtgtacgccggcttcgacgatcctagaaaggccatcgagctggtgcagaagagatacggcagaccctgcgattgctctggcggccaagtttctgagcctcctagcgacagagtgtcccaagtgacctgtagcggcaagaccgcctacctgatgcctgaccagagatggaagtgcaagagcatccccaaggacacaagccctagcggccctctgcaagagtgcccctgtaatagctaccagagcagcgtgcacagctcctgctacacaagctaccagcagtgcagaagcggcaacaagacctactacaccgccacactgctgaaaacccagaccggcggcacatccgatgttcaggtgctgggcagcaccaacaagctgattcagagcccctgcaacggcatcaagggccagagcatctgctggtccacaacagcccctatccacgtgtcagatggcggcggacctctggacaccaccagaatcaagagcgtgcagcggaagctggaagagatccacaaggctctgtaccccgaactccagtatcaccctctggctatccccaaagtgcgggacaacctgatggtggacgcccagacactgaatatcctgaacgccacctacaatctgctgctgatgagcaacaccagcctggtggacgattgctggctgtgcctgaaactgggacctcctacacctctggcaattcccaacttcctgctgagctacgtgaccagaagcagcgacaacatcagctgcctgattatcccacctctgctcgtgcagcccatgcagttcagcaactcctcctgcctgttcagccccagctacaacagcaccgaggaaatcgacctgggacacgtggccttctccaactgcacctccatcaccaacgtgacaggccctatctgcgccgtgaatggcagcgtgttcctgtgtggcaacaacatggcctacacctacctgcctaccaactggaccggactgtgcgtgctggctacactgctgcctgacatcgacatcatccctggcgacgagcccgtgcctattcctgccatcgaccacttcatctacagacccaagcgggctatccagttcatcccactgctggccggactgggaatcaccgccgcttttacaacaggcgctacaggactgggcgtgtccgtgacacagtacaccaagctgagcaaccagctgatctccgacgtgcagatcctgagcagcaccatccaggacctccaggatcaggtggactctctggccgaagtggtgctccagaacagaagaggactggacctgctgacagccgagcaaggcggaatttgtctggccctgcaagagaagtgctgcttctacgtgaacaagagcggcatcgtgcgcgacaagatcaagacactgcaagaggaactggaacggcggagaaaggacctggcctccaatcctctgtggaccggcctgcaaggactgctcccttacctgctgcctttcctgggaccactgctgactctgctgctcctgctgaccatcggaccctgcatcttcaacagactgaccgccttcatcaacgacaagctgaacatcatccacgctatgcactaa

SEQ ID NO: 92 - DNA, 1647 bp, synthetic construct
  source 1..1647: mol_type = other DNA
atgggctttacgaccaagatcatcttcctgtacaacctggtgctggtgtacgccggcttcgacgatcctagaaaggccatcgagctggtgcagaagagatacggcagaccctgcgattgctctggcggccaagtttctgagcctcctagcgacagagtgtcccaagtgacctgtagcggcaagaccgcctacctgatgcctgaccagagatggaagtgcaagagcatccccaaggacacaagccctagcggccctctgcaagagtgcccctgtaatagctaccagagcagcgtgcacagctcctgctacacaagctaccagcagtgcagaagcggcaacaagacctactacaccgccacactgctgaaaacccagaccggcggcacatccgatgttcaggtgctgggcagcaccaacaagctgattcagagcccctgcaacggcatcaagggccagagcatctgctggtccacaacagcccctatccacgtgtcagatggcggcggacctctggacaccaccagaatcaagagcgtgcagcggaagctggaagagatccacaaggctctgtaccccgaactccagtatcaccctctggctatccccaaagtgcgggacaacctgatggtggacgcccagacactgaatatcctgaacgccacctacaatctgctgctgatgagcaacaccagcctggtggacgattgctggctgtgcctgaaactgggacctcctacacctctggcaattcccaacttcctgctgagctacgtgaccagaagcagcgacaacatcagctgcctgattatcccacctctgctcgtgcagcccatgcagttcagcaactcctcctgcctgttcagccccagctacaacagcaccgaggaaatcgacctgggacacgtggccttctccaactgcacctccatcaccaacgtgacaggccctatctgcgccgtgaatggcagcgtgttcctgtgtggcaacaacatggcctacacctacctgcctaccaactggaccggactgtgcgtgctggctacactgctgcctgacatcgacatcatccctggcgacgagcccgtgcctattcctgccatcgaccacttcatctacagacccaagcgggctatccagttcatcccactgctggccggactgggaatcaccgccgcttttacaacaggcgctacaggactgggcgtgtccgtgacacagtacaccaagctgagcaaccagctgatctccgacgtgcagatcctgagcagcaccatccaggacctccaggatcaggtggactctctggccgaagtggtgctccagaacagaagaggactggacctgctgacagccgagcaaggcggaatttgtctggccctgcaagagaagtgctgcttctacgtgaacaagagcggcatcgtgcgcgacaagatcaagacactgcaagaggaactggaacggcggagaaaggacctggcctccaatcctctgtggaccggcctgcaaggactgctcccttacctgctgcctttcctgggaccactgctgactctgctgctcctgctgaccatcggaccctgcatcttcaacagactgaccgccttcatcaacgacaagctgaacatcatccacgctatgggatcctaa

SEQ ID NO: 93 - DNA, 1653 bp, synthetic construct
  source 1..1653: mol_type = other DNA
atgggctttacgaccaagatcatcttcctgtacaacctggtgctggtgtacgccggcttcgacgatcctagaaaggccatcgagctggtgcagaagagatacggcagaccctgcgattgctctggcggccaagtttctgagcctcctagcgacagagtgtcccaagtgacctgtagcggcaagaccgcctacctgatgcctgaccagagatggaagtgcaagagcatccccaaggacacaagccctagcggccctctgcaagagtgcccctgtaatagctaccagagcagcgtgcacagctcctgctacacaagctaccagcagtgcagaagcggcaacaagacctactacaccgccacactgctgaaaacccagaccggcggcacatccgatgttcaggtgctgggcagcaccaacaagctgattcagagcccctgcaacggcatcaagggccagagcatctgctggtccacaacagcccctatccacgtgtcagatggcggcggacctctggacaccaccagaatcaagagcgtgcagcggaagctggaagagatccacaaggctctgtaccccgaactccagtatcaccctctggctatccccaaagtgcgggacaacctgatggtggacgcccagacactgaatatcctgaacgccacctacaatctgctgctgatgagcaacaccagcctggtggacgattgctggctgtgcctgaaactgggacctcctacacctctggcaattcccaacttcctgctgagctacgtgaccagaagcagcgacaacatcagctgcctgattatcccacctctgctcgtgcagcccatgcagttcagcaactcctcctgcctgttcagccccagctacaacagcaccgaggaaatcgacctgggacacgtggccttctccaactgcacctccatcaccaacgtgacaggccctatctgcgccgtgaatggcagcgtgttcctgtgtggcaacaacatggcctacacctacctgcctaccaactggaccggactgtgcgtgctggctacactgctgcctgacatcgacatcatccctggcgacgagcccgtgcctattcctgccatcgaccacttcatctacagacccaagcgggctatccagttcatcccactgctggccggactgggaatcaccgccgcttttacaacaggcgctacaggactgggcgtgtccgtgacacagtacaccaagctgagcaaccagctgatctccgacgtgcagatcctgagcagcaccatccaggacctccaggatcaggtggactctctggccgaagtggtgctccagaacagaagaggactggacctgctgacagccgagcaaggcggaatttgtctggccctgcaagagaagtgctgcttctacgtgaacaagagcggcatcgtgcgcgacaagatcaagacactgcaagaggaactggaacggcggagaaaggacctggcctccaatcctctgtggaccggcctgcaaggactgctcccttacctgctgcctttcctgggaccactgctgactctgctgctcctgctgaccatcggaccctgcatcttcaacagactgaccgccttcatcaacgacaagctgaacatcatccacgctatgggatccactagctaa

SEQ ID NO: 94 - DNA, 1671 bp, synthetic construct
  source 1..1671: mol_type = other DNA
atgggctttacgaccaagatcatcttcctgtacaacctggtgctggtgtacgccggcttcgacgatcctagaaaggccatcgagctggtgcagaagagatacggcagaccctgcgattgctctggcggccaagtttctgagcctcctagcgacagagtgtcccaagtgacctgtagcggcaagaccgcctacctgatgcctgaccagagatggaagtgcaagagcatccccaaggacacaagccctagcggccctctgcaagagtgcccctgtaatagctaccagagcagcgtgcacagctcctgctacacaagctaccagcagtgcagaagcggcaacaagacctactacaccgccacactgctgaaaacccagaccggcggcacatccgatgttcaggtgctgggcagcaccaacaagctgattcagagcccctgcaacggcatcaagggccagagcatctgctggtccacaacagcccctatccacgtgtcagatggcggcggacctctggacaccaccagaatcaagagcgtgcagcggaagctggaagagatccacaaggctctgtaccccgaactccagtatcaccctctggctatccccaaagtgcgggacaacctgatggtggacgcccagacactgaatatcctgaacgccacctacaatctgctgctgatgagcaacaccagcctggtggacgattgctggctgtgcctgaaactgggacctcctacacctctggcaattcccaacttcctgctgagctacgtgaccagaagcagcgacaacatcagctgcctgattatcccacctctgctcgtgcagcccatgcagttcagcaactcctcctgcctgttcagccccagctacaacagcaccgaggaaatcgacctgggacacgtggccttctccaactgcacctccatcaccaacgtgacaggccctatctgcgccgtgaatggcagcgtgttcctgtgtggcaacaacatggcctacacctacctgcctaccaactggaccggactgtgcgtgctggctacactgctgcctgacatcgacatcatccctggcgacgagcccgtgcctattcctgccatcgaccacttcatctacagacccaagcgggctatccagttcatcccactgctggccggactgggaatcaccgccgcttttacaacaggcgctacaggactgggcgtgtccgtgacacagtacaccaagctgagcaaccagctgatctccgacgtgcagatcctgagcagcaccatccaggacctccaggatcaggtggactctctggccgaagtggtgctccagaacagaagaggactggacctgctgacagccgagcaaggcggaatttgtctggccctgcaagagaagtgctgcttctacgtgaacaagagcggcatcgtgcgcgacaagatcaagacactgcaagaggaactggaacggcggagaaaggacctggcctccaatcctctgtggaccggcctgcaaggactgctcccttacctgctgcctttcctgggaccactgctgactctgctgctcctgctgaccatcggaccctgcatcttcaacagactgaccgccttcatcaacgacaagctgaacatcatccacgctatgggatccactagtccagtgtggtggaattcttaa

SEQ ID NO: 95 - DNA, 1689 bp, synthetic construct
  source 1..1689: mol_type = other DNA
atgggctttacgaccaagatcatcttcctgtacaacctggtgctggtgtacgccggcttcgacgatcctagaaaggccatcgagctggtgcagaagagatacggcagaccctgcgattgctctggcggccaagtttctgagcctcctagcgacagagtgtcccaagtgacctgtagcggcaagaccgcctacctgatgcctgaccagagatggaagtgcaagagcatccccaaggacacaagccctagcggccctctgcaagagtgcccctgtaatagctaccagagcagcgtgcacagctcctgctacacaagctaccagcagtgcagaagcggcaacaagacctactacaccgccacactgctgaaaacccagaccggcggcacatccgatgttcaggtgctgggcagcaccaacaagctgattcagagcccctgcaacggcatcaagggccagagcatctgctggtccacaacagcccctatccacgtgtcagatggcggcggacctctggacaccaccagaatcaagagcgtgcagcggaagctggaagagatccacaaggctctgtaccccgaactccagtatcaccctctggctatccccaaagtgcgggacaacctgatggtggacgcccagacactgaatatcctgaacgccacctacaatctgctgctgatgagcaacaccagcctggtggacgattgctggctgtgcctgaaactgggacctcctacacctctggcaattcccaacttcctgctgagctacgtgaccagaagcagcgacaacatcagctgcctgattatcccacctctgctcgtgcagcccatgcagttcagcaactcctcctgcctgttcagccccagctacaacagcaccgaggaaatcgacctgggacacgtggccttctccaactgcacctccatcaccaacgtgacaggccctatctgcgccgtgaatggcagcgtgttcctgtgtggcaacaacatggcctacacctacctgcctaccaactggaccggactgtgcgtgctggctacactgctgcctgacatcgacatcatccctggcgacgagcccgtgcctattcctgccatcgaccacttcatctacagacccaagcgggctatccagttcatcccactgctggccggactgggaatcaccgccgcttttacaacaggcgctacaggactgggcgtgtccgtgacacagtacaccaagctgagcaaccagctgatctccgacgtgcagatcctgagcagcaccatccaggacctccaggatcaggtggactctctggccgaagtggtgctccagaacagaagaggactggacctgctgacagccgagcaaggcggaatttgtctggccctgcaagagaagtgctgcttctacgtgaacaagagcggcatcgtgcgcgacaagatcaagacactgcaagaggaactggaacggcggagaaaggacctggcctccaatcctctgtggaccggcctgcaaggactgctcccttacctgctgcctttcctgggaccactgctgactctgctgctcctgctgaccatcggaccctgcatcttcaacagactgaccgccttcatcaacgacaagctgaacatcatccacgctatgggatccactagtccagtgtggtggaattctgcagatatccagcacagttaa

SEQ ID NO: 96 - DNA, 1731 bp, synthetic construct
  source 1..1731: mol_type = other DNA
atgggctttacgaccaagatcatcttcctgtacaacctggtgctggtgtacgccggcttcgacgatcctagaaaggccatcgagctggtgcagaagagatacggcagaccctgcgattgctctggcggccaagtttctgagcctcctagcgacagagtgtcccaagtgacctgtagcggcaagaccgcctacctgatgcctgaccagagatggaagtgcaagagcatccccaaggacacaagccctagcggccctctgcaagagtgcccctgtaatagctaccagagcagcgtgcacagctcctgctacacaagctaccagcagtgcagaagcggcaacaagacctactacaccgccacactgctgaaaacccagaccggcggcacatccgatgttcaggtgctgggcagcaccaacaagctgattcagagcccctgcaacggcatcaagggccagagcatctgctggtccacaacagcccctatccacgtgtcagatggcggcggacctctggacaccaccagaatcaagagcgtgcagcggaagctggaagagatccacaaggctctgtaccccgaactccagtatcaccctctggctatccccaaagtgcgggacaacctgatggtggacgcccagacactgaatatcctgaacgccacctacaatctgctgctgatgagcaacaccagcctggtggacgattgctggctgtgcctgaaactgggacctcctacacctctggcaattcccaacttcctgctgagctacgtgaccagaagcagcgacaacatcagctgcctgattatcccacctctgctcgtgcagcccatgcagttcagcaactcctcctgcctgttcagccccagctacaacagcaccgaggaaatcgacctgggacacgtggccttctccaactgcacctccatcaccaacgtgacaggccctatctgcgccgtgaatggcagcgtgttcctgtgtggcaacaacatggcctacacctacctgcctaccaactggaccggactgtgcgtgctggctacactgctgcctgacatcgacatcatccctggcgacgagcccgtgcctattcctgccatcgaccacttcatctacagacccaagcgggctatccagttcatcccactgctggccggactgggaatcaccgccgcttttacaacaggcgctacaggactgggcgtgtccgtgacacagtacaccaagctgagcaaccagctgatctccgacgtgcagatcctgagcagcaccatccaggacctccaggatcaggtggactctctggccgaagtggtgctccagaacagaagaggactggacctgctgacagccgagcaaggcggaatttgtctggccctgcaagagaagtgctgcttctacgtgaacaagagcggcatcgtgcgcgacaagatcaagacactgcaagaggaactggaacggcggagaaaggacctggcctccaatcctctgtggaccggcctgcaaggactgctcccttacctgctgcctttcctgggaccactgctgactctgctgctcctgctgaccatcggaccctgcatcttcaacagactgaccgccttcatcaacgacaagctgaacatcatccacgctatgggatccactagtccagtgtggtggaattctgcagatatccagcacagtggcggccgctcgagtctagagggcccgaacaaaaactcatcttaa

SEQ ID NO: 97 - DNA, 1692 bp, synthetic construct; identical to SEQ ID NO: 40
  source 1..1692: mol_type = other DNA

SEQ ID NO: 98 - DNA, 1743 bp, synthetic construct
  source 1..1743: mol_type = other DNA
atgggctttacgaccaagatcatcttcctgtacaacctggtgctggtgtacgccggcttcgacgatcctagaaaggccatcgagctggtgcagaagagatacggcagaccctgcgattgctctggcggccaagtttctgagcctcctagcgacagagtgtcccaagtgacctgtagcggcaagaccgcctacctgatgcctgaccagagatggaagtgcaagagcatccccaaggacacaagccctagcggccctctgcaagagtgcccctgtaatagctaccagagcagcgtgcacagctcctgctacacaagctaccagcagtgcagaagcggcaacaagacctactacaccgccacactgctgaaaacccagaccggcggcacatccgatgttcaggtgctgggcagcaccaacaagctgattcagagcccctgcaacggcatcaagggccagagcatctgctggtccacaacagcccctatccacgtgtcagatggcggcggacctctggacaccaccagaatcaagagcgtgcagcggaagctggaagagatccacaaggctctgtaccccgaactccagtatcaccctctggctatccccaaagtgcgggacaacctgatggtggacgcccagacactgaatatcctgaacgccacctacaatctgctgctgatgagcaacaccagcctggtggacgattgctggctgtgcctgaaactgggacctcctacacctctggcaattcccaacttcctgctgagctacgtgaccagaagcagcgacaacatcagctgcctgattatcccacctctgctcgtgcagcccatgcagttcagcaactcctcctgcctgttcagccccagctacaacagcaccgaggaaatcgacctgggacacgtggccttctccaactgcacctccatcaccaacgtgacaggccctatctgcgccgtgaatggcagcgtgttcctgtgtggcaacaacatggcctacacctacctgcctaccaactggaccggactgtgcgtgctggctacactgctgcctgacatcgacatcatccctggcgacgagcccgtgcctattcctgccatcgaccacttcatctacagacccaagcgggctatccagttcatcccactgctggccggactgggaatcaccgccgcttttacaacaggcgctacaggactgggcgtgtccgtgacacagtacaccaagctgagcaaccagctgatctccgacgtgcagatcctgagcagcaccatccaggacctccaggatcaggtggactctctggccgaagtggtgctccagaacagaagaggactggacctgctgacagccgagcaaggcggaatttgtctggccctgcaagagaagtgctgcttctacgtgaacaagagcggcatcgtgcgcgacaagatcaagacactgcaagaggaactggaacggcggagaaaggacctggcctccaatcctctgtggaccggcctgcaaggactgctcccttacctgctgcctttcctgggaccactgctgactctgctgctcctgctgaccatcggaccctgcatcttcaacagactgaccgccttcatcaacgacaagctgaacatcatccacgctatgggatccactagtccagtgtggtggaattctgcagatatccagcacagtggcggccgctcgagtctagagggcccgaacaaaaactcatctcagaagaggatctga

SEQ ID NO: 99 - DNA, 2571 bp, synthetic construct
  source 1..2571: mol_type = other DNA
atgggctttacgaccaagatcatcttcctgtacaacctggtgctggtgtacgccggcttcgacgatcctagaaaggccatcgagctggtgcagaagagatacggcagaccctgcgattgctctggcggccaagtttctgagcctcctagcgacagagtgtcccaagtgacctgtagcggcaagaccgcctacctgatgcctgaccagagatggaagtgcaagagcatccccaaggacacaagccctagcggccctctgcaagagtgcccctgtaatagctaccagagcagcgtgcacagctcctgctacacaagctaccagcagtgcagaagcggcaacaagacctactacaccgccacactgctgaaaacccagaccggcggcacatccgatgttcaggtgctgggcagcaccaacaagctgattcagagcccctgcaacggcatcaagggccagagcatctgctggtccacaacagcccctatccacgtgtcagatggcggcggacctctggacaccaccagaatcaagagcgtgcagcggaagctggaagagatccacaaggctctgtaccccgaactccagtatcaccctctggctatccccaaagtgcgggacaacctgatggtggacgcccagacactgaatatcctgaacgccacctacaatctgctgctgatgagcaacaccagcctggtggacgattgctggctgtgcctgaaactgggacctcctacacctctggcaattcccaacttcctgctgagctacgtgaccagaagcagcgacaacatcagctgcctgattatcccacctctgctcgtgcagcccatgcagttcagcaactcctcctgcctgttcagccccagctacaacagcaccgaggaaatcgacctgggacacgtggccttctccaactgcacctccatcaccaacgtgacaggccctatctgcgccgtgaatggcagcgtgttcctgtgtggcaacaacatggcctacacctacctgcctaccaactggaccggactgtgcgtgctggctacactgctgcctgacatcgacatcatccctggcgacgagcccgtgcctattcctgccatcgaccacttcatctacagacccaagcgggctatccagttcatcccactgctggccggactgggaatcaccgccgcttttacaacaggcgctacaggactgggcgtgtccgtgacacagtacaccaagctgagcaaccagctgatctccgacgtgcagatcctgagcagcaccatccaggacctccaggatcaggtggactctctggccgaagtggtgctccagaacagaagaggactggacctgctgacagccgagcaaggcggaatttgtctggccctgcaagagaagtgctgcttctacgtgaacaagagcggcatcgtgcgcgacaagatcaagacactgcaagaggaactggaacggcggagaaaggacctggcctccaatcctctgtggaccggcctgcaaggactgctcccttacctgctgcctttcctgggaccactgctgactctgctgctcctgctgaccatcggaccctgcatcttcaacagactgaccgccttcatcaacgacaagctgaacatcatccacgctatgggatccagggccaagcgatctggatctggagcaacaaacttctcactactcaaacaagcaggtgacgtggaggagaatcccgggcctactagtatggactggatttggcgcatccttttccttgtcggcgctgctaccggcgcgcattccttcgaaatgaagcccaccgagaacaacgaagacttcaacatcgtggccgtggccagcaacttcgcgaccacggatctcgatgctgaccgcgggaagttgcccggcaagaagctgccgctggaggtgctcaaagagatggaagccaatgcccggaaagctggctgcaccaggggctgtctgatctgcctgtcccacatcaagtgcacgcccaagatgaagaagttcatcccaggacgctgccacacctacgaaggcgacaaagagtccgcacagggcggcataggcgaggcgatcgtcgacattcctgagattcctgggttcaaggacttggagcccatggagcagttcatcgcacaggtcgatctgtgtgtggactgcacaactggctgcctcaaagggcttgccaacgtgcagtgttctgacctgctcaagaagtggctgccgcaacgctgtgcgacctttgccagcaagatccagggccaggtggacaagatcaagggggccggtggtgacctcgagcagaaactgatctcggaagaggatctggcgaagcccaccacgacgccagcgccgcgaccaccaacaccggcgcccaccatcgcgtcgcagcccctgtccctgcgcccagaggcgtgccggccagcggcggggggcgcagtgcacacgagggggctggacttcgcctgtgacatctacatctgggcgcccttggccgggacttgtggggtccttctcctgtcactggttatcaccctttactgcaaacggggcagaaagaaatag

SEQ ID NO: 100 - DNA, 1641 bp, synthetic construct
  source 1..1641: mol_type = other DNA
atgggctttacgaccaagatcatcttcctgtacaacctggtgctggtgtacgccggcttcgacgatcctagaaaggccatcgagctggtgcagaagagatacggcagaccctgcgattgctctggcggccaagtttctgagcctcctagcgacagagtgtcccaagtgacctgtagcggcaagaccgcctacctgatgcctgaccagagatggaagtgcaagagcatccccaaggacacaagccctagcggccctctgcaagagtgcccctgtaatagctaccagagcagcgtgcacagctcctgctacacaagctaccagcagtgcagaagcggcaacaagacctactacaccgccacactgctgaaaacccagaccggcggcacatccgatgttcaggtgctgggcagcaccaacaagctgattcagagcccctgcaacggcatcaagggccagagcatctgctggtccacaacagcccctatccacgtgtcagatggcggcggacctctggacaccaccagaatcaagagcgtgcagcggaagctggaagagatccacaaggctctgtaccccgaactccagtatcaccctctggctatccccaaagtgcgggacaacctgatggtggacgcccagacactgaatatcctgaacgccacctacaatctgctgctgatgagcaacaccagcctggtggacgattgctggctgtgcctgaaactgggacctcctacacctctggcaattcccaacttcctgctgagctacgtgaccagaagcagcgacaacatcagctgcctgattatcccacctctgctcgtgcagcccatgcagttcagcaactcctcctgcctgttcagccccagctacaacagcaccgaggaaatcgacctgggacacgtggccttctccaactgcacctccatcaccaacgtgacaggccctatctgcgccgtgaatggcagcgtgttcctgtgtggcaacaacatggcctacacctacctgcctaccaactggaccggactgtgcgtgctggctacactgctgcctgacatcgacatcatccctggcgacgagcccgtgcctattcctgccatcgaccacttcatctacagacccaagcgggctatccagttcatcccactgctggccggactgggaatcaccgccgcttttacaacaggcgctacaggactgggcgtgtccgtgacacagtacaccaagctgagcaaccagctgatctccgacgtgcagatcctgagcagcaccatccaggacctccaggatcaggtggactctctggccgaagtggtgctccagaacagaagaggactggacctgctgacagccgagcaaggcggaatttgtctggccctgcaagagaagtgctgcttctacgtgaacaagagcggcatcgtgcgcgacaagatcaagacactgcaagaggaactggaacggcggagaaaggacctggcctccaatcctctgtggaccggcctgcaaggactgctcccttacctgctgcctttcctgggaccactgctgactctgctgctcctgctgaccatcggaccctgcatcttcaacagactgaccgccttcatcaacgacaagctgaacatcatccacgctatgtaa

SEQ ID NO: 101 - DNA, 1641 bp, synthetic construct; identical to SEQ ID NO: 100
  source 1..1641: mol_type = other DNA

SEQ ID NO: 102 - DNA, 1641 bp, synthetic construct; identical to SEQ ID NO: 100
  source 1..1641: mol_type = other DNA

SEQ ID NO: 103 - DNA, 1641 bp, synthetic construct; identical to SEQ ID NO: 100
  source 1..1641: mol_type = other DNA

SEQ ID NO: 104 - DNA, 1641 bp, synthetic construct; identical to SEQ ID NO: 100
  source 1..1641: mol_type = other DNA

SEQ ID NO: 105 - DNA, 1692 bp, synthetic construct
  source 1..1692: mol_type = other DNA
atgggctttacgaccaagatcatcttcctgtacaacctggtgctggtgtacgccggcttcgacgatcctagaaaggccatcgagctggtgcagaagagatacggcagaccctgcgattgctctggcggccaagtttctgagcctcctagcgacagagtgtcccaagtgacctgtagcggcaagaccgcctacctgatgcctgaccagagatggaagtgcaagagcatccccaaggacacaagccctagcggccctctgcaagagtgcccctgtaatagctaccagagcagcgtgcacagctcctgctacacaagctaccagcagtgcagaagcggcaacaagacctactacaccgccacactgctgaaaacccagaccggcggcacatccgatgttcaggtgctgggcagcaccaacaagctgattcagagcccctgcaacggcatcaagggccagagcatctgctggtccacaacagcccctatccacgtgtcagatggcggcggacctctggacaccaccagaatcaagagcgtgcagcggaagctggaagagatccacaaggctctgtaccccgaactccagtatcaccctctggctatccccaaagtgcgggacaacctgatggtggacgcccagacactgaatatcctgaacgccacctacaatctgctgctgatgagcaacaccagcctggtggacgattgctggctgtgcctgaaactgggacctcctacacctctggcaattcccaacttcctgctgagctacgtgaccagaagcagcgacaacatcagctgcctgattatcccacctctgctcgtgcagcccatgcagttcagcaactcctcctgcctgttcagccccagctacaacagcaccgaggaaatcgacctgggacacgtggccttctccaactgcacctccatcaccaacgtgacaggccctatctgcgccgtgaatggcagcgtgttcctgtgtggcaacaacatggcctacacctacctgcctaccaactggaccggactgtgcgtgctggctacactgctgcctgacatcgacatcatccctggcgacgagcccgtgcctattcctgccatcgaccacttcatctacagacccaagcgggctatccagttcatcccactgctggccggactgggaatcaccgccgcttttacaacaggcgctacaggactgggcgtgtccgtgacacagtacaccaagctgagcaaccagctgatctccgacgtgcagatcctgagcagcaccatccaggacctccaggatcaggtggactctctggccgaagtggtgctccagaacagaagaggactggacctgctgacagccgagcaaggcggaatttgtctggccctgcaagagaagtgctgcttctacgtgaacaagagcggcatcgtgcgcgacaagatcaagacactgcaagaggaactggaacggcggagaaaggacctggcctccaatcctctgtggaccggcctgcaaggactgctcccttacctgctgcctttcctgggaccactgctgactctgctgctcctgctgaccatcggaccctgcatcttcaacagactgaccgccttcatcaacgacaagctgaacatcatccacgctatggtgctgacacagcagtcccaggtggcccggacagatgaggaagcccaggattga

SEQ ID NO: 106 - DNA, 1692 bp, synthetic construct
  source 1..1692: mol_type = other DNA
atgggctttacgaccaagatcatcttcctgtacaacctggtgctggtgtacgccggcttcgacgatcctagaaaggccatcgagctggtgcagaagagatacggcagaccctgcgattgctctggcggccaagtttctgagcctcctagcgacagagtgtcccaagtgacctgtagcggcaagaccgcctacctgatgcctgaccagagatggaagtgcaagagcatccccaaggacacaagccctagcggccctctgcaagagtgcccctgtaatagctaccagagcagcgtgcacagctcctgctacacaagctaccagcagtgcagaagcggcaacaagacctactacaccgccacactgctgaaaacccagaccggcggcacatccgatgttcaggtgctgggcagcaccaacaagctgattcagagcccctgcaacggcatcaagggccagagcatctgctggtccacaacagcccctatccacgtgtcagatggcggcggacctctggacaccaccagaatcaagagcgtgcagcggaagctggaagagatccacaaggctctgtaccccgaactccagtatcaccctctggctatccccaaagtgcgggacaacctgatggtggacgcccagacactgaatatcctgaacgccacctacaatctgctgctgatgagcaacaccagcctggtggacgattgctggctgtgcctgaaactgggacctcctacacctctggcaattcccaacttcctgctgagctacgtgaccagaagcagcgacaacatcagctgcctgattatcccacctctgctcgtgcagcccatgcagttcagcaactcctcctgcctgttcagccccagctacaacagcaccgaggaaatcgacctgggacacgtggccttctccaactgcacctccatcaccaacgtgacaggccctatctgcgccgtgaatggcagcgtgttcctgtgtggcaacaacatggcctacacctacctgcctaccaactggaccggactgtgcgtgctggctacactgctgcctgacatcgacatcatccctggcgacgagcccgtgcctattcctgccatcgaccacttcatctacagacccaagcgggctatccagttcatcccactgctggccggactgggaatcaccgccgcttttacaacaggcgctacaggactgggcgtgtccgtgacacagtacaccaagctgagcaaccagctgatctccgacgtgcagatcctgagcagcaccatccaggacctccaggatcaggtggactctctggccgaagtggtgctccagaacagaagaggactggacctgctgacagccgagcaaggcggaatttgtctggccctgcaagagaagtgctgcttctacgtgaacaagagcggcatcgtgcgcgacaagatcaagacactgcaagaggaactggaacggcggagaaaggacctggcctccaatcctctgtggaccggcctgcaaggactgctcccttacctgctgcctttcctgggaccactgctgactctgctgctcctgctgaccatcggaccctgcatcttcaacagactgaccgccttcatcaacgacaagcttaacatcatccacgctatggtgctgacacagcagtaccaggtgctgcggacagatgaggaagcccaggattga

SEQ ID NO: 107 - DNA, 1743 bp, synthetic construct
  source 1..1743: mol_type = other DNA
atgggctttacgaccaagatcatcttcctgtacaacctggtgctggtgtacgccggcttcgacgatcctagaaaggccatcgagctggtgcagaagagatacggcagaccctgcgattgctctggcggccaagtttctgagcctcctagcgacagagtgtcccaagtgacctgtagcggcaagaccgcctacctgatgcctgaccagagatggaagtgcaagagcatccccaaggacacaagccctagcggccctctgcaagagtgcccctgtaatagctaccagagcagcgtgcacagctcctgctacacaagctaccagcagtgcagaagcggcaacaagacctactacaccgccacactgctgaaaacccagaccggcggcacatccgatgttcaggtgctgggcagcaccaacaagctgattcagagcccctgcaacggcatcaagggccagagcatctgctggtccacaacagcccctatccacgtgtcagatggcggcggacctctggacaccaccagaatcaagagcgtgcagcggaagctggaagagatccacaaggctctgtaccccgaactccagtatcaccctctggctatccccaaagtgcgggacaacctgatggtggacgcccagacactgaatatcctgaacgccacctacaatctgctgctgatgagcaacaccagcctggtggacgattgctggctgtgcctgaaactgggacctcctacacctctggcaattcccaacttcctgctgagctacgtgaccagaagcagcgacaacatcagctgcctgattatcccacctctgctcgtgcagcccatgcagttcagcaactcctcctgcctgttcagccccagctacaacagcaccgaggaaatcgacctgggacacgtggccttctccaactgcacctccatcaccaacgtgacaggccctatctgcgccgtgaatggcagcgtgttcctgtgtggcaacaacatggcctacacctacctgcctaccaactggaccggactgtgcgtgctggctacactgctgcctgacatcgacatcatccctggcgacgagcccgtgcctattcctgccatcgaccacttcatctacagacccaagcgggctatccagttcatcccactgctggccggactgggaatcaccgccgcttttacaacaggcgctacaggactgggcgtgtccgtgacacagtacaccaagctgagcaaccagctgatctccgacgtgcagatcctgagcagcaccatccaggacctccaggatcaggtggactctctggccgaagtggtgctccagaacagaagaggactggacctgctgacagccgagcaaggcggaatttgtctggccctgcaagagaagtgctgcttctacgtgaacaagagcggcatcgtgcgcgacaagatcaagacactgcaagaggaactggaacggcggagaaaggacctggcctccaatcctctgtggaccggcctgcaaggactgctcccttacctgctgcctttcctgggaccactgctgactctgctgctcctgctgaccatcggaccctgcatcttcaacagactgaccgccttcatcaacgacaagcttaacatcatccacgctatgggatccactagtccagtgtggtggaattctgcagatatccagcacagtggcggccgctcgagtctagagggcccgaacaaaaactcatctcagaagaggatctga

SEQ ID NO: 108 - DNA, 1692 bp, synthetic construct
  source 1..1692: mol_type = other DNA
atgggctttacgaccaagatcatcttcctgtacaacctggtgctggtgtacgccggcttcgacgatcctagaaaggccatcgagctggtgcagaagagatacggcagaccctgcgattgctctggcggccaagtttctgagcctcctagcgacagagtgtcccaagtgacctgtagcggcaagaccgcctacctgatgcctgaccagagatggaagtgcaagagcatccccaaggacacaagccctagcggccctctgcaagagtgcccctgtaatagctaccagagcagcgtgcacagctcctgctacacaagctaccagcagtgcagaagcggcaacaagacctactacaccgccacactgctgaaaacccagaccggcggcacatccgatgttcaggtgctgggcagcaccaacaagctgattcagagcccctgcaacggcatcaagggccagagcatctgctggtccacaacagcccctatccacgtgtcagatggcggcggacctctggacaccaccagaatcaagagcgtgcagcggaagctggaagagatccacaaggctctgtaccccgaactccagtatcaccctctggctatccccaaagtgcgggacaacctgatggtggacgcccagacactgaatatcctgaacgccacctacaatctgctgctgatgagcaacaccagcctggtggacgattgctggctgtgcctgaaactgggacctcctacacctctggcaattcccaacttcctgctgagctacgtgaccagaagcagcgacaacatcagctgcctgattatcccacctctgctcgtgcagcccatgcagttcagcaactcctcctgcctgttcagccccagctacaacagcaccgaggaaatcgacctgggacacgtggccttctccaactgcacctccatcaccaacgtgacaggccctatctgcgccgtgaatggcagcgtgttcctgtgtggcaacaacatggcctacacctacctgcctaccaactggaccggactgtgcgtgctggctacactgctgcctgacatcgacatcatccctggcgacgagcccgtgcctattcctgccatcgaccacttcatctacagacccaagcgggctatccagttcatcccactgctggccggactgggaatcaccgccgcttttacaacaggcgctacaggactgggcgtgtccgtgacacagtacaccaagcttagcaaccagctgatctccgacgtgcagatcctgagcagcaccatccaggacctccaggatcaggtggactctctggccgaagtggtgctccagaacagaagaggactggacctgctgacagccgagcaaggcggaatttgtctggccctgcaagagaagtgctgcttctacgtgaacaagagcggcatcgtgcgcgacaagatcaagacactgcaagaggaactggaacggcggagaaaggacctggcctccaatcctctgtggaccggcctgcaaggactgctcccttacctgctgcctttcctgggaccactgctgactctgctgctcctgctgaccatcggaccctgcatcttcaacagactgaccgccttcatcaacgacaagctgaacatcatccacgctatggtgctgacacagcagtaccaggtgctgcggacagatgaggaagcccaggattga

SEQ ID NO: 109 - DNA, 1743 bp, synthetic construct
  source 1..1743: mol_type = other DNA
atgggctttacgaccaagatcatcttcctgtacaacctggtgctggtgtacgccggcttcgacgatcctagaaaggccatcgagctggtgcagaagagatacggcagaccctgcgattgctctggcggccaagtttctgagcctcctagcgacagagtgtcccaagtgacctgtagcggcaagaccgcctacctgatgcctgaccagagatggaagtgcaagagcatccccaaggacacaagccctagcggccctctgcaagagtgcccctgtaatagctaccagagcagcgtgcacagctcctgctacacaagctaccagcagtgcagaagcggcaacaagacctactacaccgccacactgctgaaaacccagaccggcggcacatccgatgttcaggtgctgggcagcaccaacaagctgattcagagcccctgcaacggcatcaagggccagagcatctgctggtccacaacagcccctatccacgtgtcagatggcggcggacctctggacaccaccagaatcaagagcgtgcagcggaagctggaagagatccacaaggctctgtaccccgaactccagtatcaccctctggctatccccaaagtgcgggacaacctgatggtggacgcccagacactgaatatcctgaacgccacctacaatctgctgctgatgagcaacaccagcctggtggacgattgctggctgtgcctgaaactgggacctcctacacctctggcaattcccaacttcctgctgagctacgtgaccagaagcagcgacaacatcagctgcctgattatcccacctctgctcgtgcagcccatgcagttcagcaactcctcctgcctgttcagccccagctacaacagcaccgaggaaatcgacctgggacacgtggccttctccaactgcacctccatcaccaacgtgacaggccctatctgcgccgtgaatggcagcgtgttcctgtgtggcaacaacatggcctacacctacctgcctaccaactggaccggactgtgcgtgctggctacactgctgcctgacatcgacatcatccctggcgacgagcccgtgcctattcctgccatcgaccacttcatctacagacccaagcgggctatccagttcatcccactgctggccggactgggaatcaccgccgcttttacaacaggcgctacaggactgggcgtgtccgtgacacagtacaccaagcttagcaaccagctgatctccgacgtgcagatcctgagcagcaccatccaggacctccaggatcaggtggactctctggccgaagtggtgctccagaacagaagaggactggacctgctgacagccgagcaaggcggaatttgtctggccctgcaagagaagtgctgcttctacgtgaacaagagcggcatcgtgcgcgacaagatcaagacactgcaagaggaactggaacggcggagaaaggacctggcctccaatcctctgtggaccggcctgcaaggactgctcccttacctgctgcctttcctgggaccactgctgactctgctgctcctgctgaccatcggaccctgcatcttcaacagactgaccgccttcatcaacgacaagctgaacatcatccacgctatgggatccactagtccagtgtggtggaattctgcagatatccagcacagtggcggccgctcgagtctagagggcccgaacaaaaactcatctcagaagaggatctga

SEQ ID NO: 110 - DNA, 1692 bp, synthetic construct
  source 1..1692: mol_type = other DNA
atgggctttacgaccaagatcatcttcctgtacaacctggtgctggtgtacgccggcttcgacgatcctagaaaggccatcgagctggtgcagaagagatacggcagaccctgcgattgctctggcggccaagtttctgagcctcctagcgacagagtgtcccaagtgacctgtagcggcaagaccgcctacctgatgcctgaccagagatggaagtgcaagagcatccccaaggacacaagccctagcggccctctgcaagagtgcccctgtaatagctaccagagcagcgtgcacagctcctgctacacaagctaccagcagtgcagaagcggcaacaagacctactacaccgccacactgctgaaaacccagaccggcggcacatccgatgttcaggtgctgggcagcaccaacaagctgattcagagcccctgcaacggcatcaagggccagagcatctgctggtccacaacagcccctatccacgtgtcagatggcggcggacctctggacaccaccagaatcaagagcgtgcagcggaagctggaagagatccacaaggctctgtaccccgaactccagtatcaccctctggctatccccaaagtgcgggacaacctgatggtggacgcccagacactgaatatcctgaacgccacctacaatctgctgctgatgagcaacaccagcctggtggacgattgctggctgtgcctgaaactgggacctcctacacctctggcaattcccaacttcctgctgagctacgtgaccagaagcagcgacaacatcagctgcctgattatcccacctctgctcgtgcagcccatgcagttcagcaactcctcctgcctgttcagccccagctacaacagcaccgaggaaatcgacctgggacacgtggccttctccaactgcacctccatcaccaacgtgacaggccctatctgcgccgtgaatggcagcgtgttcctgtgtggcaacaacatggcctacacctacctgcctaccaactggaccggactgtgcgtgctggctacactgctgcctgacatcgacatcatccctggcgacgagcccgtgcctattcctgccatcgaccacttcatctacagacccaagcgggctatccagttcatcccactgctggccggactgggaatcaccgccgcttttacaacaggcgctacaggactgggcgtgtccgtgacacagtacaccaagctgagcaaccagctgatctccgacgtgcagatcctgagcagcaccatccaggacctccaggatcaggtggactctctggccgaagtggtgctccagaacagaagaggactggacctgctgacagccgagcaaggcggaatttgtctggccctgcaagagaagtgctgcttctacgtgaacaagagcggcatcgtgcgcgacaagcttaagacactgcaagaggaactggaacggcggagaaaggacctggcctccaatcctctgtggaccggcctgcaaggactgctcccttacctgctgcctttcctgggaccactgctgactctgctgctcctgctgaccatcggaccctgcatcttcaacagactgaccgccttcatcaacgacaagctgaacatcatccacgctatggtgctgacacagcagtaccaggtgctgcggacagatgaggaagcccaggattga

SEQ ID NO: 111 - DNA, 1638 bp, synthetic construct
  source 1..1638: mol_type = other DNA
atgggctttacgaccaagatcatcttcctgtacaacctggtgctggtgtacgccggcttcgacgatcctagaaaggccatcgagctggtgcagaagagatacggcagaccctgcgattgctctggcggccaagtttctgagcctcctagcgacagagtgtcccaagtgacctgtagcggcaagaccgcctacctgatgcctgaccagagatggaagtgcaagagcatccccaaggacacaagccctagcggccctctgcaagagtgcccctgtaatagctaccagagcagcgtgcacagctcctgctacacaagctaccagcagtgcagaagcggcaacaagacctactacaccgccacactgctgaaaacccagaccggcggcacatccgatgttcaggtgctgggcagcaccaacaagctgattcagagcccctgcaacggcatcaagggccagagcatctgctggtccacaacagcccctatccacgtgtcagatggcggcggacctctggacaccaccagaatcaagagcgtgcagcggaagctggaagagatccacaaggctctgtaccccgaactccagtatcaccctctggctatccccaaagtgcgggacaacctgatggtggacgcccagacactgaatatcctgaacgccacctacaatctgctgctgatgagcaacaccagcctggtggacgattgctggctgtgcctgaaactgggacctcctacacctctggcaattcccaacttcctgctgagctacgtgaccagaagcagcgacaacatcagctgcctgattatcccacctctgctcgtgcagcccatgcagttcagcaactcctcctgcctgttcagccccagctacaacagcaccgaggaaatcgacctgggacacgtggccttctccaactgcacctccatcaccaacgtgacaggccctatctgcgccgtgaatggcagcgtgttcctgtgtggcaacaacatggcctacacctacctgcctaccaactggaccggactgtgcgtgctggctacactgctgcctgacatcgacatcatccctggcgacgagcccgtgcctattcctgccatcgaccacttcatctacagacccaagcgggctatccagttcatcccactgctggccggactgggaatcaccgccgcttttacaacaggcgctacaggactgggcgtgtccgtgacacagtacaccaagctttctcaagaactaaatggggacatggaacgggtcgccgactccctggtcaccttgcaagatcaacttaactccctagcagcagtagtccttcaaaatcgaagagctttagacttgctaaccgctgaaagagggggaacctgtttatttttaggggaagaatgctgttattatgttaatcaatccggaatcgtcactgagaaagttaaagaaattcgagatcgaatacaacgtagagcagaggagctccgaaacactggaccctggggcctcctcagccaatggatgccctggattctccccttcttaggacctctagcagctataatattgctactcctctttggaccctgtatctttaacctccttgttaactttgtctcttccagaatcgaagctgtaaaactataa

SEQ ID NO: 112 - DNA, 1659 bp, synthetic construct
  source 1..1659: mol_type = other DNA
atgggctttacgaccaagatcatcttcctgtacaacctggtgctggtgtacgccggcttcgacgatcctagaaaggccatcgagctggtgcagaagagatacggcagaccctgcgattgctctggcggccaagtttctgagcctcctagcgacagagtgtcccaagtgacctgtagcggcaagaccgcctacctgatgcctgaccagagatggaagtgcaagagcatccccaaggacacaagccctagcggccctctgcaagagtgcccctgtaatagctaccagagcagcgtgcacagctcctgctacacaagctaccagcagtgcagaagcggcaacaagacctactacaccgccacactgctgaaaacccagaccggcggcacatccgatgttcaggtgctgggcagcaccaacaagctgattcagagcccctgcaacggcatcaagggccagagcatctgctggtccacaacagcccctatccacgtgtcagatggcggcggacctctggacaccaccagaatcaagagcgtgcagcggaagctggaagagatccacaaggctctgtaccccgaactccagtatcaccctctggctatccccaaagtgcgggacaacctgatggtggacgcccagacactgaatatcctgaacgccacctacaatctgctgctgatgagcaacaccagcctggtggacgattgctggctgtgcctgaaactgggacctcctacacctctggcaattcccaacttcctgctgagctacgtgaccagaagcagcgacaacatcagctgcctgattatcccacctctgctcgtgcagcccatgcagttcagcaactcctcctgcctgttcagccccagctacaacagcaccgaggaaatcgacctgggacacgtggccttctccaactgcacctccatcaccaacgtgacaggccctatctgcgccgtgaatggcagcgtgttcctgtgtggcaacaacatggcctacacctacctgcctaccaactggaccggactgtgcgtgctggctacactgctgcctgacatcgacatcatccctggcgacgagcccgtgcctattcctgccatcgaccacttcatctacagacccaagcgggctatccagttcatcccactgctggccggactgggaatcaccgccgcttttacaacaggcgctacaggactgggcgtgtccgtgacacagtacaccaagctgagcaaccagctgatctccgacgtgcagatcctgagcagcaccatccaggacctccaggatcaggtggactctctggccgaagtggtgctccagaacagaagaggactggacctgctgacagccgagcaaggcggaatttgtctggccctgcaagagaagtgctgcttctacgtgaacaagagcggcatcgtgcgcgacaagcttaagacactgcaagaggaactggaacggcggagaaaggacctggcctccaatcctctgtggaccggcctgcaaggactgctcccttacctgctgcctttcctgggaccactgctgactctgctgctcctgctgaccatcggaccctgcatcttcaacagactgaccgccttcatcaacgacaagctgaacatcatccacgctatggtgctgacacagcagtactaa

SEQ ID NO: 113 - DNA, 1686 bp, synthetic construct
  source 1..1686: mol_type = other DNA
atgggattcacaacaaagataatcttcttatacaacctagtactggtctacgcggggtttgacgaccctcgcaaagccatagaactagtacaaaagcgatatggccgaccatgcgattgcagcggaggacaagtgtccgagcccccgtcagacagggtcagtcaagtgacttgctcaggcaagacagcttacttaatgcccgaccaaagatggaaatgtaagtcaattccaaaagacacctccccaagcgggccactccaagagtgcccctgtaattcttaccagtcctcagtacacagttcttgttatacctcataccaacaatgcagatcaggcaataagacatattatacggctactctgctaaaaacacaaactgggggcaccagtgatgtacaagtattaggatccaccaacaaacttatacaatctccctgtaatggcataaaagggcagtctatttgctggagcactacagctcctatccacgtctctgatggaggaggtccattagacaccacaagaattaaaagtgttcagagaaaactggaagaaattcataaagccctatatcctgaacttcagtatcaccctttggccatacctaaggttagagataacctcatggtcgatgcccagactttaaacattctcaatgccacttacaacttactcctaatgtccaacacgagcctagtggacgactgttggctttgtttaaaattaggtccccctactcccctcgcaatacctaacttcctattatcctacgtgactcgctcctcggataatatctcttgtttaataattcccccccttctagttcaaccgatgcagttttccaattcatcttgcctcttttccccctcctacaacagtacagaagaaatagatctaggccatgttgccttcagcaactgtacctccataaccaatgtcaccggtcccatatgcgctgtaaatggttcggtctttctctgtggcaataacatggcatacacttatctacccacgaactggacggggctttgcgtcctagcaactctcctccccgacattgacatcattcccggagatgaaccggtccccatccctgctattgatcattttatatatagacctaaacgggccatacagtttattcctttactagcagggctagggatcaccgcagccttcacaacaggagctacaggcctaggtgtctctgtgacccaatatacaaaattatctaatcagctaatttctgatgtacaaatcttatctagcaccatacaagatctgcaagatcaagtagactcattagccgaagtggttctccagaacagaagggggctagatctacttacagcagaacaaggaggaatctgtttagccctgcaagaaaaatgctgcttttatgttaacaagtcagggattgtgagagacaaaataaaaaccttacaagaagaactagaaagacgtagaaaagatctagcttccaacccactttggactgggcttcaagggctcctcccttacctcctgccctttcttggccctctacttaccctcctgctcttactcaccattgggccgtgcatttttaaccgtctagtccagttcgttaaggatagaatatctgtcgtccaagcacttgtcctgacgcagcagtaccatcaattgaagccgttggagtacgagcca

SEQ ID NO: 114 - DNA, 90 bp, synthetic construct
  source 1..90: mol_type = other DNA
gtccagttcgttaaggatagaatatctgtcgtccaagcacttgtcctgacgcagcagtaccatcaattgaagccgttggagtacgagcca

SEQ ID NO: 115 - DNA, 1644 bp, synthetic construct
  source 1..1644: mol_type = other DNA
atgggctttacgaccaagatcatcttcctgtacaacctggtgctggtgtacgccggcttcgacgatcctagaaaggccatcgagctggtgcagaagagatacggcagaccctgcgattgctctggcggccaagtttctgagcctcctagcgacagagtgtcccaagtgacctgtagcggcaagaccgcctacctgatgcctgaccagagatggaagtgcaagagcatccccaaggacacaagccctagcggccctctgcaagagtgcccctgtaatagctaccagagcagcgtgcacagctcctgctacacaagctaccagcagtgcagaagcggcaacaagacctactacaccgccacactgctgaaaacccagaccggcggcacatccgatgttcaggtgctgggcagcaccaacaagctgattcagagcccctgcaacggcatcaagggccagagcatctgctggtccacaacagcccctatccacgtgtcagatggcggcggacctctggacaccaccagaatcaagagcgtgcagcggaagctggaagagatccacaaggctctgtaccccgaactccagtatcaccctctggctatccccaaagtgcgggacaacctgatggtggacgcccagacactgaatatcctgaacgccacctacaatctgctgctgatgagcaacaccagcctggtggacgattgctggctgtgcctgaaactgggacctcctacacctctggcaattcccaacttcctgctgagctacgtgaccagaagcagcgacaacatcagctgcctgattatcccacctctgctcgtgcagcccatgcagttcagcaactcctcctgcctgttcagccccagctacaacagcaccgaggaaatcgacctgggacacgtggccttctccaactgcacctccatcaccaacgtgacaggccctatctgcgccgtgaatggcagcgtgttcctgtgtggcaacaacatggcctacacctacctgcctaccaactggaccggactgtgcgtgctggctacactgctgcctgacatcgacatcatccctggcgacgagcccgtgcctattcctgccatcgaccacttcatctacagacccaagcgggctatccagttcatcccactgctggccggactgggaatcaccgccgcttttacaacaggcgctacaggactgggcgtgtccgtgacacagtacaccaagctgagcaaccagctgatctccgacgtgcagatcctgagcagcaccatccaggacctccaggatcaggtggactctctggccgaagtggtgctccagaacagaagaggactggacctgctgacagccgagcaaggcggaatttgtctggccctgcaagagaagtgctgcttctacgtgaacaagagcggcatcgtgcgcgacaagatcaagacactgcaagaggaactggaacggcggagaaaggacctggcctccaatcctctgtggaccggcctgcaaggactgctcccttacctgctgcctttcctgggaccactgctgactctgctgctcctgctgaccatcggaccctgcatcttcaacagactgaccgccttcatcaacgacaagctgaacatcatccacgctatgccataa

SEQ ID NO: 116 - DNA, 1740 bp, synthetic construct
  source 1..1740: mol_type = other DNA
atgggctttacgaccaagatcatcttcctgtacaacctggtgctggtgtacgccggcttcgacgatcctagaaaggccatcgagctggtgcagaagagatacggcagaccctgcgattgctctggcggccaagtttctgagcctcctagcgacagagtgtcccaagtgacctgtagcggcaagaccgcctacctgatgcctgaccagagatggaagtgcaagagcatccccaaggacacaagccctagcggccctctgcaagagtgcccctgtaatagctaccagagcagcgtgcacagctcctgctacacaagctaccagcagtgcagaagcggcaacaagacctactacaccgccacactgctgaaaacccagaccggcggcacatccgatgttcaggtgctgggcagcaccaacaagctgattcagagcccctgcaacggcatcaagggccagagcatctgctggtccacaacagcccctatccacgtgtcagatggcggcggacctctggacaccaccagaatcaagagcgtgcagcggaagctggaagagatccacaaggctctgtaccccgaactccagtatcaccctctggctatccccaaagtgcgggacaacctgatggtggacgcccagacactgaatatcctgaacgccacctacaatctgctgctgatgagcaacaccagcctggtggacgattgctggctgtgcctgaaactgggacctcctacacctctggcaattcccaacttcctgctgagctacgtgaccagaagcagcgacaacatcagctgcctgattatcccacctctgctcgtgcagcccatgcagttcagcaactcctcctgcctgttcagccccagctacaacagcaccgaggaaatcgacctgggacacgtggccttctccaactgcacctccatcaccaacgtgacaggccctatctgcgccgtgaatggcagcgtgttcctgtgtggcaacaacatggcctacacctacctgcctaccaactggaccggactgtgcgtgctggctacactgctgcctgacatcgacatcatccctggcgacgagcccgtgcctattcctgccatcgaccacttcatctacagacccaagcgggctatccagttcatcccactgctggccggactgggaatcaccgccgcttttacaacaggcgctacaggactgggcgtgtccgtgacacagtacaccaagctgagcaaccagctgatctccgacgtgcagatcctgagcagcaccatccaggacctccaggatcaggtggactctctggccgaagtggtgctccagaacagaagaggactggacctgctgacagccgagcaaggcggaatttgtctggccctgcaagagaagtgctgcttctacgtgaacaagagcggcatcgtgcgcgacaagatcaagacactgcaagaggaactggaacggcggagaaaggacctggcctccaatcctctgtggaccggcctgcaaggactgctcccttacctgctgcctttcctgggaccactgctgactctgctgctcctgctgaccatcggaccctgcatcttcaacagactgaccgccttcatcaacgacaagctgaacatcatccacgctggatccactagtccagtgtggtggaattctgcagatatccagcacagtggcggccgctcgagtctagagggcccgaacaaaaactcatctcagaagaggatctga

SEQ ID NO: 117 - DNA, 1737 bp, synthetic construct
  source 1..1737: mol_type = other DNA
atgggctttacgaccaagatcatcttcctgtacaacctggtgctggtgtacgccggcttcgacgatcctagaaaggccatcgagctggtgcagaagagatacggcagaccctgcgattgctctggcggccaagtttctgagcctcctagcgacagagtgtcccaagtgacctgtagcggcaagaccgcctacctgatgcctgaccagagatggaagtgcaagagcatccccaaggacacaagccctagcggccctctgcaagagtgcccctgtaatagctaccagagcagcgtgcacagctcctgctacacaagctaccagcagtgcagaagcggcaacaagacctactacaccgccacactgctgaaaacccagaccggcggcacatccgatgttcaggtgctgggcagcaccaacaagctgattcagagcccctgcaacggcatcaagggccagagcatctgctggtccacaacagcccctatccacgtgtcagatggcggcggacctctggacaccaccagaatcaagagcgtgcagcggaagctggaagagatccacaaggctctgtaccccgaactccagtatcaccctctggctatccccaaagtgcgggacaacctgatggtggacgcccagacactgaatatcctgaacgccacctacaatctgctgctgatgagcaacaccagcctggtggacgattgctggctgtgcctgaaactgggacctcctacacctctggcaattcccaacttcctgctgagctacgtgaccagaagcagcgacaacatcagctgcctgattatcccacctctgctcgtgcagcccatgcagttcagcaactcctcctgcctgttcagccccagctacaacagcaccgaggaaatcgacctgggacacgtggccttctccaactgcacctccatcaccaacgtgacaggccctatctgcgccgtgaatggcagcgtgttcctgtgtggcaacaacatggcctacacctacctgcctaccaactggaccggactgtgcgtgctggctacactgctgcctgacatcgacatcatccctggcgacgagcccgtgcctattcctgccatcgaccacttcatctacagacccaagcgggctatccagttcatcccactgctggccggactgggaatcaccgccgcttttacaacaggcgctacaggactgggcgtgtccgtgacacagtacaccaagctgagcaaccagctgatctccgacgtgcagatcctgagcagcaccatccaggacctccaggatcaggtggactctctggccgaagtggtgctccagaacagaagaggactggacctgctgacagccgagcaaggcggaatttgtctggccctgcaagagaagtgctgcttctacgtgaacaagagcggcatcgtgcgcgacaagatcaagacactgcaagaggaactggaacggcggagaaaggacctggcctccaatcctctgtggaccggcctgcaaggactgctcccttacctgctgcctttcctgggaccactgctgactctgctgctcctgctgaccatcggaccctgcatcttcaacagactgaccgccttcatcaacgacaagctgaacatcatccacggatccactagtccagtgtggtggaattctgcagatatccagcacagtggcggccgctcgagtctagagggcccgaacaaaaactcatctcagaagaggatctga

SEQ ID NO: 118 - DNA, 1734 bp, synthetic construct
  source 1..1734: mol_type = other DNA
atgggctttacgaccaagatcatcttcctgtacaacctggtgctggtgtacgccggcttcgacgatcctagaaaggccatcgagctggtgcagaagagatacggcagaccctgcgattgctctggcggccaagtttctgagcctcctagcgacagagtgtcccaagtgacctgtagcggcaagaccgcctacctgatgcctgaccagagatggaagtgcaagagcatccccaaggacacaagccctagcggccctctgcaagagtgcccctgtaatagctaccagagcagcgtgcacagctcctgctacacaagctaccagcagtgcagaagcggcaacaagacctactacaccgccacactgctgaaaacccagaccggcggcacatccgatgttcaggtgctgggcagcaccaacaagctgattcagagcccctgcaacggcatcaagggccagagcatctgctggtccacaacagcccctatccacgtgtcagatggcggcggacctctggacaccaccagaatcaagagcgtgcagcggaagctggaagagatccacaaggctctgtaccccgaactccagtatcaccctctggctatccccaaagtgcgggacaacctgatggtggacgcccagacactgaatatcctgaacgccacctacaatctgctgctgatgagcaacaccagcctggtggacgattgctggctgtgcctgaaactgggacctcctacacctctggcaattcccaacttcctgctgagctacgtgaccagaagcagcgacaacatcagctgcctgattatcccacctctgctcgtgcagcccatgcagttcagcaactcctcctgcctgttcagccccagctacaacagcaccgaggaaatcgacctgggacacgtggccttctccaactgcacctccatcaccaacgtgacaggccctatctgcgccgtgaatggcagcgtgttcctgtgtggcaacaacatggcctacacctacctgcctaccaactggaccggactgtgcgtgctggctacactgctgcctgacatcgacatcatccctggcgacgagcccgtgcctattcctgccatcgaccacttcatctacagacccaagcgggctatccagttcatcccactgctggccggactgggaatcaccgccgcttttacaacaggcgctacaggactgggcgtgtccgtgacacagtacaccaagctgagcaaccagctgatctccgacgtgcagatcctgagcagcaccatccaggacctccaggatcaggtggactctctggccgaagtggtgctccagaacagaagaggactggacctgctgacagccgagcaaggcggaatttgtctggccctgcaagagaagtgctgcttctacgtgaacaagagcggcatcgtgcgcgacaagatcaagacactgcaagaggaactggaacggcggagaaaggacctggcctccaatcctctgtggaccggcctgcaaggactgctcccttacctgctgcctttcctgggaccactgctgactctgctgctcctgctgaccatcggaccctgcatcttcaacagactgaccgccttcatcaacgacaagctgaacatcatcggatccactagtccagtgtggtggaattctgcagatatccagcacagtggcggccgctcgagtctagagggcccgaacaaaaactcatctcagaagaggatctga

SEQ ID NO: 119 - DNA, 1731 bp, synthetic construct
  source 1..1731: mol_type = other DNA
atgggctttacgaccaagatcatcttcctgtacaacctggtgctggtgtacgccggcttcgacgatcctagaaaggccatcgagctggtgcagaagagatacggcagaccctgcgattgctctggcggccaagtttctgagcctcctagcgacagagtgtcccaagtgacctgtagcggcaagaccgcctacctgatgcctgaccagagatggaagtgcaagagcatccccaaggacacaagccctagcggccctctgcaagagtgcccctgtaatagctaccagagcagcgtgcacagctcctgctacacaagctaccagcagtgcagaagcggcaacaagacctactacaccgccacactgctgaaaacccagaccggcggcacatccgatgttcaggtgctgggcagcaccaacaagctgattcagagcccctgcaacggcatcaagggccagagcatctgctggtccacaacagcccctatccacgtgtcagatggcggcggacctctggacaccaccagaatcaagagcgtgcagcggaagctggaagagatccacaaggctctgtaccccgaactccagtatcaccctctggctatccccaaagtgcgggacaacctgatggtggacgcccagacactgaatatcctgaacgccacctacaatctgctgctgatgagcaacaccagcctggtggacgattgctggctgtgcctgaaactgggacctcctacacctctggcaattcccaacttcctgctgagctacgtgaccagaagcagcgacaacatcagctgcctgattatcccacctctgctcgtgcagcccatgcagttcagcaactcctcctgcctgttcagccccagctacaacagcaccgaggaaatcgacctgggacacgtggccttctccaactgcacctccatcaccaacgtgacaggccctatctgcgccgtgaatggcagcgtgttcctgtgtggcaacaacatggcctacacctacctgcctaccaactggaccggactgtgcgtgctggctacactgctgcctgacatcgacatcatccctggcgacgagcccgtgcctattcctgccatcgaccacttcatctacagacccaagcgggctatccagttcatcccactgctggccggactgggaatcaccgccgcttttacaacaggcgctacaggactgggcgtgtccgtgacacagtacaccaagctgagcaaccagctgatctccgacgtgcagatcctgagcagcaccatccaggacctccaggatcaggtggactctctggccgaagtggtgctccagaacagaagaggactggacctgctgacagccgagcaaggcggaatttgtctggccctgcaagagaagtgctgcttctacgtgaacaagagcggcatcgtgcgcgacaagatcaagacactgcaagaggaactggaacggcggagaaaggacctggcctccaatcctctgtggaccggcctgcaaggactgctcccttacctgctgcctttcctgggaccactgctgactctgctgctcctgctgaccatcggaccctgcatcttcaacagactgaccgccttcatcaacgacaagctgaacatcggatccactagtccagtgtggtggaattctgcagatatccagcacagtggcggccgctcgagtctagagggcccgaacaaaaactcatctcagaagaggatctga

SEQ ID NO: 120 - DNA, 1728 bp, synthetic construct
  source 1..1728: mol_type = other DNA
atgggctttacgaccaagatcatcttcctgtacaacctggtgctggtgtacgccggcttcgacgatcctagaaaggccatcgagctggtgcagaagagatacggcagaccctgcgattgctctggcggccaagtttctgagcctcctagcgacagagtgtcccaagtgacctgtagcggcaagaccgcctacctgatgcctgaccagagatggaagtgcaagagcatccccaaggacacaagccctagcggccctctgcaagagtgcccctgtaatagctaccagagcagcgtgcacagctcctgctacacaagctaccagcagtgcagaagcggcaacaagacctactacaccgccacactgctgaaaacccagaccggcggcacatccgatgttcaggtgctgggcagcaccaacaagctgattcagagcccctgcaacggcatcaagggccagagcatctgctggtccacaacagcccctatccacgtgtcagatggcggcggacctctggacaccaccagaatcaagagcgtgcagcggaagctggaagagatccacaaggctctgtaccccgaactccagtatcaccctctggctatccccaaagtgcgggacaacctgatggtggacgcccagacactgaatatcctgaacgccacctacaatctgctgctgatgagcaacaccagcctggtggacgattgctggctgtgcctgaaactgggacctcctacacctctggcaattcccaacttcctgctgagctacgtgaccagaagcagcgacaacatcagctgcctgattatcccacctctgctcgtgcagcccatgcagttcagcaactcctcctgcctgttcagccccagctacaacagcaccgaggaaatcgacctgggacacgtggccttctccaactgcacctccatcaccaacgtgacaggccctatctgcgccgtgaatggcagcgtgttcctgtgtggcaacaacatggcctacacctacctgcctaccaactggaccggactgtgcgtgctggctacactgctgcctgacatcgacatcatccctggcgacgagcccgtgcctattcctgccatcgaccacttcatctacagacccaagcgggctatccagttcatcccactgctggccggactgggaatcaccgccgcttttacaacaggcgctacaggactgggcgtgtccgtgacacagtacaccaagctgagcaaccagctgatctccgacgtgcagatcctgagcagcaccatccaggacctccaggatcaggtggactctctggccgaagtggtgctccagaacagaagaggactggacctgctgacagccgagcaaggcggaatttgtctggccctgcaagagaagtgctgcttctacgtgaacaagagcggcatcgtgcgcgacaagatcaagacactgcaagaggaactggaacggcggagaaaggacctggcctccaatcctctgtggaccggcctgcaaggactgctcccttacctgctgcctttcctgggaccactgctgactctgctgctcctgctgaccatcggaccctgcatcttcaacagactgaccgccttcatcaacgacaagctgaacggatccactagtccagtgtggtggaattctgcagatatccagcacagtggcggccgctcgagtctagagggcccgaacaaaaactcatctcagaagaggatctga

SEQ ID NO: 121 - DNA, 1725 bp, synthetic construct
  source 1..1725: mol_type = other DNA
atgggctttacgaccaagatcatcttcctgtacaacctggtgctggtgtacgccggcttcgacgatcctagaaaggccatcgagctggtgcagaagagatacggcagaccctgcgattgctctggcggccaagtttctgagcctcctagcgacagagtgtcccaagtgacctgtagcggcaagaccgcctacctgatgcctgaccagagatggaagtgcaagagcatccccaaggacacaagccctagcggccctctgcaagagtgcccctgtaatagctaccagagcagcgtgcacagctcctgctacacaagctaccagcagtgcagaagcggcaacaagacctactacaccgccacactgctgaaaacccagaccggcggcacatccgatgttcaggtgctgggcagcaccaacaagctgattcagagcccctgcaacggcatcaagggccagagcatctgctggtccacaacagcccctatccacgtgtcagatggcggcggacctctggacaccaccagaatcaagagcgtgcagcggaagctggaagagatccacaaggctctgtaccccgaactccagtatcaccctctggctatccccaaagtgcgggacaacctgatggtggacgcccagacactgaatatcctgaacgccacctacaatctgctgctgatgagcaacaccagcctggtggacgattgctggctgtgcctgaaactgggacctcctacacctctggcaattcccaacttcctgctgagctacgtgaccagaagcagcgacaacatcagctgcctgattatcccacctctgctcgtgcagcccatgcagttcagcaactcctcctgcctgttcagccccagctacaacagcaccgaggaaatcgacctgggacacgtggccttctccaactgcacctccatcaccaacgtgacaggccctatctgcgccgtgaatggcagcgtgttcctgtgtggcaacaacatggcctacacctacctgcctaccaactggaccggactgtgcgtgctggctacactgctgcctgacatcgacatcatccctggcgacgagcccgtgcctattcctgccatcgaccacttcatctacagacccaagcgggctatccagttcatcccactgctggccggactgggaatcaccgccgcttttacaacaggcgctacaggactgggcgtgtccgtgacacagtacaccaagctgagcaaccagctgatctccgacgtgcagatcctgagcagcaccatccaggacctccaggatcaggtggactctctggccgaagtggtgctccagaacagaagaggactggacctgctgacagccgagcaaggcggaatttgtctggccctgcaagagaagtgctgcttctacgtgaacaagagcggcatcgtgcgcgacaagatcaagacactgcaagaggaactggaacggcggagaaaggacctggcctccaatcctctgtggaccggcctgcaaggactgctcccttacctgctgcctttcctgggaccactgctgactctgctgctcctgctgaccatcggaccctgcatcttcaacagactgaccgccttcatcaacgacaagctgggatccactagtccagtgtggtggaattctgcagatatccagcacagtggcggccgctcgagtctagagggcccgaacaaaaactcatctcagaagaggatctga

SEQ ID NO: 122 - DNA, 1722 bp, synthetic construct
  source 1..1722: mol_type = other DNA
atgggctttacgaccaagatcatcttcctgtacaacctggtgctggtgtacgccggcttcgacgatcctagaaaggccatcgagctggtgcagaagagatacggcagaccctgcgattgctctggcggccaagtttctgagcctcctagcgacagagtgtcccaagtgacctgtagcggcaagaccgcctacctgatgcctgaccagagatggaagtgcaagagcatccccaaggacacaagccctagcggccctctgcaagagtgcccctgtaatagctaccagagcagcgtgcacagctcctgctacacaagctaccagcagtgcagaagcggcaacaagacctactacaccgccacactgctgaaaacccagaccggcggcacatccgatgttcaggtgctgggcagcaccaacaagctgattcagagcccctgcaacggcatcaagggccagagcatctgctggtccacaacagcccctatccacgtgtcagatggcggcggacctctggacaccaccagaatcaagagcgtgcagcggaagctggaagagatccacaaggctctgtaccccgaactccagtatcaccctctggctatccccaaagtgcgggacaacctgatggtggacgcccagacactgaatatcctgaacgccacctacaatctgctgctgatgagcaacaccagcctggtggacgattgctggctgtgcctgaaactgggacctcctacacctctggcaattcccaacttcctgctgagctacgtgaccagaagcagcgacaacatcagctgcctgattatcccacctctgctcgtgcagcccatgcagttcagcaactcctcctgcctgttcagccccagctacaacagcaccgaggaaatcgacctgggacacgtggccttctccaactgcacctccatcaccaacgtgacaggccctatctgcgccgtgaatggcagcgtgttcctgtgtggcaacaacatggcctacacctacctgcctaccaactggaccggactgtgcgtgctggctacactgctgcctgacatcgacatcatccctggcgacgagcccgtgcctattcctgccatcgaccacttcatctacagacccaagcgggctatccagttcatcccactgctggccggactgggaatcaccgccgcttttacaacaggcgctacaggactgggcgtgtccgtgacacagtacaccaagctgagcaaccagctgatctccgacgtgcagatcctgagcagcaccatccaggacctccaggatcaggtggactctctggccgaagtggtgctccagaacagaagaggactggacctgctgacagccgagcaaggcggaatttgtctggccctgcaagagaagtgctgcttctacgtgaacaagagcggcatcgtgcgcgacaagatcaagacactgcaagaggaactggaacggcggagaaaggacctggcctccaatcctctgtggaccggcctgcaaggactgctcccttacctgctgcctttcctgggaccactgctgactctgctgctcctgctgaccatcggaccctgcatcttcaacagactgaccgccttcatcaacgacaagggatccactagtccagtgtggtggaattctgcagatatccagcacagtggcggccgctcgagtctagagggcccgaacaaaaactcatctcagaagaggatctga

SEQ ID NO: 123 - DNA, 1617 bp, Homo sapiens; identical to SEQ ID NO: 41
  source 1..1617: mol_type = unassigned DNA

SEQ ID NO: 124 - DNA, 60 bp, synthetic construct
  source 1..60: mol_type = other DNA
atggccctcccttatcatatttttctctttactgttcttttaccctctttcactctcact

SEQ ID NO: 125 - DNA, 1269 bp, synthetic construct
  source 1..1269: mol_type = other DNA
gcaccccctccatgccgctgtatgaccagtagctccccttaccaagagtttctatggagaatgcagcgtcccggaaatattgatgccccatcgtataggagtctttctaagggaacccccaccttcactgcccacacccatatgccccgcaactgctatcactctgccactctttgcatgcatgcaaatactcattattggacaggaaaaatgattaatcctagttgtcctggaggacttggagtcactgtctgttggacttacttcacccaaactggtatgtctgatgggggtggagttcaagatcaggcaagagaaaaacatgtaaaagaagtaatctcccaactcacccgggtacatggcacctctagcccctacaaaggactagatctctcaaaactacatgaaaccctccgtacccatactcgcctggtaagcctatttaataccaccctcactgggctccatgaggtctcggcccaaaaccctactaactgttggatatgcctccccctgaacttcaggccatatgtttcaatccctgtacctgaacaatggaacaacttcagcacagaaataaacaccacttccgttttagtaggacctcttgtttccaatctggaaataacccatacctcaaacctcacctgtgtaaaatttagcaatactacatacacaaccaactcccaatgcatcaggtgggtaactcctcccacacaaatagtctgcctaccctcaggaatattttttgtctgtggaacctcagcctatcgttgtttgaatggctcttcagaatctatgtgcttcctctcattcttagtgccccctatgaccatctacactgaacaagatttatacagttatgtcatatctaagccccgcaacaaaagagtacccattcttccttttgttataggagcaggagtgctaggtgcactaggtactggcattggcggtatcacaacctctactcagttctactacaaactatctcaagaactaaatggggacatggaacgggtcgccgactccctggtcaccttgcaagatcaacttaactccctagcagcagtagtccttcaaaatcgaagagctttagacttgctaaccgctgaaagagggggaacctgtttatttttaggggaagaatgctgttattatgttaatcaatccggaatcgtcactgagaaagttaaagaaattcgagatcgaatacaacgtagagcagaggagctccgaaacactggaccctggggcctcctcagccaa

SEQ ID NO: 126 - DNA, 63 bp, synthetic construct
  source 1..63: mol_type = other DNA
tggatgccctggattctccccttcttaggacctctagcagctataatattgctactcctcttt

SEQ ID NO: 127 - DNA, 222 bp, synthetic construct
  source 1..222: mol_type = other DNA
ggaccctgtatctttaacctccttgttaactttgtctcttccagaatcgaagctgtaaaactacaaatggagcccaagatgcagtccaagactaagatctaccgcagacccctggaccggcctgccagcccacgatctgatgttaatgacatcaaaggcacccctcctgaggaaatctcagctgcacaacctctactacgccccaattcagcaggaagcagt

SEQ ID NO: 128 - DNA, 1392 bp, synthetic construct
  source 1..1392: mol_type = other DNA
atggccctcccttatcatatttttctctttactgttcttttaccctctttcactctcactgcaccccctccatgccgctgtatgaccagtagctccccttaccaagagtttctatggagaatgcagcgtcccggaaatattgatgccccatcgtataggagtctttctaagggaacccccaccttcactgcccacacccatatgccccgcaactgctatcactctgccactctttgcatgcatgcaaatactcattattggacaggaaaaatgattaatcctagttgtcctggaggacttggagtcactgtctgttggacttacttcacccaaactggtatgtctgatgggggtggagttcaagatcaggcaagagaaaaacatgtaaaagaagtaatctcccaactcacccgggtacatggcacctctagcccctacaaaggactagatctctcaaaactacatgaaaccctccgtacccatactcgcctggtaagcctatttaataccaccctcactgggctccatgaggtctcggcccaaaaccctactaactgttggatatgcctccccctgaacttcaggccatatgtttcaatccctgtacctgaacaatggaacaacttcagcacagaaataaacaccacttccgttttagtaggacctcttgtttccaatctggaaataacccatacctcaaacctcacctgtgtaaaatttagcaatactacatacacaaccaactcccaatgcatcaggtgggtaactcctcccacacaaatagtctgcctaccctcaggaatattttttgtctgtggaacctcagcctatcgttgtttgaatggctcttcagaatctatgtgcttcctctcattcttagtgccccctatgaccatctacactgaacaagatttatacagttatgtcatatctaagccccgcaacaaaagagtacccattcttccttttgttataggagcaggagtgctaggtgcactaggtactggcattggcggtatcacaacctctactcagttctactacaaactatctcaagaactaaatggggacatggaacgggtcgccgactccctggtcaccttgcaagatcaacttaactccctagcagcagtagtccttcaaaatcgaagagctttagacttgctaaccgctgaaagagggggaacctgtttatttttaggggaagaatgctgttattatgttaatcaatccggaatcgtcactgagaaagttaaagaaattcgagatcgaatacaacgtagagcagaggagctccgaaacactggaccctggggcctcctcagccaatggatgccctggattctccccttcttaggacctctagcagctataatattgctactcctcttt

SEQ ID NO: 129 - DNA, 1620 bp, synthetic construct; identical to SEQ ID NO: 43
  source 1..1620: mol_type = other DNA

SEQ ID NO: 130 - DNA, 63 bp, synthetic construct
  source 1..63: mol_type = other DNA
atggagacagacacactcctgctatgggtactgctgctctgggttccaggttccactggtgac

SEQ ID NO: 131 - DNA, 1269 bp, synthetic construct
  source 1..1269: mol_type = other DNA
gcaccccctccatgccgctgtatgacaagcagcagcccctaccaagagttcctgtggcgaatgcagaggcccggcaacattgacgcccctagctacagaagcctgagcaagggcacccctaccttcacagcccacacacacatgccccggaactgctaccatagcgccacactgtgtatgcacgccaacacacactactggaccggcaagatgattaaccctagctgccctggcggcctgggcgtgacagtttgttggacctactttacccagaccggcatgtccgatggtggcggagttcaagaccaggccagagaaaagcacgtgaaagaagtgatctcccagctgaccagagtgcacggcacaagcagcccttacaaaggactggacctgtccaagctgcacgagacactgagaacccacacacggctggtgtccctgttcaacaccacactgaccggactgcacgaggtgtccgctcagaatcctaccaactgctggatctgcctgcctctgaacttcagaccctacgtgtcaatccccgtgcctgagcagtggaacaacttcagcaccgagatcaataccaccagcgtgctcgtgggacccctggtgtccaatctggaaatcacccacaccagcaacctgacctgcgtgaagttctccaacaccacctacaccaccaacagccagtgcatcagatgggtcacccctccaacacagatcgtgtgtctgcccagcggcatcttcttcgtgtgtggcacaagcgcctaccgctgcctgaatggcagcagcgagtctatgtgcttcctgagcttcctggtgcctcctatgaccatctacaccgagcaggacctgtacagctacgtgatctccaagcctcggaacaagcgggtgcccatcctgccttttgtgattggagctggcgtgctgggagccctcggaactggaatcggaggcatcaccacctctactcagttctactacaaactatctcaagaactaaatggggacatggaaagagtggccgacagcctggtcacactccaggaccagctcaattctctggctgccgtggtgctccagaatcggagagcactcgatctgctgacagccgagagaggcggcacctgtctgtttctgggcgaagagtgctgctactacgtgaaccagtccggaatcgtcactgagaaagttaaagaaattcgagatcgaatccagcggagagccgaggaactgagaaacacaggaccttggggcctgctgagccag

SEQ ID NO: 132 - DNA, 63 bp, synthetic construct
  source 1..63: mol_type = other DNA
tggatgccttggattctgcccttcctgggacctctggccgccatcattctgctgctgctgttc

SEQ ID NO: 133 - DNA, 222 bp, synthetic construct
  source 1..222: mol_type = other DNA
ggcccctgtatctttaacctccttgttaactttgtctcttccagaatcgaagctgtaaaactacaaatggagcccaagatgcagtccaagactaagatctaccgcagacccctggaccggcctgccagcccacgatctgatgttaatgacatcaaaggcacccctcctgaggaaatctcagctgcacaacctctactacgccccaattcagcaggaagcagt

SEQ ID NO: 134 - DNA, 1470 bp, synthetic construct
  source 1..1470: mol_type = other DNA
atggccctcccttatcatatttttctctttactgttcttttaccctctttcactctcactgcaccccctccatgccgctgtatgaccagtagctccccttaccaagagtttctatggagaatgcagcgtcccggaaatattgatgccccatcgtataggagtctttctaagggaacccccaccttcactgcccacacccatatgccccgcaactgctatcactctgccactctttgcatgcatgcaaatactcattattggacaggaaaaatgattaatcctagttgtcctggaggacttggagtcactgtctgttggacttacttcacccaaactggtatgtctgatgggggtggagttcaagatcaggcaagagaaaaacatgtaaaagaagtaatctcccaactcacccgggtacatggcacctctagcccctacaaaggactagatctctcaaaactacatgaaaccctccgtacccatactcgcctggtaagcctatttaataccaccctcactgggctccatgaggtctcggcccaaaaccctactaactgttggatatgcctccccctgaacttcaggccatatgtttcaatccctgtacctgaacaatggaacaacttcagcacagaaataaacaccacttccgttttagtaggacctcttgtttccaatctggaaataacccatacctcaaacctcacctgtgtaaaatttagcaatactacatacacaaccaactcccaatgcatcaggtgggtaactcctcccacacaaatagtctgcctaccctcaggaatattttttgtctgtggaacctcagcctatcgttgtttgaatggctcttcagaatctatgtgcttcctctcattcttagtgccccctatgaccatctacactgaacaagatttatacagttatgtcatatctaagccccgcaacaaaagagtacccattcttccttttgttataggagcaggagtgctaggtgcactaggtactggcattggcggtatcacaacctctactcagttctactacaaactatctcaagaactaaatggggacatggaacgggtcgccgactccctggtcaccttgcaagatcaacttaactccctagcagcagtagtccttcaaaatcgaagagctttagacttgctaaccgctgaaagagggggaacctgtttatttttaggggaagaatgctgttattatgttaatcaatccggaatcgtcactgagaaagttaaagaaattcgagatcgaatacaacgtagagcagaggagctccgaaacactggaccctggggcctcctcagccaatggatgccctggattctccccttcttaggacctctagcagctataatattgctactcctctttggaccctgtatctttaacctccttgttaactttgtctcttccagaatcgaagctgtaaaactacaaatggagccctaa

SEQ ID NO: 135 - DNA, 1464 bp, synthetic construct
  source 1..1464: mol_type = other DNA
atggccctcccttatcatatttttctctttactgttcttttaccctctttcactctcactgcaccccctccatgccgctgtatgaccagtagctccccttaccaagagtttctatggagaatgcagcgtcccggaaatattgatgccccatcgtataggagtctttctaagggaacccccaccttcactgcccacacccatatgccccgcaactgctatcactctgccactctttgcatgcatgcaaatactcattattggacaggaaaaatgattaatcctagttgtcctggaggacttggagtcactgtctgttggacttacttcacccaaactggtatgtctgatgggggtggagttcaagatcaggcaagagaaaaacatgtaaaagaagtaatctcccaactcacccgggtacatggcacctctagcccctacaaaggactagatctctcaaaactacatgaaaccctccgtacccatactcgcctggtaagcctatttaataccaccctcactgggctccatgaggtctcggcccaaaaccctactaactgttggatatgcctccccctgaacttcaggccatatgtttcaatccctgtacctgaacaatggaacaacttcagcacagaaataaacaccacttccgttttagtaggacctcttgtttccaatctggaaataacccatacctcaaacctcacctgtgtaaaatttagcaatactacatacacaaccaactcccaatgcatcaggtgggtaactcctcccacacaaatagtctgcctaccctcaggaatattttttgtctgtggaacctcagcctatcgttgtttgaatggctcttcagaatctatgtgcttcctctcattcttagtgccccctatgaccatctacactgaacaagatttatacagttatgtcatatctaagccccgcaacaaaagagtacccattcttccttttgttataggagcaggagtgctaggtgcactaggtactggcattggcggtatcacaacctctactcagttctactacaaactatctcaagaactaaatggggacatggaacgggtcgccgactccctggtcaccttgcaagatcaacttaactccctagcagcagtagtccttcaaaatcgaagagctttagacttgctaaccgctgaaagagggggaacctgtttatttttaggggaagaatgctgttattatgttaatcaatccggaatcgtcactgagaaagttaaagaaattcgagatcgaatacaacgtagagcagaggagctccgaaacactggaccctggggcctcctcagccaatggatgccctggattctccccttcttaggacctctagcagctataatattgctactcctctttggaccctgtatctttaacctccttgttaactttgtctcttccagaatcgaagctgtaaaactacaaatgtaa

SEQ ID NO: 136 - DNA, 1467 bp, synthetic construct
  source 1..1467: mol_type = other DNA
atggccctcccttatcatatttttctctttactgttcttttaccctctttcactctcactgcaccccctccatgccgctgtatgaccagtagctccccttaccaagagtttctatggagaatgcagcgtcccggaaatattgatgccccatcgtataggagtctttctaagggaacccccaccttcactgcccacacccatatgccccgcaactgctatcactctgccactctttgcatgcatgcaaatactcattattggacaggaaaaatgattaatcctagttgtcctggaggacttggagtcactgtctgttggacttacttcacccaaactggtatgtctgatgggggtggagttcaagatcaggcaagagaaaaacatgtaaaagaagtaatctcccaactcacccgggtacatggcacctctagcccctacaaaggactagatctctcaaaactacatgaaaccctccgtacccatactcgcctggtaagcctatttaataccaccctcactgggctccatgaggtctcggcccaaaaccctactaactgttggatatgcctccccctgaacttcaggccatatgtttcaatccctgtacctgaacaatggaacaacttcagcacagaaataaacaccacttccgttttagtaggacctcttgtttccaatctggaaataacccatacctcaaacctcacctgtgtaaaatttagcaatactacatacacaaccaactcccaatgcatcaggtgggtaactcctcccacacaaatagtctgcctaccctcaggaatattttttgtctgtggaacctcagcctatcgttgtttgaatggctcttcagaatctatgtgcttcctctcattcttagtgccccctatgaccatctacactgaacaagatttatacagttatgtcatatctaagccccgcaacaaaagagtacccattcttccttttgttataggagcaggagtgctaggtgcactaggtactggcattggcggtatcacaacctctactcagttctactacaaactatctcaagaactaaatggggacatggaacgggtcgccgactccctggtcaccttgcaagatcaacttaactccctagcagcagtagtccttcaaaatcgaagagctttagacttgctaaccgctgaaagagggggaacctgtttatttttaggggaagaatgctgttattatgttaatcaatccggaatcgtcactgagaaagttaaagaaattcgagatcgaatacaacgtagagcagaggagctccgaaacactggaccctggggcctcctcagccaatggatgccctggattctccccttcttaggacctctagcagctataatattgctactcctctttggaccctgtatctttaacctccttgttaactttgtctcttccagaatcgaagctgtaaaactacaaatggagtaa

SEQ ID NO: 137 - DNA, 1473 bp, synthetic construct
  source 1..1473: mol_type = other DNA
atggccctcccttatcatatttttctctttactgttcttttaccctctttcactctcactgcaccccctccatgccgctgtatgaccagtagctccccttaccaagagtttctatggagaatgcagcgtcccggaaatattgatgccccatcgtataggagtctttctaagggaacccccaccttcactgcccacacccatatgccccgcaactgctatcactctgccactctttgcatgcatgcaaatactcattattggacaggaaaaatgattaatcctagttgtcctggaggacttggagtcactgtctgttggacttacttcacccaaactggtatgtctgatgggggtggagttcaagatcaggcaagagaaaaacatgtaaaagaagtaatctcccaactcacccgggtacatggcacctctagcccctacaaaggactagatctctcaaaactacatgaaaccctccgtacccatactcgcctggtaagcctatttaataccaccctcactgggctccatgaggtctcggcccaaaaccctactaactgttggatatgcctccccctgaacttcaggccatatgtttcaatccctgtacctgaacaatggaacaacttcagcacagaaataaacaccacttccgttttagtaggacctcttgtttccaatctggaaataacccatacctcaaacctcacctgtgtaaaatttagcaatactacatacacaaccaactcccaatgcatcaggtgggtaactcctcccacacaaatagtctgcctaccctcaggaatattttttgtctgtggaacctcagcctatcgttgtttgaatggctcttcagaatctatgtgcttcctctcattcttagtgccccctatgaccatctacactgaacaagatttatacagttatgtcatatctaagccccgcaacaaaagagtacccattcttccttttgttataggagcaggagtgctaggtgcactaggtactggcattggcggtatcacaacctctactcagttctactacaaactatctcaagaactaaatggggacatggaacgggtcgccgactccctggtcaccttgcaagatcaacttaactccctagcagcagtagtccttcaaaatcgaagagctttagacttgctaaccgctgaaagagggggaacctgtttatttttaggggaagaatgctgttattatgttaatcaatccggaatcgtcactgagaaagttaaagaaattcgagatcgaatacaacgtagagcagaggagctccgaaacactggaccctggggcctcctcagccaatggatgccctggattctccccttcttaggacctctagcagctataatattgctactcctctttggaccctgtatctttaacctccttgttaactttgtctcttccagaatcgaagctgtaaaactacaaatggagcccaagtaa

SEQ ID NO: 138 - DNA, 1461 bp, synthetic construct
  source 1..1461: mol_type = other DNA
atggccctcccttatcatatttttctctttactgttcttttaccctctttcactctcactgcaccccctccatgccgctgtatgaccagtagctccccttaccaagagtttctatggagaatgcagcgtcccggaaatattgatgccccatcgtataggagtctttctaagggaacccccaccttcactgcccacacccatatgccccgcaactgctatcactctgccactctttgcatgcatgcaaatactcattattggacaggaaaaatgattaatcctagttgtcctggaggacttggagtcactgtctgttggacttacttcacccaaactggtatgtctgatgggggtggagttcaagatcaggcaagagaaaaacatgtaaaagaagtaatctcccaactcacccgggtacatggcacctctagcccctacaaaggactagatctctcaaaactacatgaaaccctccgtacccatactcgcctggtaagcctatttaataccaccctcactgggctccatgaggtctcggcccaaaaccctactaactgttggatatgcctccccctgaacttcaggccatatgtttcaatccctgtacctgaacaatggaacaacttcagcacagaaataaacaccacttccgttttagtaggacctcttgtttccaatctggaaataacccatacctcaaacctcacctgtgtaaaatttagcaatactacatacacaaccaactcccaatgcatcaggtgggtaactcctcccacacaaatagtctgcctaccctcaggaatattttttgtctgtggaacctcagcctatcgttgtttgaatggctcttcagaatctatgtgcttcctctcattcttagtgccccctatgaccatctacactgaacaagatttatacagttatgtcatatctaagccccgcaacaaaagagtacccattcttccttttgttataggagcaggagtgctaggtgcactaggtactggcattggcggtatcacaacctctactcagttctactacaaactatctcaagaactaaatggggacatggaacgggtcgccgactccctggtcaccttgcaagatcaacttaactccctagcagcagtagtccttcaaaatcgaagagctttagacttgctaaccgctgaaagagggggaacctgtttatttttaggggaagaatgctgttattatgttaatcaatccggaatcgtcactgagaaagttaaagaaattcgagatcgaatacaacgtagagcagaggagctccgaaacactggaccctggggcctcctcagccaatggatgccctggattctccccttcttaggacctctagcagctataatattgctactcctctttggaccctgtatctttaacctccttgttaactttgtctcttccagaatcgaagctgtaaaactacaataa

SEQ ID NO: 139 - DNA, 1458 bp, synthetic construct
  source 1..1458: mol_type = other DNA
atggccctcccttatcatatttttctctttactgttcttttaccctctttcactctcactgcaccccctccatgccgctgtatgaccagtagctccccttaccaagagtttctatggagaatgcagcgtcccggaaatattgatgccccatcgtataggagtctttctaagggaacccccaccttcactgcccacacccatatgccccgcaactgctatcactctgccactctttgcatgcatgcaaatactcattattggacaggaaaaatgattaatcctagttgtcctggaggacttggagtcactgtctgttggacttacttcacccaaactggtatgtctgatgggggtggagttcaagatcaggcaagagaaaaacatgtaaaagaagtaatctcccaactcacccgggtacatggcacctctagcccctacaaaggactagatctctcaaaactacatgaaaccctccgtacccatactcgcctggtaagcctatttaataccaccctcactgggctccatgaggtctcggcccaaaaccctactaactgttggatatgcctccccctgaacttcaggccatatgtttcaatccctgtacctgaacaatggaacaacttcagcacagaaataaacaccacttccgttttagtaggacctcttgtttccaatctggaaataacccatacctcaaacctcacctgtgtaaaatttagcaatactacatacacaaccaactcccaatgcatcaggtgggtaactcctcccacacaaatagtctgcctaccctcaggaatattttttgtctgtggaacctcagcctatcgttgtttgaatggctcttcagaatctatgtgcttcctctcattcttagtgccccctatgaccatctacactgaacaagatttatacagttatgtcatatctaagccccgcaacaaaagagtacccattcttccttttgttataggagcaggagtgctaggtgcactaggtactggcattggcggtatcacaacctctactcagttctactacaaactatctcaagaactaaatggggacatggaacgggtcgccgactccctggtcaccttgcaagatcaacttaactccctagcagcagtagtccttcaaaatcgaagagctttagacttgctaaccgctgaaagagggggaacctgtttatttttaggggaagaatgctgttattatgttaatcaatccggaatcgtcactgagaaagttaaagaaattcgagatcgaatacaacgtagagcagaggagctccgaaacactggaccctggggcctcctcagccaatggatgccctggattctccccttcttaggacctctagcagctataatattgctactcctctttggaccctgtatctttaacctccttgttaactttgtctcttccagaatcgaagctgtaaaactataa

SEQ ID NO: 140 - DNA, 1560 bp, synthetic construct
  source 1..1560: mol_type = other DNA
atggccctcccttatcatatttttctctttactgttcttttaccctctttcactctcactgcaccccctccatgccgctgtatgaccagtagctccccttaccaagagtttctatggagaatgcagcgtcccggaaatattgatgccccatcgtataggagtctttctaagggaacccccaccttcactgcccacacccatatgccccgcaactgctatcactctgccactctttgcatgcatgcaaatactcattattggacaggaaaaatgattaatcctagttgtcctggaggacttggagtcactgtctgttggacttacttcacccaaactggtatgtctgatgggggtggagttcaagatcaggcaagagaaaaacatgtaaaagaagtaatctcccaactcacccgggtacatggcacctctagcccctacaaaggactagatctctcaaaactacatgaaaccctccgtacccatactcgcctggtaagcctatttaataccaccctcactgggctccatgaggtctcggcccaaaaccctactaactgttggatatgcctccccctgaacttcaggccatatgtttcaatccctgtacctgaacaatggaacaacttcagcacagaaataaacaccacttccgttttagtaggacctcttgtttccaatctggaaataacccatacctcaaacctcacctgtgtaaaatttagcaatactacatacacaaccaactcccaatgcatcaggtgggtaactcctcccacacaaatagtctgcctaccctcaggaatattttttgtctgtggaacctcagcctatcgttgtttgaatggctcttcagaatctatgtgcttcctctcattcttagtgccccctatgaccatctacactgaacaagatttatacagttatgtcatatctaagccccgcaacaaaagagtacccattcttccttttgttataggagcaggagtgctaggtgcactaggtactggcattggcggtatcacaacctctactcagttctactacaaactatctcaagaactaaatggggacatggaacgggtcgccgactccctggtcaccttgcaagatcaacttaactccctagcagcagtagtccttcaaaatcgaagagctttagacttgctaaccgctgaaagagggggaacctgtttatttttaggggaagaatgctgttattatgttaatcaatccggaatcgtcactgagaaagttaaagaaattcgagatcgaatacaacgtagagcagaggagctccgaaacactggaccctggggcctcctcagccaatggatgccctggattctccccttcttaggacctctagcagctataatattgctactcctctttggaccctgtatctttaacctccttgttaactttgtctcttccagaatcgaagctgtaaaactaggatccactagtccagtgtggtggaattctgcagatatccagcacagtggcggccgctcgagtctagagggcccgaacaaaaactcatctcagaagaggatctga

SEQ ID NO: 141 - DNA, 1563 bp, synthetic construct
  source 1..1563: mol_type = other DNA
atggagacagacacactcctgctatgggtactgctgctctgggttccaggttccactggtgacgcaccccctccatgccgctgtatgacaagcagcagcccctaccaagagttcctgtggcgaatgcagaggcccggcaacattgacgcccctagctacagaagcctgagcaagggcacccctaccttcacagcccacacacacatgccccggaactgctaccatagcgccacactgtgtatgcacgccaacacacactactggaccggcaagatgattaaccctagctgccctggcggcctgggcgtgacagtttgttggacctactttacccagaccggcatgtccgatggtggcggagttcaagaccaggccagagaaaagcacgtgaaagaagtgatctcccagctgaccagagtgcacggcacaagcagcccttacaaaggactggacctgtccaagctgcacgagacactgagaacccacacacggctggtgtccctgttcaacaccacactgaccggactgcacgaggtgtccgctcagaatcctaccaactgctggatctgcctgcctctgaacttcagaccctacgtgtcaatccccgtgcctgagcagtggaacaacttcagcaccgagatcaataccaccagcgtgctcgtgggacccctggtgtccaatctggaaatcacccacaccagcaacctgacctgcgtgaagttctccaacaccacctacaccaccaacagccagtgcatcagatgggtcacccctccaacacagatcgtgtgtctgcccagcggcatcttcttcgtgtgtggcacaagcgcctaccgctgcctgaatggcagcagcgagtctatgtgcttcctgagcttcctggtgcctcctatgaccatctacaccgagcaggacctgtacagctacgtgatctccaagcctcggaacaagcgggtgcccatcctgccttttgtgattggagctggcgtgctgggagccctcggaactggaatcggaggcatcaccacctctactcagttctactacaaactatctcaagaactaaatggggacatggaaagagtggccgacagcctggtcacactccaggaccagctcaattctctggctgccgtggtgctccagaatcggagagcactcgatctgctgacagccgagagaggcggcacctgtctgtttctgggcgaagagtgctgctactacgtgaaccagtccggaatcgtcactgagaaagttaaagaaattcgagatcgaatccagcggagagccgaggaactgagaaacacaggaccttggggcctgctgagccagtggatgccttggattctgcccttcctgggacctctggccgccatcattctgctgctgctgttcggcccctgtatctttaacctccttgttaactttgtctcttccagaatcgaagctgtaaaactaggatccactagtccagtgtggtggaattctgcagatatccagcacagtggcggccgctcgagtctagagggcccgaacaaaaactcatctcagaagaggatctga

SEQ ID NO: 142 - DNA, 1446 bp, synthetic construct
  source 1..1446: mol_type = other DNA
atggagacagacacactcctgctatgggtactgctgctctgggttccaggttccactggtgacgcaccccctccatgccgctgtatgacaagcagcagcccctaccaagagttcctgtggcgaatgcagaggcccggcaacattgacgcccctagctacagaagcctgagcaagggcacccctaccttcacagcccacacacacatgccccggaactgctaccatagcgccacactgtgtatgcacgccaacacacactactggaccggcaagatgattaaccctagctgccctggcggcctgggcgtgacagtttgttggacctactttacccagaccggcatgtccgatggtggcggagttcaagaccaggccagagaaaagcacgtgaaagaagtgatctcccagctgaccagagtgcacggcacaagcagcccttacaaaggactggacctgtccaagctgcacgagacactgagaacccacacacggctggtgtccctgttcaacaccacactgaccggactgcacgaggtgtccgctcagaatcctaccaactgctggatctgcctgcctctgaacttcagaccctacgtgtcaatccccgtgcctgagcagtggaacaacttcagcaccgagatcaataccaccagcgtgctcgtgggacccctggtgtccaatctggaaatcacccacaccagcaacctgacctgcgtgaagttctccaacaccacctacaccaccaacagccagtgcatcagatgggtcacccctccaacacagatcgtgtgtctgcccagcggcatcttcttcgtgtgtggcacaagcgcctaccgctgcctgaatggcagcagcgagtctatgtgcttcctgagcttcctggtgcctcctatgaccatctacaccgagcaggacctgtacagctacgtgatctccaagcctcggaacaagcgggtgcccatcctgccttttgtgattggagctggcgtgctgggagccctcggaactggaatcggaggcatcaccacctctactcagttctactacaaactatctcaagaactaaatggggacatggaaagagtggccgacagcctggtcacactccaggaccagctcaattctctggctgccgtggtgctccagaatcggagagcactcgatctgctgacagccgagagaggcggcacctgtctgtttctgggcgaagagtgctgctactacgtgaaccagtccggaatcgtcactgagaaagttaaagaaattcgagatcgaatccagcggagagccgaggaactgagaaacacaggaccttggggcctgctgagccagtggatgccttggattctgcccttcctgggacctctggccgccatcattctgctgctgctgttcggcccctgtatctttaacctccttgttaactttgtctcttccagaatctaa

SEQ ID NO: 143 - DNA, 1455 bp, synthetic construct
  source 1..1455: mol_type = other DNA
atggagacagacacactcctgctatgggtactgctgctctgggttccaggttccactggtgacgcaccccctccatgccgctgtatgacaagcagcagcccctaccaagagttcctgtggcgaatgcagaggcccggcaacattgacgcccctagctacagaagcctgagcaagggcacccctaccttcacagcccacacacacatgccccggaactgctaccatagcgccacactgtgtatgcacgccaacacacactactggaccggcaagatgattaaccctagctgccctggcggcctgggcgtgacagtttgttggacctactttacccagaccggcatgtccgatggtggcggagttcaagaccaggccagagaaaagcacgtgaaagaagtgatctcccagttgaccagagtgcacggcacaagcagcccttacaaaggactggacctgtccaagctgcacgagacactgagaacccacacacggctggtgtccctgttcaacaccacactgaccggactgcacgaggtgtccgctcagaatcctaccaactgctggatctgcctgcctctgaacttcagaccctacgtgtcaatccccgtgcctgagcagtggaacaacttcagcaccgagatcaataccaccagcgtgctcgtgggacccctggtgtccaatctggaaatcacccacaccagcaacctgacctgcgtgaagttctccaacaccacctacaccaccaacagccagtgcatcagatgggtcacccctccaacacagatcgtgtgtctgcccagcggcatcttcttcgtgtgtggcacaagcgcctaccgctgcctgaatggcagcagcgagtctatgtgcttcctgagcttcctggtgcctcctatgaccatctacaccgagcaggacctgtacagctacgtgatctccaagcctcggaacaagcgggtgcccatcctgccttttgtgattggagctggcgtgctgggagccctcggaactggaatcggaggcatcaccacctctactcagttctactacaaactatctcaagaactaaatggggacatggaaagagtggccgacagcctggtcacactccaggaccagctcaattctctggctgccgtggtgctccagaatcggagagcactcgatctgctgacagccgagagaggcggcacctgtctgtttctgggcgaagagtgctgctactacgtgaaccagtccggaatcgtcactgagaaagttaaagaaattcgagatcgaatccagcggagagccgaggaactgagaaacacaggaccttggggcctgctgagccagtggatgccttggattctgcccttcctgggacctctggccgccatcattctgctgctgctgttcggcccctgtatctttaacctccttgttaactttgtctcttccagaatcgaagctgtataa

SEQ ID NO: 144 - DNA, 1455 bp, synthetic construct
  source 1..1455: mol_type = other DNA
atggagacagacacactcctgctatgggtactgctgctctgggttccaggttccactggtgacgcaccccctccatgccgctgtatgacaagcagcagcccctaccaagagttcctgtggcgaatgcagaggcccggcaacattgacgcccctagctacagaagcctgagcaagggcacccctaccttcacagcccacacacacatgccccggaactgctaccatagcgccacactgtgtatgcacgccaacacacactactggaccggcaagatgattaaccctagctgccctggcggcctgggcgtgacagtttgttggacctactttacccagaccggcatgtccgatggtggcggagttcaagaccaggccagagaaaagcacgtgaaagaagtgatctcccagctgaccagagtgcacggcacaagcagcccttacaaaggactggacctgtccaagctgcacgagacactgagaacccacacacggctggtgtccctgttcaacaccacactgaccggactgcacgaggtgtccgctcagaatcctaccaactgctggatctgcctgcctctgaacttcagaccctacgtgtcaatccccgtgcctgagcagtggaacaacttcagcaccgagatcaataccaccagcgtgctcgtgggacccctggtgtccaatctggaaatcacccacaccagcaacctgacctgcgtgaagttctccaacaccacctacaccaccaacagccagtgcatcagatgggtcacccctccaacacagatcgtgtgtctgcccagcggcatcttcttcgtgtgtggcacaagcgcctaccgctgcctgaatggcagcagcgagtctatgtgcttcctgagcttcctggtgcctcctatgaccatctacaccgagcaggacctgtacagctacgtgatctccaagcctcggaacaagcgggtgcccatcctgccttttgtgattggagctggcgtgctgggagccctcggaactggaatcggaggcatcaccacctctactcagttctactacaaactatctcaagaactaaatggggacatggaaagagtggccgacagcctggtcacactccaggaccagctcaattctctggctgccgtggtgctccagaatcggagagcactcgatctgctgacagccgagagaggcggcacctgtctgtttctgggcgaagagtgctgctactacgtgaaccagtccggaatcgtcactgagaaagttaaagaaattcgagatcgaatccagcggagagccgaggaactgagaaacacaggaccttggggcctgctgagccagtggatgccttggattctgcccttcctgggacctctggccgccatcattctgctgctgctgttcggcccctgtatctttaacctccttgttaactttgtctcttccagaatcgaagctgtataa

SEQ ID NO: 145 - DNA, 1458 bp, synthetic construct
  source 1..1458: mol_type = other DNA
atggagacagacacactcctgctatgggtactgctgctctgggttccaggttccactggtgacgcaccccctccatgccgctgtatgacaagcagcagcccctaccaagagttcctgtggcgaatgcagaggcccggcaacattgacgcccctagctacagaagcctgagcaagggcacccctaccttcacagcccacacacacatgccccggaactgctaccatagcgccacactgtgtatgcacgccaacacacactactggaccggcaagatgattaaccctagctgccctggcggcctgggcgtgacagtttgttggacctactttacccagaccggcatgtccgatggtggcggagttcaagaccaggccagagaaaagcacgtgaaagaagtgatctcccagctgaccagagtgcacggcacaagcagcccttacaaaggactggacctgtccaagctgcacgagacactgagaacccacacacggctggtgtccctgttcaacaccacactgaccggactgcacgaggtgtccgctcagaatcctaccaactgctggatctgcctgcctctgaacttcagaccctacgtgtcaatccccgtgcctgagcagtggaacaacttcagcaccgagatcaataccaccagcgtgctcgtgggacccctggtgtccaatctggaaatcacccacaccagcaacctgacctgcgtgaagttctccaacaccacctacaccaccaacagccagtgcatcagatgggtcacccctccaacacagatcgtgtgtctgcccagcggcatcttcttcgtgtgtggcacaagcgcctaccgctgcctgaatggcagcagcgagtctatgtgcttcctgagcttcctggtgcctcctatgaccatctacaccgagcaggacctgtacagctacgtgatctccaagcctcggaacaagcgggtgcccatcctgccttttgtgattggagctggcgtgctgggagccctcggaactggaatcggaggcatcaccacctctactcagttctactacaaactatctcaagaactaaatggggacatggaaagagtggccgacagcctggtcacactccaggaccagctcaattctctggctgccgtggtgctccagaatcggagagcactcgatctgctgacagccgagagaggcggcacctgtctgtttctgggcgaagagtgctgctactacgtgaaccagtccggaatcgtcactgagaaagttaaagaaattcgagatcgaatccagcggagagccgaggaactgagaaacacaggaccttggggcctgctgagccagtggatgccttggattctgcccttcctgggacctctggccgccatcattctgctgctgctgttcggcccctgtatctttaacctccttgttaactttgtctcttccagaatcgaagctgtaaaataa

SEQ ID NO: 146 - DNA, 1461 bp, synthetic construct
  source 1..1461: mol_type = other DNA
atggagacagacacactcctgctatgggtactgctgctctgggttccaggttccactggtgacgcaccccctccatgccgctgtatgacaagcagcagcccctaccaagagttcctgtggcgaatgcagaggcccggcaacattgacgcccctagctacagaagcctgagcaagggcacccctaccttcacagcccacacacacatgccccggaactgctaccatagcgccacactgtgtatgcacgccaacacacactactggaccggcaagatgattaaccctagctgccctggcggcctgggcgtgacagtttgttggacctactttacccagaccggcatgtccgatggtggcggagttcaagaccaggccagagaaaagcacgtgaaagaagtgatctcccagctgaccagagtgcacggcacaagcagcccttacaaaggactggacctgtccaagctgcacgagacactgagaacccacacacggctggtgtccctgttcaacaccacactgaccggactgcacgaggtgtccgctcagaatcctaccaactgctggatctgcctgcctctgaacttcagaccctacgtgtcaatccccgtgcctgagcagtggaacaacttcagcaccgagatcaataccaccagcgtgctcgtgggacccctggtgtccaatctggaaatcacccacaccagcaacctgacctgcgtgaagttctccaacaccacctacaccaccaacagccagtgcatcagatgggtcacccctccaacacagatcgtgtgtctgcccagcggcatcttcttcgtgtgtggcacaagcgcctaccgctgcctgaatggcagcagcgagtctatgtgcttcctgagcttcctggtgcctcctatgaccatctacaccgagcaggacctgtacagctacgtgatctccaagcctcggaacaagcgggtgcccatcctgccttttgtgattggagctggcgtgctgggagccctcggaactggaatcggaggcatcaccacctctactcagttctactacaaactatctcaagaactaaatggggacatggaaagagtggccgacagcctggtcacactccaggaccagctcaattctctggctgccgtggtgctccagaatcggagagcactcgatctgctgacagccgagagaggcggcacctgtctgtttctgggcgaagagtgctgctactacgtgaaccagtccggaatcgtcactgagaaagttaaagaaattcgagatcgaatccagcggagagccgaggaactgagaaacacaggaccttggggcctgctgagccagtggatgccttggattctgcccttcctgggacctctggccgccatcattctgctgctgctgttcggcccctgtatctttaacctccttgttaactttgtctcttccagaatcgaagctgtaaaactataa

SEQ ID NO: 147 - DNA, 1464 bp, synthetic construct
  source 1..1464: mol_type = other DNA
atggagacagacacactcctgctatgggtactgctgctctgggttccaggttccactggtgacgcaccccctccatgccgctgtatgacaagcagcagcccctaccaagagttcctgtggcgaatgcagaggcccggcaacattgacgcccctagctacagaagcctgagcaagggcacccctaccttcacagcccacacacacatgccccggaactgctaccatagcgccacactgtgtatgcacgccaacacacactactggaccggcaagatgattaaccctagctgccctggcggcctgggcgtgacagtttgttggacctactttacccagaccggcatgtccgatggtggcggagttcaagaccaggccagagaaaagcacgtgaaagaagtgatctcccagctgaccagagtgcacggcacaagcagcccttacaaaggactggacctgtccaagctgcacgagacactgagaacccacacacggctggtgtccctgttcaacaccacactgaccggactgcacgaggtgtccgctcagaatcctaccaactgctggatctgcctgcctctgaacttcagaccctacgtgtcaatccccgtgcctgagcagtggaacaacttcagcaccgagatcaataccaccagcgtgctcgtgggacccctggtgtccaatctggaaatcacccacaccagcaacctgacctgcgtgaagttctccaacaccacctacaccaccaacagccagtgcatcagatgggtcacccctccaacacagatcgtgtgtctgcccagcggcatcttcttcgtgtgtggcacaagcgcctaccgctgcctgaatggcagcagcgagtctatgtgcttcctgagcttcctggtgcctcctatgaccatctacaccgagcaggacctgtacagctacgtgatctccaagcctcggaacaagcgggtgcccatcctgccttttgtgattggagctggcgtgctgggagccctcggaactggaatcggaggcatcaccacctctactcagttctactacaaactatctcaagaactaaatggggacatggaaagagtggccgacagcctggtcacactccaggaccagctcaattctctggctgccgtggtgctccagaatcggagagcactcgatctgctgacagccgagagaggcggcacctgtctgtttctgggcgaagagtgctgctactacgtgaaccagtccggaatcgtcactgagaaagttaaagaaattcgagatcgaatccagcggagagccgaggaactgagaaacacaggaccttggggcctgctgagccagtggatgccttggattctgcccttcctgggacctctggccgccatcattctgctgctgctgttcggcccctgtatctttaacctccttgttaactttgtctcttccagaatcgaagctgtaaaactacaataa

SEQ ID NO: 148 - DNA, 1467 bp, synthetic construct
  source 1..1467: mol_type = other DNA
atggagacagacacactcctgctatgggtactgctgctctgggttccaggttccactggtgacgcaccccctccatgccgctgtatgacaagcagcagcccctaccaagagttcctgtggcgaatgcagaggcccggcaacattgacgcccctagctacagaagcctgagcaagggcacccctaccttcacagcccacacacacatgccccggaactgctaccatagcgccacactgtgtatgcacgccaacacacactactggaccggcaagatgattaaccctagctgccctggcggcctgggcgtgacagtttgttggacctactttacccagaccggcatgtccgatggtggcggagttcaagaccaggccagagaaaagcacgtgaaagaagtgatctcccagctgaccagagtgcacggcacaagcagcccttacaaaggactggacctgtccaagctgcacgagacactgagaacccacacacggctggtgtccctgttcaacaccacactgaccggactgcacgaggtgtccgctcagaatcctaccaactgctggatctgcctgcctctgaacttcagaccctacgtgtcaatccccgtgcctgagcagtggaacaacttcagcaccgagatcaataccaccagcgtgctcgtgggacccctggtgtccaatctggaaatcacccacaccagcaacctgacctgcgtgaagttctccaacaccacctacaccaccaacagccagtgcatcagatgggtcacccctccaacacagatcgtgtgtctgcccagcggcatcttcttcgtgtgtggcacaagcgcctaccgctgcctgaatggcagcagcgagtctatgtgcttcctgagcttcctggtgcctcctatgaccatctacaccgagcaggacctgtacagctacgtgatctccaagcctcggaacaagcgggtgcccatcctgccttttgtgattggagctggcgtgctgggagccctcggaactggaatcggaggcatcaccacctctactcagttctactacaaactatctcaagaactaaatggggacatggaaagagtggccgacagcctggtcacactccaggaccagctcaattctctggctgccgtggtgctccagaatcggagagcactcgatctgctgacagccgagagaggcggcacctgtctgtttctgggcgaagagtgctgctactacgtgaaccagtccggaatcgtcactgagaaagttaaagaaattcgagatcgaatccagcggagagccgaggaactgagaaacacaggaccttggggcctgctgagccagtggatgccttggattctgcccttcctgggacctctggccgccatcattctgctgctgctgttcggcccctgtatctttaacctccttgttaactttgtctcttccagaatcgaagctgtaaaactacaaatgtaa

SEQ ID NO: 149 - DNA, 1518 bp, synthetic construct
  source 1..1518: mol_type = other DNA
atggagacagacacactcctgctatgggtactgctgctctgggttccaggttccactggtgacgcaccccctccatgccgctgtatgacaagcagcagcccctaccaagagttcctgtggcgaatgcagaggcccggcaacattgacgcccctagctacagaagcctgagcaagggcacccctaccttcacagcccacacacacatgccccggaactgctaccatagcgccacactgtgtatgcacgccaacacacactactggaccggcaagatgattaaccctagctgccctggcggcctgggcgtgacagtttgttggacctactttacccagaccggcatgtccgatggtggcggagttcaagaccaggccagagaaaagcacgtgaaagaagtgatctcccagctgaccagagtgcacggcacaagcagcccttacaaaggactggacctgtccaagctgcacgagacactgagaacccacacacggctggtgtccctgttcaacaccacactgaccggactgcacgaggtgtccgctcagaatcctaccaactgctggatctgcctgcctctgaacttcagaccctacgtgtcaatccccgtgcctgagcagtggaacaacttcagcaccgagatcaataccaccagcgtgctcgtgggacccctggtgtccaatctggaaatcacccacaccagcaacctgacctgcgtgaagttctccaacaccacctacaccaccaacagccagtgcatcagatgggtcacccctccaacacagatcgtgtgtctgcccagcggcatcttcttcgtgtgtggcacaagcgcctaccgctgcctgaatggcagcagcgagtctatgtgcttcctgagcttcctggtgcctcctatgaccatctacaccgagcaggacctgtacagctacgtgatctccaagcctcggaacaagcgggtgcccatcctgccttttgtgattggagctggcgtgctgggagccctcggaactggaatcggaggcatcaccacctctactcagttctactacaaactatctcaagaactaaatggggacatggaaagagtggccgacagcctggtcacactccaggaccagctcaattctctggctgccgtggtgctccagaatcggagagcactcgatctgctgacagccgagagaggcggcacctgtctgtttctgggcgaagagtgctgctactacgtgaaccagtccggaatcgtcactgagaaagttaaagaaattcgagatcgaatccagcggagagccgaggaactgagaaacacaggaccttggggcctgctgagccagtggatgccttggattctgcccttcctgggacctctggccgccatcattctgctgctgctgttcggcccctgtatctttaacctccttgttaactttgtctcttccagaatcgaagctgtaaaactacaaatggagcccaagatgcagtccaagactaagatctaccgcagacccctggaccggtaa

SEQ ID NO: 150 - DNA, 1551 bp, synthetic construct
  source 1..1551: mol_type = other DNA
atggagacagacacactcctgctatgggtactgctgctctgggttccaggttccactggtgacgcaccccctccatgccgctgtatgacaagcagcagcccctaccaagagttcctgtggcgaatgcagaggcccggcaacattgacgcccctagctacagaagcctgagcaagggcacccctaccttcacagcccacacacacatgccccggaactgctaccatagcgccacactgtgtatgcacgccaacacacactactggaccggcaagatgattaaccctagctgccctggcggcctgggcgtgacagtttgttggacctactttacccagaccggcatgtccgatggtggcggagttcaagaccaggccagagaaaagcacgtgaaagaagtgatctcccagctgaccagagtgcacggcacaagcagcccttacaaaggactggacctgtccaagctgcacgagacactgagaacccacacacggctggtgtccctgttcaacaccacactgaccggactgcacgaggtgtccgctcagaatcctaccaactgctggatctgcctgcctctgaacttcagaccctacgtgtcaatccccgtgcctgagcagtggaacaacttcagcaccgagatcaataccaccagcgtgctcgtgggacccctggtgtccaatctggaaatcacccacaccagcaacctgacctgcgtgaagttctccaacaccacctacaccaccaacagccagtgcatcagatgggtcacccctccaacacagatcgtgtgtctgcccagcggcatcttcttcgtgtgtggcacaagcgcctaccgctgcctgaatggcagcagcgagtctatgtgcttcctgagcttcctggtgcctcctatgaccatctacaccgagcaggacctgtacagctacgtgatctccaagcctcggaacaagcgggtgcccatcctgccttttgtgattggagctggcgtgctgggagccctcggaactggaatcggaggcatcaccacctctactcagttctactacaaactatctcaagaactaaatggggacatggaaagagtggccgacagcctggtcacactccaggaccagctcaattctctggctgccgtggtgctccagaatcggagagcactcgatctgctgacagccgagagaggcggcacctgtctgtttctgggcgaagagtgctgctactacgtgaaccagtccggaatcgtcactgagaaagttaaagaaattcgagatcgaatccagcggagagccgaggaactgagaaacacaggaccttggggcctgctgagccagtggatgccttggattctgcccttcctgggacctctggccgccatcattctgctgctgctgttcggcccctgtatctttaacctccttgttaactttgtctcttccagaatcgaagctgtaaaactacaaatggagcccaagatgcagtccaagactaagatctaccgcagacccctggaccggcctgccagcccacgatctgatgttaatgacatctaa

SEQ ID NO: 151 - DNA, 1497 bp, synthetic construct
  source 1..1497: mol_type = other DNA
atggagacagacacactcctgctatgggtactgctgctctgggttccaggttccactggtgacgcaccccctccatgccgctgtatgacaagcagcagcccctaccaagagttcctgtggcgaatgcagaggcccggcaacattgacgcccctagctacagaagcctgagcaagggcacccctaccttcacagcccacacacacatgccccggaactgctaccatagcgccacactgtgtatgcacgccaacacacactactggaccggcaagatgattaaccctagctgccctggcggcctgggcgtgacagtttgttggacctactttacccagaccggcatgtccgatggtggcggagttcaagaccaggccagagaaaagcacgtgaaagaagtgatctcccagctgaccagagtgcacggcacaagcagcccttacaaaggactggacctgtccaagctgcacgagacactgagaacccacacacggctggtgtccctgttcaacaccacactgaccggactgcacgaggtgtccgctcagaatcctaccaactgctggatctgcctgcctctgaacttcagaccctacgtgtcaatccccgtgcctgagcagtggaacaacttcagcaccgagatcaataccaccagcgtgctcgtgggacccctggtgtccaatctggaaatcacccacaccagcaacctgacctgcgtgaagttctccaacaccacctacaccaccaacagccagtgcatcagatgggtcacccctccaacacagatcgtgtgtctgcccagcggcatcttcttcgtgtgtggcacaagcgcctaccgctgcctgaatggcagcagcgagtctatgtgcttcctgagcttcctggtgcctcctatgaccatctacaccgagcaggacctgtacagctacgtgatctccaagcctcggaacaagcgggtgcccatcctgccttttgtgattggagctggcgtgctgggagccctcggaactggaatcggaggcatcaccacctctactcagttctactacaaactatctcaagaactaaatggggacatggaaagagtggccgacagcctggtcacactccaggaccagctcaattctctggctgccgtggtgctccagaatcggagagcactcgatctgctgacagccgagagaggcggcacctgtctgtttctgggcgaagagtgctgctactacgtgaaccagtccggaatcgtcactgagaaagttaaagaaattcgagatcgaatccagcggagagccgaggaactgagaaacacaggaccttggggcctgctgagccagtggatgccttggattctgcccttcctgggacctctggccgccatcattctgctgctgctgttcggcccctgtatctttaacctccttgttaactttgtctcttccagaatcgaagctgtaaaactacaaatggagcccaagatgcagtccaagactaagatctaa

SEQ ID NO: 152 - DNA, 1482 bp, synthetic construct
  source 1..1482: mol_type = other DNA
atggagacagacacactcctgctatgggtactgctgctctgggttccaggttccactggtgacgcaccccctccatgccgctgtatgacaagcagcagcccctaccaagagttcctgtggcgaatgcagaggcccggcaacattgacgcccctagctacagaagcctgagcaagggcacccctaccttcacagcccacacacacatgccccggaactgctaccatagcgccacactgtgtatgcacgccaacacacactactggaccggcaagatgattaaccctagctgccctggcggcctgggcgtgacagtttgttggacctactttacccagaccggcatgtccgatggtggcggagttcaagaccaggccagagaaaagcacgtgaaagaagtgatctcccagctgaccagagtgcacggcacaagcagcccttacaaaggactggacctgtccaagctgcacgagacactgagaacccacacacggctggtgtccctgttcaacaccacactgaccggactgcacgaggtgtccgctcagaatcctaccaactgctggatctgcctgcctctgaacttcagaccctacgtgtcaatccccgtgcctgagcagtggaacaacttcagcaccgagatcaataccaccagcgtgctcgtgggacccctggtgtccaatctggaaatcacccacaccagcaacctgacctgcgtgaagttctccaacaccacctacaccaccaacagccagtgcatcagatgggtcacccctccaacacagatcgtgtgtctgcccagcggcatcttcttcgtgtgtggcacaagcgcctaccgctgcctgaatggcagcagcgagtctatgtgcttcctgagcttcctggtgcctcctatgaccatctacaccgagcaagacctgtacagctacgtgatctccaagcctcggaacaagcgggtgcccatcctgccttttgtgattggagctggcgtgctgggagccctcggaactggaatcggaggcatcaccacctctactcagttctactacaaactatctcaagaactaaatggggacatggaaagagtggccgacagcctggtcacactccaggaccagctcaattctctggctgccgtggtgctccagaatcggagagcactcgatctgctgacagccgagagaggcggcacctgtctgtttctgggcgaagagtgctgctactacgtgaaccagtccggaatcgtcactgagaagcttaagacactgcaagaggaactggaacggcggagaaaggacctggcctccaatcctctgtggaccggcctgcaaggactgctcccttacctgctgcctttcctgggaccactgctgactctgctgctcctgctgaccatcggaccctgcatcttcaacagactgaccgccttcatcaacgacaagctgaacatcatccacgctatggtgctgacacagcagtactaa

SEQ ID NO: 153 - DNA, 1479 bp, synthetic construct
  source 1..1479: mol_type = other DNA
atggagacagacacactcctgctatgggtactgctgctctgggttccaggttccactggtgacgcaccccctccatgccgctgtatgacaagcagcagcccctaccaagagttcctgtggcgaatgcagaggcccggcaacattgacgcccctagctacagaagcctgagcaagggcacccctaccttcacagcccacacacacatgccccggaactgctaccatagcgccacactgtgtatgcacgccaacacacactactggaccggcaagatgattaaccctagctgccctggcggcctgggcgtgacagtttgttggacctactttacccagaccggcatgtccgatggtggcggagttcaagaccaggccagagaaaagcacgtgaaagaagtgatctcccagctgaccagagtgcacggcacaagcagcccttacaaaggactggacctgtccaagctgcacgagacactgagaacccacacacggctggtgtccctgttcaacaccacactgaccggactgcacgaggtgtccgctcagaatcctaccaactgctggatctgcctgcctctgaacttcagaccctacgtgtcaatccccgtgcctgagcagtggaacaacttcagcaccgagatcaataccaccagcgtgctcgtgggacccctggtgtccaatctggaaatcacccacaccagcaacctgacctgcgtgaagttctccaacaccacctacaccaccaacagccagtgcatcagatgggtcacccctccaacacagatcgtgtgtctgcccagcggcatcttcttcgtgtgtggcacaagcgcctaccgctgcctgaatggcagcagcgagtctatgtgcttcctgagcttcctggtgcctcctatgaccatctacaccgagcaggacctgtacagctacgtgatctccaagcctcggaacaagcgggtgcccatcctgccttttgtgattggagctggcgtgctgggagccctcggaactggaatcggaggcatcaccacctctactcagttctactacaaactatctcaagaactaaatggggacatggaaagagtggccgacagcctggtcacactccaggaccagctcaattctctggctgccgtggtgctccagaatcggagagcactcgatctgctgacagccgagagaggcggcacctgtctgtttctgggcgaagagtgctgctactacgtgaaccagtccggaatcgtcactgagaagcttaaagaaattcgagatcgaatccagcggagagccgaggaactgagaaacacaggaccttggggcctgctgcaaggactgctcccttacctgctgcctttcctgggaccactgctgactctgctgctcctgctgaccatcggaccctgcatcttcaacagactgaccgccttcatcaacgacaagctgaacatcatccacgctatggtgctgacacagcagtaa

SEQ ID NO: 154 - DNA, 1485 bp, synthetic construct
  source 1..1485: mol_type = other DNA
atggagacagacacactcctgctatgggtactgctgctctgggttccaggttccactggtgacgcaccccctccatgccgctgtatgacaagcagcagcccctaccaagagttcctgtggcgaatgcagaggcccggcaacattgacgcccctagctacagaagcctgagcaagggcacccctaccttcacagcccacacacacatgccccggaactgctaccatagcgccacactgtgtatgcacgccaacacacactactggaccggcaagatgattaaccctagctgccctggcggcctgggcgtgacagtttgttggacctactttacccagaccggcatgtccgatggtggcggagttcaagaccaggccagagaaaagcacgtgaaagaagtgatctcccagctgaccagagtgcacggcacaagcagcccttacaaaggactggacctgtccaagctgcacgagacactgagaacccacacacggctggtgtccctgttcaacaccacactgaccggactgcacgaggtgtccgctcagaatcctaccaactgctggatctgcctgcctctgaacttcagaccctacgtgtcaatccccgtgcctgagcagtggaacaacttcagcaccgagatcaataccaccagcgtgctcgtgggacccctggtgtccaatctggaaatcacccacaccagcaacctgacctgcgtgaagttctccaacaccacctacaccaccaacagccagtgcatcagatgggtcacccctccaacacagatcgtgtgtctgcccagcggcatcttcttcgtgtgtggcacaagcgcctaccgctgcctgaatggcagcagcgagtctatgtgcttcctgagcttcctggtgcctcctatgaccatctacaccgagcaagacctgtacagctacgtgatctccaagcctcggaacaagcgggtgcccatcctgccttttgtgattggagctggcgtgctgggagccctcggaactggaatcggaggcatcaccacctctactcagttctactacaaactatctcaagaactaaatggggacatggaaagagtggccgacagcctggtcacactccaggaccagctcaattctctggctgccgtggtgctccagaatcggagagcactcgatctgctgacagccgagagaggcggcacctgtctgtttctgggcgaagagtgctgctactacgtgaaccagtccggaatcgtcactgagaagcttaaagaaattcgagatcgaatccagcggagagccgaggaactgagaaacacaggaccttggggcctgctgcaaggactgctcccttacctgctgcctttcctgggaccactgctgactctgctgctcctgctgaccatcggaccctgcatcttcaacagactgaccgccttcatcaacgacaagctgaacatcatccacgctatggtgctgacacagcagtaccagtaa

SEQ ID NO: 155 - DNA, 1491 bp, synthetic construct
  source 1..1491: mol_type = other DNA
atggagacagacacactcctgctatgggtactgctgctctgggttccaggttccactggtgacgcaccccctccatgccgctgtatgacaagcagcagcccctaccaagagttcctgtggcgaatgcagaggcccggcaacattgacgcccctagctacagaagcctgagcaagggcacccctaccttcacagcccacacacacatgccccggaactgctaccatagcgccacactgtgtatgcacgccaacacacactactggaccggcaagatgattaaccctagctgccctggcggcctgggcgtgacagtttgttggacctactttacccagaccggcatgtccgatggtggcggagttcaagaccaggccagagaaaagcacgtgaaagaagtgatctcccagctgaccagagtgcacggcacaagcagcccttacaaaggactggacctgtccaagctgcacgagacactgagaacccacacacggctggtgtccctgttcaacaccacactgaccggactgcacgaggtgtccgctcagaatcctaccaactgctggatctgcctgcctctgaacttcagaccctacgtgtcaatccccgtgcctgagcagtggaacaacttcagcaccgagatcaataccaccagcgtgctcgtgggacccctggtgtccaatctggaaatcacccacaccagcaacctgacctgcgtgaagttctccaacaccacctacaccaccaacagccagtgcatcagatgggtcacccctccaacacagatcgtgtgtctgcccagcggcatcttcttcgtgtgtggcacaagcgcctaccgctgcctgaatggcagcagcgagtctatgtgcttcctgagcttcctggtgcctcctatgaccatctacaccgagcaggacctgtacagctacgtgatctccaagcctcggaacaagcgggtgcccatcctgccttttgtgattggagctggcgtgctgggagccctcggaactggaatcggaggcatcaccacctctactcagttctactacaaactatctcaagaactaaatggggacatggaaagagtggccgacagcctggtcacactccaggaccagctcaattctctggctgccgtggtgctccagaatcggagagcactcgatctgctgacagccgagagaggcggcacctgtctgtttctgggcgaagagtgctgctactacgtgaaccagtccggaatcgtcactgagaagcttaaagaaattcgagatcgaatccagcggagaagaaaggacctggcctccaatcctctgtggaccggcctgcaaggactgctcccttacctgctgcctttcctgggaccactgctgactctgctgctcctgctgaccatcggaccctgcatcttcaacagactgaccgccttcatcaacgacaagctgaacatcatccacgctatggtgctgacacagcagtaccaggtgctgtaa

SEQ ID NO: 156 - DNA, 1485 bp, synthetic construct
  source 1..1485: mol_type = other DNA
atggagacagacacactcctgctatgggtactgctgctctgggttccaggttccactggtgacgcaccccctccatgccgctgtatgacaagcagcagcccctaccaagagttcctgtggcgaatgcagaggcccggcaacattgacgcccctagctacagaagcctgagcaagggcacccctaccttcacagcccacacacacatgccccggaactgctaccatagcgccacactgtgtatgcacgccaacacacactactggaccggcaagatgattaaccctagctgccctggcggcctgggcgtgacagtttgttggacctactttacccagaccggcatgtccgatggtggcggagttcaagaccaggccagagaaaagcacgtgaaagaagtgatctcccagctgaccagagtgcacggcacaagcagcccttacaaaggactggacctgtccaagctgcacgagacactgagaacccacacacggctggtgtccctgttcaacaccacactgaccggactgcacgaggtgtccgctcagaatcctaccaactgctggatctgcctgcctctgaacttcagaccctacgtgtcaatccccgtgcctgagcagtggaacaacttcagcaccgagatcaataccaccagcgtgctcgtgggacccctggtgtccaatctggaaatcacccacaccagcaacctgacctgcgtgaagttctccaacaccacctacaccaccaacagccagtgcatcagatgggtcacccctccaacacagatcgtgtgtctgcccagcggcatcttcttcgtgtgtggcacaagcgcctaccgctgcctgaatggcagcagcgagtctatgtgcttcctgagcttcctggtgcctcctatgaccatctacaccgagcaggacctgtacagctacgtgatctccaagcctcggaacaagcgggtgcccatcctgccttttgtgattggagctggcgtgctgggagccctcggaactggaatcggaggcatcaccacctctactcagttctactacaaactatctcaagaactaaatggggacatggaaagagtggccgacagcctggtcacactccaggaccagctcaattctctggctgccgtggtgctccagaatcggagagcactcgatctgctgacagccgagagaggcggcacctgtctgtttctgggcgaagagtgctgctactacgtgaaccagtccggaatcgtcactgagaagcttaaagaaattcgagatcgaatccagcggagagccgaggaactgagaaacacaggaccttggggcctgctgagccagtggatgccttggattctgcccttcctgggacctctggccgccatcattctgctgctgctgttcggaccctgcatcttcaacagactgaccgccttcatcaacgacaagctgaacatcatccacgctatggtgctgacacagcagtaccagtaa

SEQ ID NO: 157 - DNA, 1515 bp, synthetic construct
  source 1..1515: mol_type = other DNA
atggagacagacacactcctgctatgggtactgctgctctgggttccaggttccactggtgacgcaccccctccatgccgctgtatgacaagcagcagcccctaccaagagttcctgtggcgaatgcagaggcccggcaacattgacgcccctagctacagaagcctgagcaagggcacccctaccttcacagcccacacacacatgccccggaactgctaccatagcgccacactgtgtatgcacgccaacacacactactggaccggcaagatgattaaccctagctgccctggcggcctgggcgtgacagtttgttggacctactttacccagaccggcatgtccgatggtggcggagttcaagaccaggccagagaaaagcacgtgaaagaagtgatctcccagctgaccagagtgcacggcacaagcagcccttacaaaggactggacctgtccaagctgcacgagacactgagaacccacacacggctggtgtccctgttcaacaccacactgaccggactgcacgaggtgtccgctcagaatcctaccaactgctggatctgcctgcctctgaacttcagaccctacgtgtcaatccccgtgcctgagcagtggaacaacttcagcaccgagatcaataccaccagcgtgctcgtgggacccctggtgtccaatctggaaatcacccacaccagcaacctgacctgcgtgaagttctccaacaccacctacaccaccaacagccagtgcatcagatgggtcacccctccaacacagatcgtgtgtctgcccagcggcatcttcttcgtgtgtggcacaagcgcctaccgctgcctgaatggcagcagcgagtctatgtgcttcctgagcttcctggtgcctcctatgaccatctacaccgagcaagacctgtacagctacgtgatctccaagcctcggaacaagcgggtgcccatcctgccttttgtgattggagctggcgtgctgggagccctcggaactggaatcggaggcatcaccacctctactcagttctactacaaactatctcaagaactaaatggggacatggaaagagtggccgacagcctggtcacactccaggaccagctcaattctctggctgccgtggtgctccagaatcggagagcactcgatctgctgacagccgagagaggcggcacctgtctgtttctgggcgaagagtgctgctactacgtgaaccagtccggaatcgtcactgagaagcttaagacactgcaagaggaactggaacggcggagaaaggacctggcctccaatcctctgtggaccggcctgcaaggactgctcccttacctgctgcctttcctgggaccactgctgactctgctgctcctgctgaccatcggaccctgcatcttcaacagactgaccgccttcatcaacgacaagctgaacatcatccacgctatggtgctgacacagcagtaccaggtgctgcggacagatgaggaagcccaggattga

SEQ ID NO: 158 - DNA, 1770 bp, synthetic construct
  source 1..1770: mol_type = other DNA
atggagacagacacactcctgctatgggtactgctgctctgggttccaggttccactggtgacgcaccccctccatgccgctgtatgacaagcagcagcccctaccaagagttcctgtggcgaatgcagaggcccggcaacattgacgcccctagctacagaagcctgagcaagggcacccctaccttcacagcccacacacacatgccccggaactgctaccatagcgccacactgtgtatgcacgccaacacacactactggaccggcaagatgattaaccctagctgccctggcggcctgggcgtgacagtttgttggacctactttacccagaccggcatgtccgatggtggcggagttcaagaccaggccagagaaaagcacgtgaaagaagtgatctcccagctgaccagagtgcacggcacaagcagcccttacaaaggactggacctgtccaagctgcacgagacactgagaacccacacacggctggtgtccctgttcaacaccacactgaccggactgcacgaggtgtccgctcagaatcctaccaactgctggatctgcctgcctctgaacttcagaccctacgtgtcaatccccgtgcctgagcagtggaacaacttcagcaccgagatcaataccaccagcgtgctcgtgggacccctggtgtccaatctggaaatcacccacaccagcaacctgacctgcgtgaagttctccaacaccacctacaccaccaacagccagtgcatcagatgggtcacccctccaacacagatcgtgtgtctgcccagcggcatcttcttcgtgtgtggcacaagcgcctaccgctgcctgaatggcagcagcgagtctatgtgcttcctgagcttcctggtgcctcctatgaccatctacaccgagcaagacctgtacagctacgtgatctccaagcctcggaacaagcgggtgcccatcctgccttttgtgattggagctggcgtgctgggagccctcggaactggaatcggaggcatcaccacctctactcagttctactacaaactatctcaagaactaaatggggacatggaaagagtggccgacagcctggtcacactccaggaccagctcaattctctggctgccgtggtgctccagaatcggagagcactcgatctgctgacagccgagagaggcggcacctgtctgtttctgggcgaagagtgctgctactacgtgaaccagtccggaatcgtcactgagaagcttagcaaccagctgatctccgacgtgcagatcctgagcagcaccatccaggacctccaggatcaggtggactctctggccgaagtggtgctccagaacagaagaggactggacctgctgacagccgagcaaggcggaatttgtctggccctgcaagagaagtgctgcttctacgtgaacaagagcggcatcgtgcgcgacaagatcaagacactgcaagaggaactggaacggcggagaaaggacctggcctccaatcctctgtggaccggcctgcaaggactgctcccttacctgctgcctttcctgggaccactgctgactctgctgctcctgctgaccatcggaccctgcatcttcaacagactgaccgccttcatcaacgacaagctgaacatcatccacgctatgggatccactagtccagtgtggtggaattctgcagatatccagcacagtggcggccgctcgagtctagagggcccgaacaaaaactcatctcagaagaggatctga

SEQ ID NO: 159 - DNA, 1575 bp, synthetic construct
  source 1..1575: mol_type = other DNA
atggagacagacacactcctgctatgggtactgctgctctgggttccaggttccactggtgacgcaccccctccatgccgctgtatgacaagcagcagcccctaccaagagttcctgtggcgaatgcagaggcccggcaacattgacgcccctagctacagaagcctgagcaagggcacccctaccttcacagcccacacacacatgccccggaactgctaccatagcgccacactgtgtatgcacgccaacacacactactggaccggcaagatgattaaccctagctgccctggcggcctgggcgtgacagtttgttggacctactttacccagaccggcatgtccgatggtggcggagttcaagaccaggccagagaaaagcacgtgaaagaagtgatctcccagctgaccagagtgcacggcacaagcagcccttacaaaggactggacctgtccaagctgcacgagacactgagaacccacacacggctggtgtccctgttcaacaccacactgaccggactgcacgaggtgtccgctcagaatcctaccaactgctggatctgcctgcctctgaacttcagaccctacgtgtcaatccccgtgcctgagcagtggaacaacttcagcaccgagatcaataccaccagcgtgctcgtgggacccctggtgtccaatctggaaatcacccacaccagcaacctgacctgcgtgaagttctccaacaccacctacaccaccaacagccagtgcatcagatgggtcacccctccaacacagatcgtgtgtctgcccagcggcatcttcttcgtgtgtggcacaagcgcctaccgctgcctgaatggcagcagcgagtctatgtgcttcctgagcttcctggtgcctcctatgaccatctacaccgagcaggacctgtacagctacgtgatctccaagcctcggaacaagcgggtgcccatcctgccttttgtgattggagctggcgtgctgggagccctcggaactggaatcggaggcatcaccacctctactcagttctactacaaactatctcaagaactaaatggggacatggaaagagtggccgacagcctggtcacactccaggaccagctcaattctctggctgccgtggtgctccagaatcggagagcactcgatctgctgacagccgagagaggcggcacctgtctgtttctgggcgaagagtgctgctactacgtgaaccagtccggaatcgtcactgagaaagttaaagaaattcgagatcgaatccagcggagagccgaggaactgagaaacacaggaccttggggcctgctgagccagtggatgccttggattctgcccttcctgggacctctggccgccatcattctgctgctgctgttcggcccctgtatctttaacctccttgttaactttgtctcttccagaatcgaagctgtaaaactacaaatggagcccaagatgcagtccaagactaagatctaccgcagacccctggaccggcctgccagcccacgatctgatgttaatgacatcaaaggcacccctcctgaggaaatctca

SEQ ID NO: 160 - DNA, 1437 bp, synthetic construct
  source 1..1437: mol_type = other DNA
atggagacagacacactcctgctatgggtactgctgctctgggttccaggttccactggtgacgcaccccctccatgccgctgtatgacaagcagcagcccctaccaagagttcctgtggcgaatgcagaggcccggcaacattgacgcccctagctacagaagcctgagcaagggcacccctaccttcacagcccacacacacatgccccggaactgctaccatagcgccacactgtgtatgcacgccaacacacactactggaccggcaagatgattaaccctagctgccctggcggcctgggcgtgacagtttgttggacctactttacccagaccggcatgtccgatggtggcggagttcaagaccaggccagagaaaagcacgtgaaagaagtgatctcccagctgaccagagtgcacggcacaagcagcccttacaaaggactggacctgtccaagctgcacgagacactgagaacccacacacggctggtgtccctgttcaacaccacactgaccggactgcacgaggtgtccgctcagaatcctaccaactgctggatctgcctgcctctgaacttcagaccctacgtgtcaatccccgtgcctgagcagtggaacaacttcagcaccgagatcaataccaccagcgtgctcgtgggacccctggtgtccaatctggaaatcacccacaccagcaacctgacctgcgtgaagttctccaacaccacctacaccaccaacagccagtgcatcagatgggtcacccctccaacacagatcgtgtgtctgcccagcggcatcttcttcgtgtgtggcacaagcgcctaccgctgcctgaatggcagcagcgagtctatgtgcttcctgagcttcctggtgcctcctatgaccatctacaccgagcaggacctgtacagctacgtgatctccaagcctcggaacaagcgggtgcccatcctgccttttgtgattggagctggcgtgctgggagccctcggaactggaatcggaggcatcaccacctctactcagttctactacaaactatctcaagaactaaatggggacatggaaagagtggccgacagcctggtcacactccaggaccagctcaattctctggctgccgtggtgctccagaatcggagagcactcgatctgctgacagccgagagaggcggcacctgtctgtttctgggcgaagagtgctgctactacgtgaaccagtccggaatcgtcactgagaaagttaaagaaattcgagatcgaatccagcggagagccgaggaactgagaaacacaggaccttggggcctgctgagccagtggatgccttggattctgcccttcctgggacctctggccgccatcattctgctgctgctgttcggcccctgtatctttaacctccttgttaactttgtctcttcc

SEQ ID NO: 161 - DNA, 1434 bp, synthetic construct
  source 1..1434: mol_type = other DNA
atggagacagacacactcctgctatgggtactgctgctctgggttccaggttccactggtgacgcaccccctccatgccgctgtatgacaagcagcagcccctaccaagagttcctgtggcgaatgcagaggcccggcaacattgacgcccctagctacagaagcctgagcaagggcacccctaccttcacagcccacacacacatgccccggaactgctaccatagcgccacactgtgtatgcacgccaacacacactactggaccggcaagatgattaaccctagctgccctggcggcctgggcgtgacagtttgttggacctactttacccagaccggcatgtccgatggtggcggagttcaagaccaggccagagaaaagcacgtgaaagaagtgatctcccagctgaccagagtgcacggcacaagcagcccttacaaaggactggacctgtccaagctgcacgagacactgagaacccacacacggctggtgtccctgttcaacaccacactgaccggactgcacgaggtgtccgctcagaatcctaccaactgctggatctgcctgcctctgaacttcagaccctacgtgtcaatccccgtgcctgagcagtggaacaacttcagcaccgagatcaataccaccagcgtgctcgtgggacccctggtgtccaatctggaaatcacccacaccagcaacctgacctgcgtgaagttctccaacaccacctacaccaccaacagccagtgcatcagatgggtcacccctccaacacagatcgtgtgtctgcccagcggcatcttcttcgtgtgtggcacaagcgcctaccgctgcctgaatggcagcagcgagtctatgtgcttcctgagcttcctggtgcctcctatgaccatctacaccgagcaggacctgtacagctacgtgatctccaagcctcggaacaagcgggtgcccatcctgccttttgtgattggagctggcgtgctgggagccctcggaactggaatcggaggcatcaccacctctactcagttctactacaaactatctcaagaactaaatggggacatggaaagagtggccgacagcctggtcacactccaggaccagctcaattctctggctgccgtggtgctccagaatcggagagcactcgatctgctgacagccgagagaggcggcacctgtctgtttctgggcgaagagtgctgctactacgtgaaccagtccggaatcgtcactgagaaagttaaagaaattcgagatcgaatccagcggagagccgaggaactgagaaacacaggaccttggggcctgctgagccagtggatgccttggattctgcccttcctgggacctctggccgccatcattctgctgctgctgttcggcccctgtatctttaacctccttgttaactttgtctct

SEQ ID NO: 162 - DNA, 1578 bp, synthetic construct
  source 1..1578: mol_type = other DNA
atggagacagacacactcctgctatgggtactgctgctctgggttccaggttccactggtgacgcaccccctccatgccgctgtatgacaagcagcagcccctaccaagagttcctgtggcgaatgcagaggcccggcaacattgacgcccctagctacagaagcctgagcaagggcacccctaccttcacagcccacacacacatgccccggaactgctaccatagcgccacactgtgtatgcacgccaacacacactactggaccggcaagatgattaaccctagctgccctggcggcctgggcgtgacagtttgttggacctactttacccagaccggcatgtccgatggtggcggagttcaagaccaggccagagaaaagcacgtgaaagaagtgatctcccagctgaccagagtgcacggcacaagcagcccttacaaaggactggacctgtccaagctgcacgagacactgagaacccacacacggctggtgtccctgttcaacaccacactgaccggactgcacgaggtgtccgctcagaatcctaccaactgctggatctgcctgcctctgaacttcagaccctacgtgtcaatccccgtgcctgagcagtggaacaacttcagcaccgagatcaataccaccagcgtgctcgtgggacccctggtgtccaatctggaaatcacccacaccagcaacctgacctgcgtgaagttctccaacaccacctacaccaccaacagccagtgcatcagatgggtcacccctccaacacagatcgtgtgtctgcccagcggcatcttcttcgtgtgtggcacaagcgcctaccgctgcctgaatggcagcagcgagtctatgtgcttcctgagcttcctggtgcctcctatgaccatctacaccgagcaggacctgtacagctacgtgatctccaagcctcggaacaagcgggtgcccatcctgccttttgtgattggagctggcgtgctgggagccctcggaactggaatcggaggcatcaccacctctactcagttctactacaaactatctcaagaactaaatggggacatggaaagagtggccgacagcctggtcacactccaggaccagctcaattctctggctgccgtggtgctccagaatcggagagcactcgatctgctgacagccgagagaggcggcacctgtctgtttctgggcgaagagtgctgctactacgtgaaccagtccggaatcgtcactgagaaagttaaagaaattcgagatcgaatccagcggagagccgaggaactgagaaacacaggaccttggggcctgctgagccagtggatgccttggattctgcccttcctgggacctctggccgccatcattctgctgctgctgttcggcccctgtatctttaacctccttgttaactttgtctcttccagaatcgaagctgtaaaactacaaatggagcccaagatgcagtccaagactaagatctaccgcagacccctggaccggcctgccagcccacgatctgatgttaatgacatcaaaggcacccctcctgaggaaatctcagct

SEQ ID NO: 163 - DNA, 1587 bp, synthetic construct
  source 1..1587: mol_type = other DNA
atggagacagacacactcctgctatgggtactgctgctctgggttccaggttccactggtgacgcaccccctccatgccgctgtatgacaagcagcagcccctaccaagagttcctgtggcgaatgcagaggcccggcaacattgacgcccctagctacagaagcctgagcaagggcacccctaccttcacagcccacacacacatgccccggaactgctaccatagcgccacactgtgtatgcacgccaacacacactactggaccggcaagatgattaaccctagctgccctggcggcctgggcgtgacagtttgttggacctactttacccagaccggcatgtccgatggtggcggagttcaagaccaggccagagaaaagcacgtgaaagaagtgatctcccagctgaccagagtgcacggcacaagcagcccttacaaaggactggacctgtccaagctgcacgagacactgagaacccacacacggctggtgtccctgttcaacaccacactgaccggactgcacgaggtgtccgctcagaatcctaccaactgctggatctgcctgcctctgaacttcagaccctacgtgtcaatccccgtgcctgagcagtggaacaacttcagcaccgagatcaataccaccagcgtgctcgtgggacccctggtgtccaatctggaaatcacccacaccagcaacctgacctgcgtgaagttctccaacaccacctacaccaccaacagccagtgcatcagatgggtcacccctccaacacagatcgtgtgtctgcccagcggcatcttcttcgtgtgtggcacaagcgcctaccgctgcctgaatggcagcagcgagtctatgtgcttcctgagcttcctggtgcctcctatgaccatctacaccgagcaggacctgtacagctacgtgatctccaagcctcggaacaagcgggtgcccatcctgccttttgtgattggagctggcgtgctgggagccctcggaactggaatcggaggcatcaccacctctactcagttctactacaaactatctcaagaactaaatggggacatggaaagagtggccgacagcctggtcacactccaggaccagctcaattctctggctgccgtggtgctccagaatcggagagcactcgatctgctgacagccgagagaggcggcacctgtctgtttctgggcgaagagtgctgctactacgtgaaccagtccggaatcgtcactgagaaagttaaagaaattcgagatcgaatccagcggagagccgaggaactgagaaacacaggaccttggggcctgctgagccagtggatgccttggattctgcccttcctgggacctctggccgccatcattctgctgctgctgttcggcccctgtatctttaacctccttgttaactttgtctcttccagaatcgaagctgtaaaactacaaatggagcccaagatgcagtccaagactaagatctaccgcagacccctggaccggcctgccagcccacgatctgatgttaatgacatcaaaggcacccctcctgaggaaatctcagctgcacaacct

SEQ ID NO: 164 - DNA, 1596 bp, synthetic construct
  source 1..1596: mol_type = other DNA
atggagacagacacactcctgctatgggtactgctgctctgggttccaggttccactggtgacgcaccccctccatgccgctgtatgacaagcagcagcccctaccaagagttcctgtggcgaatgcagaggcccggcaacattgacgcccctagctacagaagcctgagcaagggcacccctaccttcacagcccacacacacatgccccggaactgctaccatagcgccacactgtgtatgcacgccaacacacactactggaccggcaagatgattaaccctagctgccctggcggcctgggcgtgacagtttgttggacctactttacccagaccggcatgtccgatggtggcggagttcaagaccaggccagagaaaagcacgtgaaagaagtgatctcccagctgaccagagtgcacggcacaagcagcccttacaaaggactggacctgtccaagctgcacgagacactgagaacccacacacggctggtgtccctgttcaacaccacactgaccggactgcacgaggtgtccgctcagaatcctaccaactgctggatctgcctgcctctgaacttcagaccctacgtgtcaatccccgtgcctgagcagtggaacaacttcagcaccgagatcaataccaccagcgtgctcgtgggacccctggtgtccaatctggaaatcacccacaccagcaacctgacctgcgtgaagttctccaacaccacctacaccaccaacagccagtgcatcagatgggtcacccctccaacacagatcgtgtgtctgcccagcggcatcttcttcgtgtgtggcacaagcgcctaccgctgcctgaatggcagcagcgagtctatgtgcttcctgagcttcctggtgcctcctatgaccatctacaccgagcaggacctgtacagctacgtgatctccaagcctcggaacaagcgggtgcccatcctgccttttgtgattggagctggcgtgctgggagccctcggaactggaatcggaggcatcaccacctctactcagttctactacaaactatctcaagaactaaatggggacatggaaagagtggccgacagcctggtcacactccaggaccagctcaattctctggctgccgtggtgctccagaatcggagagcactcgatctgctgacagccgagagaggcggcacctgtctgtttctgggcgaagagtgctgctactacgtgaaccagtccggaatcgtcactgagaaagttaaagaaattcgagatcgaatccagcggagagccgaggaactgagaaacacaggaccttggggcctgctgagccagtggatgccttggattctgcccttcctgggacctctggccgccatcattctgctgctgctgttcggcccctgtatctttaacctccttgttaactttgtctcttccagaatcgaagctgtaaaactacaaatggagcccaagatgcagtccaagactaagatctaccgcagacccctggaccggcctgccagcccacgatctgatgttaatgacatcaaaggcacccctcctgaggaaatctcagctgcacaacctctactacgc

SEQ ID NO: 165 - DNA, 1503 bp, synthetic construct
  source 1..1503: mol_type = other DNA
atggagacagacacactcctgctatgggtactgctgctctgggttccaggttccactggtgacgcaccccctccatgccgctgtatgacaagcagcagcccctaccaagagttcctgtggcgaatgcagaggcccggcaacattgacgcccctagctacagaagcctgagcaagggcacccctaccttcacagcccacacacacatgccccggaactgctaccatagcgccacactgtgtatgcacgccaacacacactactggaccggcaagatgattaaccctagctgccctggcggcctgggcgtgacagtttgttggacctactttacccagaccggcatgtccgatggtggcggagttcaagaccaggccagagaaaagcacgtgaaagaagtgatctcccagctgaccagagtgcacggcacaagcagcccttacaaaggactggacctgtccaagctgcacgagacactgagaacccacacacggctggtgtccctgttcaacaccacactgaccggactgcacgaggtgtccgctcagaatcctaccaactgctggatctgcctgcctctgaacttcagaccctacgtgtcaatccccgtgcctgagcagtggaacaacttcagcaccgagatcaataccaccagcgtgctcgtgggacccctggtgtccaatctggaaatcacccacaccagcaacctgacctgcgtgaagttctccaacaccacctacaccaccaacagccagtgcatcagatgggtcacccctccaacacagatcgtgtgtctgcccagcggcatcttcttcgtgtgtggcacaagcgcctaccgctgcctgaatggcagcagcgagtctatgtgcttcctgagcttcctggtgcctcctatgaccatctacaccgagcaggacctgtacagctacgtgatctccaagcctcggaacaagcgggtgcccatcctgccttttgtgattggagctggcgtgctgggagccctcggaactggaatcggaggcatcaccacctctactcagttctactacaaactatctcaagaactaaatggggacatggaaagagtggccgacagcctggtcacactccaggaccagctcaattctctggctgccgtggtgctccagaatcggagagcactcgatctgctgacagccgagagaggcggcacctgtctgtttctgggcgaagagtgctgctactacgtgaaccagtccggaatcgtcactgagaagcttaaagaaattcgagatcgaatccagcggagaagaaaggacctggcctccaatcctctgtggaccggcctgcaaggactgctcccttacctgctgcctttcctgggaccactgctgactctgctgctcctgctgaccatcggaccctgcatcttcaacagactgaccgccttcatcaacgacaagctgaacatcatccacgctatggtgctgacacagcagtaccaggtgctgcggacagatgaggaa

SEQ ID NO: 166 - DNA, 1500 bp, synthetic construct
  source 1..1500: mol_type = other DNA
atggagacagacacactcctgctatgggtactgctgctctgggttccaggttccactggtgacgcaccccctccatgccgctgtatgacaagcagcagcccctaccaagagttcctgtggcgaatgcagaggcccggcaacattgacgcccctagctacagaagcctgagcaagggcacccctaccttcacagcccacacacacatgccccggaactgctaccatagcgccacactgtgtatgcacgccaacacacactactggaccggcaagatgattaaccctagctgccctggcggcctgggcgtgacagtttgttggacctactttacccagaccggcatgtccgatggtggcggagttcaagaccaggccagagaaaagcacgtgaaagaagtgatctcccagctgaccagagtgcacggcacaagcagcccttacaaaggactggacctgtccaagctgcacgagacactgagaacccacacacggctggtgtccctgttcaacaccacactgaccggactgcacgaggtgtccgctcagaatcctaccaactgctggatctgcctgcctctgaacttcagaccctacgtgtcaatccccgtgcctgagcagtggaacaacttcagcaccgagatcaataccaccagcgtgctcgtgggacccctggtgtccaatctggaaatcacccacaccagcaacctgacctgcgtgaagttctccaacaccacctacaccaccaacagccagtgcatcagatgggtcacccctccaacacagatcgtgtgtctgcccagcggcatcttcttcgtgtgtggcacaagcgcctaccgctgcctgaatggcagcagcgagtctatgtgcttcctgagcttcctggtgcctcctatgaccatctacaccgagcaggacctgtacagctacgtgatctccaagcctcggaacaagcgggtgcccatcctgccttttgtgattggagctggcgtgctgggagccctcggaactggaatcggaggcatcaccacctctactcagttctactacaaactatctcaagaactaaatggggacatggaaagagtggccgacagcctggtcacactccaggaccagctcaattctctggctgccgtggtgctccagaatcggagagcactcgatctgctgacagccgagagaggcggcacctgtctgtttctgggcgaagagtgctgctactacgtgaaccagtccggaatcgtcactgagaagcttaaagaaattcgagatcgaatccagcggagaagaaaggacctggcctccaatcctctgtggaccggcctgcaaggactgctcccttacctgctgcctttcctgggaccactgctgactctgctgctcctgctgaccatcggaccctgcatcttcaacagactgaccgccttcatcaacgacaagctgaacatcatccacgctatggtgctgacacagcagtaccaggtgctgcggacagatgag

SEQ ID NO: 167 - DNA, 1497 bp, synthetic construct
  source 1..1497: mol_type = other DNA
atggagacagacacactcctgctatgggtactgctgctctgggttccaggttccactggtgacgcaccccctccatgccgctgtatgacaagcagcagcccctaccaagagttcctgtggcgaatgcagaggcccggcaacattgacgcccctagctacagaagcctgagcaagggcacccctaccttcacagcccacacacacatgccccggaactgctaccatagcgccacactgtgtatgcacgccaacacacactactggaccggcaagatgattaaccctagctgccctggcggcctgggcgtgacagtttgttggacctactttacccagaccggcatgtccgatggtggcggagttcaagaccaggccagagaaaagcacgtgaaagaagtgatctcccagctgaccagagtgcacggcacaagcagcccttacaaaggactggacctgtccaagctgcacgagacactgagaacccacacacggctggtgtccctgttcaacaccacactgaccggactgcacgaggtgtccgctcagaatcctaccaactgctggatctgcctgcctctgaacttcagaccctacgtgtcaatccccgtgcctgagcagtggaacaacttcagcaccgagatcaataccaccagcgtgctcgtgggacccctggtgtccaatctggaaatcacccacaccagcaacctgacctgcgtgaagttctccaacaccacctacaccaccaacagccagtgcatcagatgggtcacccctccaacacagatcgtgtgtctgcccagcggcatcttcttcgtgtgtggcacaagcgcctaccgctgcctgaatggcagcagcgagtctatgtgcttcctgagcttcctggtgcctcctatgaccatctacaccgagcaggacctgtacagctacgtgatctccaagcctcggaacaagcgggtgcccatcctgccttttgtgattggagctggcgtgctgggagccctcggaactggaatcggaggcatcaccacctctactcagttctactacaaactatctcaagaactaaatggggacatggaaagagtggccgacagcctggtcacactccaggaccagctcaattctctggctgccgtggtgctccagaatcggagagcactcgatctgctgacagccgagagaggcggcacctgtctgtttctgggcgaagagtgctgctactacgtgaaccagtccggaatcgtcactgagaagcttaaagaaattcgagatcgaatccagcggagaagaaaggacctggcctccaatcctctgtggaccggcctgcaaggactgctcccttacctgctgcctttcctgggaccactgctgactctgctgctcctgctgaccatcggaccctgcatcttcaacagactgaccgccttcatcaacgacaagctgaacatcatccacgctatggtgctgacacagcagtaccaggtgctgcggacagat

SEQ ID NO: 168 - DNA, 1494 bp, synthetic construct
  source 1..1494: mol_type = other DNA
atggagacagacacactcctgctatgggtactgctgctctgggttccaggttccactggtgacgcaccccctccatgccgctgtatgacaagcagcagcccctaccaagagttcctgtggcgaatgcagaggcccggcaacattgacgcccctagctacagaagcctgagcaagggcacccctaccttcacagcccacacacacatgccccggaactgctaccatagcgccacactgtgtatgcacgccaacacacactactggaccggcaagatgattaaccctagctgccctggcggcctgggcgtgacagtttgttggacctactttacccagaccggcatgtccgatggtggcggagttcaagaccaggccagagaaaagcacgtgaaagaagtgatctcccagctgaccagagtgcacggcacaagcagcccttacaaaggactggacctgtccaagctgcacgagacactgagaacccacacacggctggtgtccctgttcaacaccacactgaccggactgcacgaggtgtccgctcagaatcctaccaactgctggatctgcctgcctctgaacttcagaccctacgtgtcaatccccgtgcctgagcagtggaacaacttcagcaccgagatcaataccaccagcgtgctcgtgggacccctggtgtccaatctggaaatcacccacaccagcaacctgacctgcgtgaagttctccaacaccacctacaccaccaacagccagtgcatcagatgggtcacccctccaacacagatcgtgtgtctgcccagcggcatcttcttcgtgtgtggcacaagcgcctaccgctgcctgaatggcagcagcgagtctatgtgcttcctgagcttcctggtgcctcctatgaccatctacaccgagcaggacctgtacagctacgtgatctccaagcctcggaacaagcgggtgcccatcctgccttttgtgattggagctggcgtgctgggagccctcggaactggaatcggaggcatcaccacctctactcagttctactacaaactatctcaagaactaaatggggacatggaaagagtggccgacagcctggtcacactccaggaccagctcaattctctggctgccgtggtgctccagaatcggagagcactcgatctgctgacagccgagagaggcggcacctgtctgtttctgggcgaagagtgctgctactacgtgaaccagtccggaatcgtcactgagaagcttaaagaaattcgagatcgaatccagcggagaagaaaggacctggcctccaatcctctgtggaccggcctgcaaggactgctcccttacctgctgcctttcctgggaccactgctgactctgctgctcctgctgaccatcggaccctgcatcttcaacagactgaccgccttcatcaacgacaagctgaacatcatccacgctatggtgctgacacagcagtaccaggtgctgcggaca

SEQ ID NO: 169 - DNA, 1491 bp, synthetic construct
  source 1..1491: mol_type = other DNA
atggagacagacacactcctgctatgggtactgctgctctgggttccaggttccactggtgacgcaccccctccatgccgctgtatgacaagcagcagcccctaccaagagttcctgtggcgaatgcagaggcccggcaacattgacgcccctagctacagaagcctgagcaagggcacccctaccttcacagcccacacacacatgccccggaactgctaccatagcgccacactgtgtatgcacgccaacacacactactggaccggcaagatgattaaccctagctgccctggcggcctgggcgtgacagtttgttggacctactttacccagaccggcatgtccgatggtggcggagttcaagaccaggccagagaaaagcacgtgaaagaagtgatctcccagctgaccagagtgcacggcacaagcagcccttacaaaggactggacctgtccaagctgcacgagacactgagaacccacacacggctggtgtccctgttcaacaccacactgaccggactgcacgaggtgtccgctcagaatcctaccaactgctggatctgcctgcctctgaacttcagaccctacgtgtcaatccccgtgcctgagcagtggaacaacttcagcaccgagatcaataccaccagcgtgctcgtgggacccctggtgtccaatctggaaatcacccacaccagcaacctgacctgcgtgaagttctccaacaccacctacaccaccaacagccagtgcatcagatgggtcacccctccaacacagatcgtgtgtctgcccagcggcatcttcttcgtgtgtggcacaagcgcctaccgctgcctgaatggcagcagcgagtctatgtgcttcctgagcttcctggtgcctcctatgaccatctacaccgagcaggacctgtacagctacgtgatctccaagcctcggaacaagcgggtgcccatcctgccttttgtgattggagctggcgtgctgggagccctcggaactggaatcggaggcatcaccacctctactcagttctactacaaactatctcaagaactaaatggggacatggaaagagtggccgacagcctggtcacactccaggaccagctcaattctctggctgccgtggtgctccagaatcggagagcactcgatctgctgacagccgagagaggcggcacctgtctgtttctgggcgaagagtgctgctactacgtgaaccagtccggaatcgtcactgagaagcttaaagaaattcgagatcgaatccagcggagaagaaaggacctggcctccaatcctctgtggaccggcctgcaaggactgctcccttacctgctgcctttcctgggaccactgctgactctgctgctcctgctgaccatcggaccctgcatcttcaacagactgaccgccttcatcaacgacaagctgaacatcatccacgctatggtgctgacacagcagtaccaggtgctgcgg

SEQ ID NO: 170 - DNA, 1488 bp, synthetic construct
  source 1..1488: mol_type = other DNA
atggagacagacacactcctgctatgggtactgctgctctgggttccaggttccactggtgacgcaccccctccatgccgctgtatgacaagcagcagcccctaccaagagttcctgtggcgaatgcagaggcccggcaacattgacgcccctagctacagaagcctgagcaagggcacccctaccttcacagcccacacacacatgccccggaactgctaccatagcgccacactgtgtatgcacgccaacacacactactggaccggcaagatgattaaccctagctgccctggcggcctgggcgtgacagtttgttggacctactttacccagaccggcatgtccgatggtggcggagttcaagaccaggccagagaaaagcacgtgaaagaagtgatctcccagctgaccagagtgcacggcacaagcagcccttacaaaggactggacctgtccaagctgcacgagacactgagaacccacacacggctggtgtccctgttcaacaccacactgaccggactgcacgaggtgtccgctcagaatcctaccaactgctggatctgcctgcctctgaacttcagaccctacgtgtcaatccccgtgcctgagcagtggaacaacttcagcaccgagatcaataccaccagcgtgctcgtgggacccctggtgtccaatctggaaatcacccacaccagcaacctgacctgcgtgaagttctccaacaccacctacaccaccaacagccagtgcatcagatgggtcacccctccaacacagatcgtgtgtctgcccagcggcatcttcttcgtgtgtggcacaagcgcctaccgctgcctgaatggcagcagcgagtctatgtgcttcctgagcttcctggtgcctcctatgaccatctacaccgagcaggacctgtacagctacgtgatctccaagcctcggaacaagcgggtgcccatcctgccttttgtgattggagctggcgtgctgggagccctcggaactggaatcggaggcatcaccacctctactcagttctactacaaactatctcaagaactaaatggggacatggaaagagtggccgacagcctggtcacactccaggaccagctcaattctctggctgccgtggtgctccagaatcggagagcactcgatctgctgacagccgagagaggcggcacctgtctgtttctgggcgaagagtgctgctactacgtgaaccagtccggaatcgtcactgagaagcttaaagaaattcgagatcgaatccagcggagaagaaaggacctggcctccaatcctctgtggaccggcctgcaaggactgctcccttacctgctgcctttcctgggaccactgctgactctgctgctcctgctgaccatcggaccctgcatcttcaacagactgaccgccttcatcaacgacaagctgaacatcatccacgctatggtgctgacacagcagtaccaggtgctg

SEQ ID NO: 171 - DNA, 1485 bp, synthetic construct
  source 1..1485: mol_type = other DNA
atggagacagacacactcctgctatgggtactgctgctctgggttccaggttccactggtgacgcaccccctccatgccgctgtatgacaagcagcagcccctaccaagagttcctgtggcgaatgcagaggcccggcaacattgacgcccctagctacagaagcctgagcaagggcacccctaccttcacagcccacacacacatgccccggaactgctaccatagcgccacactgtgtatgcacgccaacacacactactggaccggcaagatgattaaccctagctgccctggcggcctgggcgtgacagtttgttggacctactttacccagaccggcatgtccgatggtggcggagttcaagaccaggccagagaaaagcacgtgaaagaagtgatctcccagctgaccagagtgcacggcacaagcagcccttacaaaggactggacctgtccaagctgcacgagacactgagaacccacacacggctggtgtccctgttcaacaccacactgaccggactgcacgaggtgtccgctcagaatcctaccaactgctggatctgcctgcctctgaacttcagaccctacgtgtcaatccccgtgcctgagcagtggaacaacttcagcaccgagatcaataccaccagcgtgctcgtgggacccctggtgtccaatctggaaatcacccacaccagcaacctgacctgcgtgaagttctccaacaccacctacaccaccaacagccagtgcatcagatgggtcacccctccaacacagatcgtgtgtctgcccagcggcatcttcttcgtgtgtggcacaagcgcctaccgctgcctgaatggcagcagcgagtctatgtgcttcctgagcttcctggtgcctcctatgaccatctacaccgagcaggacctgtacagctacgtgatctccaagcctcggaacaagcgggtgcccatcctgccttttgtgattggagctggcgtgctgggagccctcggaactggaatcggaggcatcaccacctctactcagttctactacaaactatctcaagaactaaatggggacatggaaagagtggccgacagcctggtcacactccaggaccagctcaattctctggctgccgtggtgctccagaatcggagagcactcgatctgctgacagccgagagaggcggcacctgtctgtttctgggcgaagagtgctgctactacgtgaaccagtccggaatcgtcactgagaagcttaaagaaattcgagatcgaatccagcggagaagaaaggacctggcctccaatcctctgtggaccggcctgcaaggactgctcccttacctgctgcctttcctgggaccactgctgactctgctgctcctgctgaccatcggaccctgcatcttcaacagactgaccgccttcatcaacgacaagctgaacatcatccacgctatggtgctgacacagcagtaccaggtg

SEQ ID NO: 172 - DNA, 1482 bp, synthetic construct
  source 1..1482: mol_type = other DNA
atggagacagacacactcctgctatgggtactgctgctctgggttccaggttccactggtgacgcaccccctccatgccgctgtatgacaagcagcagcccctaccaagagttcctgtggcgaatgcagaggcccggcaacattgacgcccctagctacagaagcctgagcaagggcacccctaccttcacagcccacacacacatgccccggaactgctaccatagcgccacactgtgtatgcacgccaacacacactactggaccggcaagatgattaaccctagctgccctggcggcctgggcgtgacagtttgttggacctactttacccagaccggcatgtccgatggtggcggagttcaagaccaggccagagaaaagcacgtgaaagaagtgatctcccagctgaccagagtgcacggcacaagcagcccttacaaaggactggacctgtccaagctgcacgagacactgagaacccacacacggctggtgtccctgttcaacaccacactgaccggactgcacgaggtgtccgctcagaatcctaccaactgctggatctgcctgcctctgaacttcagaccctacgtgtcaatccccgtgcctgagcagtggaacaacttcagcaccgagatcaataccaccagcgtgctcgtgggacccctggtgtccaatctggaaatcacccacaccagcaacctgacctgcgtgaagttctccaacaccacctacaccaccaacagccagtgcatcagatgggtcacccctccaacacagatcgtgtgtctgcccagcggcatcttcttcgtgtgtggcacaagcgcctaccgctgcctgaatggcagcagcgagtctatgtgcttcctgagcttcctggtgcctcctatgaccatctacaccgagcaggacctgtacagctacgtgatctccaagcctcggaacaagcgggtgcccatcctgccttttgtgattggagctggcgtgctgggagccctcggaactggaatcggaggcatcaccacctctactcagttctactacaaactatctcaagaactaaatggggacatggaaagagtggccgacagcctggtcacactccaggaccagctcaattctctggctgccgtggtgctccagaatcggagagcactcgatctgctgacagccgagagaggcggcacctgtctgtttctgggcgaagagtgctgctactacgtgaaccagtccggaatcgtcactgagaagcttaaagaaattcgagatcgaatccagcggagaagaaaggacctggcctccaatcctctgtggaccggcctgcaaggactgctcccttacctgctgcctttcctgggaccactgctgactctgctgctcctgctgaccatcggaccctgcatcttcaacagactgaccgccttcatcaacgacaagctgaacatcatccacgctatggtgctgacacagcagtaccag

SEQ ID NO: 173 - DNA, 1479 bp, synthetic construct
  source 1..1479: mol_type = other DNA
atggagacagacacactcctgctatgggtactgctgctctgggttccaggttccactggtgacgcaccccctccatgccgctgtatgacaagcagcagcccctaccaagagttcctgtggcgaatgcagaggcccggcaacattgacgcccctagctacagaagcctgagcaagggcacccctaccttcacagcccacacacacatgccccggaactgctaccatagcgccacactgtgtatgcacgccaacacacactactggaccggcaagatgattaaccctagctgccctggcggcctgggcgtgacagtttgttggacctactttacccagaccggcatgtccgatggtggcggagttcaagaccaggccagagaaaagcacgtgaaagaagtgatctcccagctgaccagagtgcacggcacaagcagcccttacaaaggactggacctgtccaagctgcacgagacactgagaacccacacacggctggtgtccctgttcaacaccacactgaccggactgcacgaggtgtccgctcagaatcctaccaactgctggatctgcctgcctctgaacttcagaccctacgtgtcaatccccgtgcctgagcagtggaacaacttcagcaccgagatcaataccaccagcgtgctcgtgggacccctggtgtccaatctggaaatcacccacaccagcaacctgacctgcgtgaagttctccaacaccacctacaccaccaacagccagtgcatcagatgggtcacccctccaacacagatcgtgtgtctgcccagcggcatcttcttcgtgtgtggcacaagcgcctaccgctgcctgaatggcagcagcgagtctatgtgcttcctgagcttcctggtgcctcctatgaccatctacaccgagcaggacctgtacagctacgtgatctccaagcctcggaacaagcgggtgcccatcctgccttttgtgattggagctggcgtgctgggagccctcggaactggaatcggaggcatcaccacctctactcagttctactacaaactatctcaagaactaaatggggacatggaaagagtggccgacagcctggtcacactccaggaccagctcaattctctggctgccgtggtgctccagaatcggagagcactcgatctgctgacagccgagagaggcggcacctgtctgtttctgggcgaagagtgctgctactacgtgaaccagtccggaatcgtcactgagaagcttaaagaaattcgagatcgaatccagcggagaagaaaggacctggcctccaatcctctgtggaccggcctgcaaggactgctcccttacctgctgcctttcctgggaccactgctgactctgctgctcctgctgaccatcggaccctgcatcttcaacagactgaccgccttcatcaacgacaagctgaacatcatccacgctatggtgctgacacagcagtac

SEQ ID NO: 174 - DNA, 1476 bp, synthetic construct
  source 1..1476: mol_type = other DNA
atggagacagacacactcctgctatgggtactgctgctctgggttccaggttccactggtgacgcaccccctccatgccgctgtatgacaagcagcagcccctaccaagagttcctgtggcgaatgcagaggcccggcaacattgacgcccctagctacagaagcctgagcaagggcacccctaccttcacagcccacacacacatgccccggaactgctaccatagcgccacactgtgtatgcacgccaacacacactactggaccggcaagatgattaaccctagctgccctggcggcctgggcgtgacagtttgttggacctactttacccagaccggcatgtccgatggtggcggagttcaagaccaggccagagaaaagcacgtgaaagaagtgatctcccagctgaccagagtgcacggcacaagcagcccttacaaaggactggacctgtccaagctgcacgagacactgagaacccacacacggctggtgtccctgttcaacaccacactgaccggactgcacgaggtgtccgctcagaatcctaccaactgctggatctgcctgcctctgaacttcagaccctacgtgtcaatccccgtgcctgagcagtggaacaacttcagcaccgagatcaataccaccagcgtgctcgtgggacccctggtgtccaatctggaaatcacccacaccagcaacctgacctgcgtgaagttctccaacaccacctacaccaccaacagccagtgcatcagatgggtcacccctccaacacagatcgtgtgtctgcccagcggcatcttcttcgtgtgtggcacaagcgcctaccgctgcctgaatggcagcagcgagtctatgtgcttcctgagcttcctggtgcctcctatgaccatctacaccgagcaggacctgtacagctacgtgatctccaagcctcggaacaagcgggtgcccatcctgccttttgtgattggagctggcgtgctgggagccctcggaactggaatcggaggcatcaccacctctactcagttctactacaaactatctcaagaactaaatggggacatggaaagagtggccgacagcctggtcacactccaggaccagctcaattctctggctgccgtggtgctccagaatcggagagcactcgatctgctgacagccgagagaggcggcacctgtctgtttctgggcgaagagtgctgctactacgtgaaccagtccggaatcgtcactgagaagcttaaagaaattcgagatcgaatccagcggagaagaaaggacctggcctccaatcctctgtggaccggcctgcaaggactgctcccttacctgctgcctttcctgggaccactgctgactctgctgctcctgctgaccatcggaccctgcatcttcaacagactgaccgccttcatcaacgacaagctgaacatcatccacgctatggtgctgacacagcag

SEQ ID NO: 175 - DNA, 1473 bp, synthetic construct
  source 1..1473: mol_type = other DNA
atggagacagacacactcctgctatgggtactgctgctctgggttccaggttccactggtgacgcaccccctccatgccgctgtatgacaagcagcagcccctaccaagagttcctgtggcgaatgcagaggcccggcaacattgacgcccctagctacagaagcctgagcaagggcacccctaccttcacagcccacacacacatgccccggaactgctaccatagcgccacactgtgtatgcacgccaacacacactactggaccggcaagatgattaaccctagctgccctggcggcctgggcgtgacagtttgttggacctactttacccagaccggcatgtccgatggtggcggagttcaagaccaggccagagaaaagcacgtgaaagaagtgatctcccagctgaccagagtgcacggcacaagcagcccttacaaaggactggacctgtccaagctgcacgagacactgagaacccacacacggctggtgtccctgttcaacaccacactgaccggactgcacgaggtgtccgctcagaatcctaccaactgctggatctgcctgcctctgaacttcagaccctacgtgtcaatccccgtgcctgagcagtggaacaacttcagcaccgagatcaataccaccagcgtgctcgtgggacccctggtgtccaatctggaaatcacccacaccagcaacctgacctgcgtgaagttctccaacaccacctacaccaccaacagccagtgcatcagatgggtcacccctccaacacagatcgtgtgtctgcccagcggcatcttcttcgtgtgtggcacaagcgcctaccgctgcctgaatggcagcagcgagtctatgtgcttcctgagcttcctggtgcctcctatgaccatctacaccgagcaggacctgtacagctacgtgatctccaagcctcggaacaagcgggtgcccatcctgccttttgtgattggagctggcgtgctgggagccctcggaactggaatcggaggcatcaccacctctactcagttctactacaaactatctcaagaactaaatggggacatggaaagagtggccgacagcctggtcacactccaggaccagctcaattctctggctgccgtggtgctccagaatcggagagcactcgatctgctgacagccgagagaggcggcacctgtctgtttctgggcgaagagtgctgctactacgtgaaccagtccggaatcgtcactgagaagcttaaagaaattcgagatcgaatccagcggagaagaaaggacctggcctccaatcctctgtggaccggcctgcaaggactgctcccttacctgctgcctttcctgggaccactgctgactctgctgctcctgctgaccatcggaccctgcatcttcaacagactgaccgccttcatcaacgacaagctgaacatcatccacgctatggtgctgacacag

SEQ ID NO: 176 - DNA, 1470 bp, synthetic construct
  source 1..1470: mol_type = other DNA
atggagacagacacactcctgctatgggtactgctgctctgggttccaggttccactggtgacgcaccccctccatgccgctgtatgacaagcagcagcccctaccaagagttcctgtggcgaatgcagaggcccggcaacattgacgcccctagctacagaagcctgagcaagggcacccctaccttcacagcccacacacacatgccccggaactgctaccatagcgccacactgtgtatgcacgccaacacacactactggaccggcaagatgattaaccctagctgccctggcggcctgggcgtgacagtttgttggacctactttacccagaccggcatgtccgatggtggcggagttcaagaccaggccagagaaaagcacgtgaaagaagtgatctcccagctgaccagagtgcacggcacaagcagcccttacaaaggactggacctgtccaagctgcacgagacactgagaacccacacacggctggtgtccctgttcaacaccacactgaccggactgcacgaggtgtccgctcagaatcctaccaactgctggatctgcctgcctctgaacttcagaccctacgtgtcaatccccgtgcctgagcagtggaacaacttcagcaccgagatcaataccaccagcgtgctcgtgggacccctggtgtccaatctggaaatcacccacaccagcaacctgacctgcgtgaagttctccaacaccacctacaccaccaacagccagtgcatcagatgggtcacccctccaacacagatcgtgtgtctgcccagcggcatcttcttcgtgtgtggcacaagcgcctaccgctgcctgaatggcagcagcgagtctatgtgcttcctgagcttcctggtgcctcctatgaccatctacaccgagcaggacctgtacagctacgtgatctccaagcctcggaacaagcgggtgcccatcctgccttttgtgattggagctggcgtgctgggagccctcggaactggaatcggaggcatcaccacctctactcagttctactacaaactatctcaagaactaaatggggacatggaaagagtggccgacagcctggtcacactccaggaccagctcaattctctggctgccgtggtgctccagaatcggagagcactcgatctgctgacagccgagagaggcggcacctgtctgtttctgggcgaagagtgctgctactacgtgaaccagtccggaatcgtcactgagaagcttaaagaaattcgagatcgaatccagcggagaagaaaggacctggcctccaatcctctgtggaccggcctgcaaggactgctcccttacctgctgcctttcctgggaccactgctgactctgctgctcctgctgaccatcggaccctgcatcttcaacagactgaccgccttcatcaacgacaagctgaacatcatccacgctatggtgctgaca

SEQ ID NO: 177 - DNA, 1503 bp, synthetic construct
  source 1..1503: mol_type = other DNA
atggagacagacacactcctgctatgggtactgctgctctgggttccaggttccactggtgacgcaccccctccatgccgctgtatgacaagcagcagcccctaccaagagttcctgtggcgaatgcagaggcccggcaacattgacgcccctagctacagaagcctgagcaagggcacccctaccttcacagcccacacacacatgccccggaactgctaccatagcgccacactgtgtatgcacgccaacacacactactggaccggcaagatgattaaccctagctgccctggcggcctgggcgtgacagtttgttggacctactttacccagaccggcatgtccgatggtggcggagttcaagaccaggccagagaaaagcacgtgaaagaagtgatctcccagctgaccagagtgcacggcacaagcagcccttacaaaggactggacctgtccaagctgcacgagacactgagaacccacacacggctggtgtccctgttcaacaccacactgaccggactgcacgaggtgtccgctcagaatcctaccaactgctggatctgcctgcctctgaacttcagaccctacgtgtcaatccccgtgcctgagcagtggaacaacttcagcaccgagatcaataccaccagcgtgctcgtgggacccctggtgtccaatctggaaatcacccacaccagcaacctgacctgcgtgaagttctccaacaccacctacaccaccaacagccagtgcatcagatgggtcacccctccaacacagatcgtgtgtctgcccagcggcatcttcttcgtgtgtggcacaagcgcctaccgctgcctgaatggcagcagcgagtctatgtgcttcctgagcttcctggtgcctcctatgaccatctacaccgagcaggacctgtacagctacgtgatctccaagcctcggaacaagcgggtgcccatcctgccttttgtgattggagctggcgtgctgggagccctcggaactggaatcggaggcatcaccacctctactcagttctactacaaactatctcaagaactaaatggggacatggaaagagtggccgacagcctggtcacactccaggaccagctcaattctctggctgccgtggtgctccagaatcggagagcactcgatctgctgacagccgagagaggcggcacctgtctgtttctgggcgaagagtgctgctactacgtgaaccagtccggaatcgtcactgagaagcttaaagaaattcgagatcgaatccagcggagagccgaggaactgagaaacacaggaccttggggcctgctgcaaggactgctcccttacctgctgcctttcctgggaccactgctgactctgctgctcctgctgaccatcggaccctgcatcttcaacagactgaccgccttcatcaacgacaagctgaacatcatccacgctatggtgctgacacagcagtaccaggtgctgcggacagatgaggaa

SEQ ID NO: 178 - DNA, 1500 bp, synthetic construct
  source 1..1500: mol_type = other DNA
atggagacagacacactcctgctatgggtactgctgctctgggttccaggttccactggtgacgcaccccctccatgccgctgtatgacaagcagcagcccctaccaagagttcctgtggcgaatgcagaggcccggcaacattgacgcccctagctacagaagcctgagcaagggcacccctaccttcacagcccacacacacatgccccggaactgctaccatagcgccacactgtgtatgcacgccaacacacactactggaccggcaagatgattaaccctagctgccctggcggcctgggcgtgacagtttgttggacctactttacccagaccggcatgtccgatggtggcggagttcaagaccaggccagagaaaagcacgtgaaagaagtgatctcccagctgaccagagtgcacggcacaagcagcccttacaaaggactggacctgtccaagctgcacgagacactgagaacccacacacggctggtgtccctgttcaacaccacactgaccggactgcacgaggtgtccgctcagaatcctaccaactgctggatctgcctgcctctgaacttcagaccctacgtgtcaatccccgtgcctgagcagtggaacaacttcagcaccgagatcaataccaccagcgtgctcgtgggacccctggtgtccaatctggaaatcacccacaccagcaacctgacctgcgtgaagttctccaacaccacctacaccaccaacagccagtgcatcagatgggtcacccctccaacacagatcgtgtgtctgcccagcggcatcttcttcgtgtgtggcacaagcgcctaccgctgcctgaatggcagcagcgagtctatgtgcttcctgagcttcctggtgcctcctatgaccatctacaccgagcaggacctgtacagctacgtgatctccaagcctcggaacaagcgggtgcccatcctgccttttgtgattggagctggcgtgctgggagccctcggaactggaatcggaggcatcaccacctctactcagttctactacaaactatctcaagaactaaatggggacatggaaagagtggccgacagcctggtcacactccaggaccagctcaattctctggctgccgtggtgctccagaatcggagagcactcgatctgctgacagccgagagaggcggcacctgtctgtttctgggcgaagagtgctgctactacgtgaaccagtccggaatcgtcactgagaagcttaaagaaattcgagatcgaatccagcggagagccgaggaactgagaaacacaggaccttggggcctgctgcaaggactgctcccttacctgctgcctttcctgggaccactgctgactctgctgctcctgctgaccatcggaccctgcatcttcaacagactgaccgccttcatcaacgacaagctgaacatcatccacgctatggtgctgacacagcagtaccaggtgctgcggacagatgag

SEQ ID NO: 179 - DNA, 1497 bp, synthetic construct
  source 1..1497: mol_type = other DNA
atggagacagacacactcctgctatgggtactgctgctctgggttccaggttccactggtgacgcaccccctccatgccgctgtatgacaagcagcagcccctaccaagagttcctgtggcgaatgcagaggcccggcaacattgacgcccctagctacagaagcctgagcaagggcacccctaccttcacagcccacacacacatgccccggaactgctaccatagcgccacactgtgtatgcacgccaacacacactactggaccggcaagatgattaaccctagctgccctggcggcctgggcgtgacagtttgttggacctactttacccagaccggcatgtccgatggtggcggagttcaagaccaggccagagaaaagcacgtgaaagaagtgatctcccagctgaccagagtgcacggcacaagcagcccttacaaaggactggacctgtccaagctgcacgagacactgagaacccacacacggctggtgtccctgttcaacaccacactgaccggactgcacgaggtgtccgctcagaatcctaccaactgctggatctgcctgcctctgaacttcagaccctacgtgtcaatccccgtgcctgagcagtggaacaacttcagcaccgagatcaataccaccagcgtgctcgtgggacccctggtgtccaatctggaaatcacccacaccagcaacctgacctgcgtgaagttctccaacaccacctacaccaccaacagccagtgcatcagatgggtcacccctccaacacagatcgtgtgtctgcccagcggcatcttcttcgtgtgtggcacaagcgcctaccgctgcctgaatggcagcagcgagtctatgtgcttcctgagcttcctggtgcctcctatgaccatctacaccgagcaggacctgtacagctacgtgatctccaagcctcggaacaagcgggtgcccatcctgccttttgtgattggagctggcgtgctgggagccctcggaactggaatcggaggcatcaccacctctactcagttctactacaaactatctcaagaactaaatggggacatggaaagagtggccgacagcctggtcacactccaggaccagctcaattctctggctgccgtggtgctccagaatcggagagcactcgatctgctgacagccgagagaggcggcacctgtctgtttctgggcgaagagtgctgctactacgtgaaccagtccggaatcgtcactgagaagcttaaagaaattcgagatcgaatccagcggagagccgaggaactgagaaacacaggaccttggggcctgctgcaaggactgctcccttacctgctgcctttcctgggaccactgctgactctgctgctcctgctgaccatcggaccctgcatcttcaacagactgaccgccttcatcaacgacaagctgaacatcatccacgctatggtgctgacacagcagtaccaggtgctgcggacagat

SEQ ID NO: 180 - DNA, 1494 bp, synthetic construct
  source 1..1494: mol_type = other DNA
atggagacagacacactcctgctatgggtactgctgctctgggttccaggttccactggtgacgcaccccctccatgccgctgtatgacaagcagcagcccctaccaagagttcctgtggcgaatgcagaggcccggcaacattgacgcccctagctacagaagcctgagcaagggcacccctaccttcacagcccacacacacatgccccggaactgctaccatagcgccacactgtgtatgcacgccaacacacactactggaccggcaagatgattaaccctagctgccctggcggcctgggcgtgacagtttgttggacctactttacccagaccggcatgtccgatggtggcggagttcaagaccaggccagagaaaagcacgtgaaagaagtgatctcccagctgaccagagtgcacggcacaagcagcccttacaaaggactggacctgtccaagctgcacgagacactgagaacccacacacggctggtgtccctgttcaacaccacactgaccggactgcacgaggtgtccgctcagaatcctaccaactgctggatctgcctgcctctgaacttcagaccctacgtgtcaatccccgtgcctgagcagtggaacaacttcagcaccgagatcaataccaccagcgtgctcgtgggacccctggtgtccaatctggaaatcacccacaccagcaacctgacctgcgtgaagttctccaacaccacctacaccaccaacagccagtgcatcagatgggtcacccctccaacacagatcgtgtgtctgcccagcggcatcttcttcgtgtgtggcacaagcgcctaccgctgcctgaatggcagcagcgagtctatgtgcttcctgagcttcctggtgcctcctatgaccatctacaccgagcaggacctgtacagctacgtgatctccaagcctcggaacaagcgggtgcccatcctgccttttgtgattggagctggcgtgctgggagccctcggaactggaatcggaggcatcaccacctctactcagttctactacaaactatctcaagaactaaatggggacatggaaagagtggccgacagcctggtcacactccaggaccagctcaattctctggctgccgtggtgctccagaatcggagagcactcgatctgctgacagccgagagaggcggcacctgtctgtttctgggcgaagagtgctgctactacgtgaaccagtccggaatcgtcactgagaagcttaaagaaattcgagatcgaatccagcggagagccgaggaactgagaaacacaggaccttggggcctgctgcaaggactgctcccttacctgctgcctttcctgggaccactgctgactctgctgctcctgctgaccatcggaccctgcatcttcaacagactgaccgccttcatcaacgacaagctgaacatcatccacgctatggtgctgacacagcagtaccaggtgctgcggaca

SEQ ID NO: 181 - DNA, 1494 bp, synthetic construct; identical to SEQ ID NO: 180
  source 1..1494: mol_type = other DNA

SEQ ID NO: 182 - DNA, 1488 bp, synthetic construct
  source 1..1488: mol_type = other DNA
atggagacagacacactcctgctatgggtactgctgctctgggttccaggttccactggtgacgcaccccctccatgccgctgtatgacaagcagcagcccctaccaagagttcctgtggcgaatgcagaggcccggcaacattgacgcccctagctacagaagcctgagcaagggcacccctaccttcacagcccacacacacatgccccggaactgctaccatagcgccacactgtgtatgcacgccaacacacactactggaccggcaagatgattaaccctagctgccctggcggcctgggcgtgacagtttgttggacctactttacccagaccggcatgtccgatggtggcggagttcaagaccaggccagagaaaagcacgtgaaagaagtgatctcccagctgaccagagtgcacggcacaagcagcccttacaaaggactggacctgtccaagctgcacgagacactgagaacccacacacggctggtgtccctgttcaacaccacactgaccggactgcacgaggtgtccgctcagaatcctaccaactgctggatctgcctgcctctgaacttcagaccctacgtgtcaatccccgtgcctgagcagtggaacaacttcagcaccgagatcaataccaccagcgtgctcgtgggacccctggtgtccaatctggaaatcacccacaccagcaacctgacctgcgtgaagttctccaacaccacctacaccaccaacagccagtgcatcagatgggtcacccctccaacacagatcgtgtgtctgcccagcggcatcttcttcgtgtgtggcacaagcgcctaccgctgcctgaatggcagcagcgagtctatgtgcttcctgagcttcctggtgcctcctatgaccatctacaccgagcaggacctgtacagctacgtgatctccaagcctcggaacaagcgggtgcccatcctgccttttgtgattggagctggcgtgctgggagccctcggaactggaatcggaggcatcaccacctctactcagttctactacaaactatctcaagaactaaatggggacatggaaagagtggccgacagcctggtcacactccaggaccagctcaattctctggctgccgtggtgctccagaatcggagagcactcgatctgctgacagccgagagaggcggcacctgtctgtttctgggcgaagagtgctgctactacgtgaaccagtccggaatcgtcactgagaagcttaaagaaattcgagatcgaatccagcggagagccgaggaactgagaaacacaggaccttggggcctgctgcaaggactgctcccttacctgctgcctttcctgggaccactgctgactctgctgctcctgctgaccatcggaccctgcatcttcaacagactgaccgccttcatcaacgacaagctgaacatcatccacgctatggtgctgacacagcagtaccaggtgctg

SEQ ID NO: 183 - DNA, 1485 bp, synthetic construct
  source 1..1485: mol_type = other DNA
atggagacagacacactcctgctatgggtactgctgctctgggttccaggttccactggtgacgcaccccctccatgccgctgtatgacaagcagcagcccctaccaagagttcctgtggcgaatgcagaggcccggcaacattgacgcccctagctacagaagcctgagcaagggcacccctaccttcacagcccacacacacatgccccggaactgctaccatagcgccacactgtgtatgcacgccaacacacactactggaccggcaagatgattaaccctagctgccctggcggcctgggcgtgacagtttgttggacctactttacccagaccggcatgtccgatggtggcggagttcaagaccaggccagagaaaagcacgtgaaagaagtgatctcccagctgaccagagtgcacggcacaagcagcccttacaaaggactggacctgtccaagctgcacgagacactgagaacccacacacggctggtgtccctgttcaacaccacactgaccggactgcacgaggtgtccgctcagaatcctaccaactgctggatctgcctgcctctgaacttcagaccctacgtgtcaatccccgtgcctgagcagtggaacaacttcagcaccgagatcaataccaccagcgtgctcgtgggacccctggtgtccaatctggaaatcacccacaccagcaacctgacctgcgtgaagttctccaacaccacctacaccaccaacagccagtgcatcagatgggtcacccctccaacacagatcgtgtgtctgcccagcggcatcttcttcgtgtgtggcacaagcgcctaccgctgcctgaatggcagcagcgagtctatgtgcttcctgagcttcctggtgcctcctatgaccatctacaccgagcaggacctgtacagctacgtgatctccaagcctcggaacaagcgggtgcccatcctgccttttgtgattggagctggcgtgctgggagccctcggaactggaatcggaggcatcaccacctctactcagttctactacaaactatctcaagaactaaatggggacatggaaagagtggccgacagcctggtcacactccaggaccagctcaattctctggctgccgtggtgctccagaatcggagagcactcgatctgctgacagccgagagaggcggcacctgtctgtttctgggcgaagagtgctgctactacgtgaaccagtccggaatcgtcactgagaagcttaaagaaattcgagatcgaatccagcggagagccgaggaactgagaaacacaggaccttggggcctgctgcaaggactgctcccttacctgctgcctttcctgggaccactgctgactctgctgctcctgctgaccatcggaccctgcatcttcaacagactgaccgccttcatcaacgacaagctgaacatcatccacgctatggtgctgacacagcagtaccaggtg

SEQ ID NO: 184 - DNA, 1482 bp, synthetic construct
  source 1..1482: mol_type = other DNA
atggagacagacacactcctgctatgggtactgctgctctgggttccaggttccactggtgacgcaccccctccatgccgctgtatgacaagcagcagcccctaccaagagttcctgtggcgaatgcagaggcccggcaacattgacgcccctagctacagaagcctgagcaagggcacccctaccttcacagcccacacacacatgccccggaactgctaccatagcgccacactgtgtatgcacgccaacacacactactggaccggcaagatgattaaccctagctgccctggcggcctgggcgtgacagtttgttggacctactttacccagaccggcatgtccgatggtggcggagttcaagaccaggccagagaaaagcacgtgaaagaagtgatctcccagctgaccagagtgcacggcacaagcagcccttacaaaggactggacctgtccaagctgcacgagacactgagaacccacacacggctggtgtccctgttcaacaccacactgaccggactgcacgaggtgtccgctcagaatcctaccaactgctggatctgcctgcctctgaacttcagaccctacgtgtcaatccccgtgcctgagcagtggaacaacttcagcaccgagatcaataccaccagcgtgctcgtgggacccctggtgtccaatctggaaatcacccacaccagcaacctgacctgcgtgaagttctccaacaccacctacaccaccaacagccagtgcatcagatgggtcacccctccaacacagatcgtgtgtctgcccagcggcatcttcttcgtgtgtggcacaagcgcctaccgctgcctgaatggcagcagcgagtctatgtgcttcctgagcttcctggtgcctcctatgaccatctacaccgagcaggacctgtacagctacgtgatctccaagcctcggaacaagcgggtgcccatcctgccttttgtgattggagctggcgtgctgggagccctcggaactggaatcggaggcatcaccacctctactcagttctactacaaactatctcaagaactaaatggggacatggaaagagtggccgacagcctggtcacactccaggaccagctcaattctctggctgccgtggtgctccagaatcggagagcactcgatctgctgacagccgagagaggcggcacctgtctgtttctgggcgaagagtgctgctactacgtgaaccagtccggaatcgtcactgagaagcttaaagaaattcgagatcgaatccagcggagagccgaggaactgagaaacacaggaccttggggcctgctgcaaggactgctcccttacctgctgcctttcctgggaccactgctgactctgctgctcctgctgaccatcggaccctgcatcttcaacagactgaccgccttcatcaacgacaagctgaacatcatccacgctatggtgctgacacagcagtaccag

SEQ ID NO: 185 - DNA, 1479 bp, synthetic construct
  source 1..1479: mol_type = other DNA
atggagacagacacactcctgctatgggtactgctgctctgggttccaggttccactggtgacgcaccccctccatgccgctgtatgacaagcagcagcccctaccaagagttcctgtggcgaatgcagaggcccggcaacattgacgcccctagctacagaagcctgagcaagggcacccctaccttcacagcccacacacacatgccccggaactgctaccatagcgccacactgtgtatgcacgccaacacacactactggaccggcaagatgattaaccctagctgccctggcggcctgggcgtgacagtttgttggacctactttacccagaccggcatgtccgatggtggcggagttcaagaccaggccagagaaaagcacgtgaaagaagtgatctcccagctgaccagagtgcacggcacaagcagcccttacaaaggactggacctgtccaagctgcacgagacactgagaacccacacacggctggtgtccctgttcaacaccacactgaccggactgcacgaggtgtccgctcagaatcctaccaactgctggatctgcctgcctctgaacttcagaccctacgtgtcaatccccgtgcctgagcagtggaacaacttcagcaccgagatcaataccaccagcgtgctcgtgggacccctggtgtccaatctggaaatcacccacaccagcaacctgacctgcgtgaagttctccaacaccacctacaccaccaacagccagtgcatcagatgggtcacccctccaacacagatcgtgtgtctgcccagcggcatcttcttcgtgtgtggcacaagcgcctaccgctgcctgaatggcagcagcgagtctatgtgcttcctgagcttcctggtgcctcctatgaccatctacaccgagcaggacctgtacagctacgtgatctccaagcctcggaacaagcgggtgcccatcctgccttttgtgattggagctggcgtgctgggagccctcggaactggaatcggaggcatcaccacctctactcagttctactacaaactatctcaagaactaaatggggacatggaaagagtggccgacagcctggtcacactccaggaccagctcaattctctggctgccgtggtgctccagaatcggagagcactcgatctgctgacagccgagagaggcggcacctgtctgtttctgggcgaagagtgctgctactacgtgaaccagtccggaatcgtcactgagaagcttaaagaaattcgagatcgaatccagcggagagccgaggaactgagaaacacaggaccttggggcctgctgcaaggactgctcccttacctgctgcctttcctgggaccactgctgactctgctgctcctgctgaccatcggaccctgcatcttcaacagactgaccgccttcatcaacgacaagctgaacatcatccacgctatggtgctgacacagcagtac

SEQ ID NO: 186 - DNA, 1476 bp, synthetic construct
  source 1..1476: mol_type = other DNA
atggagacagacacactcctgctatgggtactgctgctctgggttccaggttccactggtgacgcaccccctccatgccgctgtatgacaagcagcagcccctaccaagagttcctgtggcgaatgcagaggcccggcaacattgacgcccctagctacagaagcctgagcaagggcacccctaccttcacagcccacacacacatgccccggaactgctaccatagcgccacactgtgtatgcacgccaacacacactactggaccggcaagatgattaaccctagctgccctggcggcctgggcgtgacagtttgttggacctactttacccagaccggcatgtccgatggtggcggagttcaagaccaggccagagaaaagcacgtgaaagaagtgatctcccagctgaccagagtgcacggcacaagcagcccttacaaaggactggacctgtccaagctgcacgagacactgagaacccacacacggctggtgtccctgttcaacaccacactgaccggactgcacgaggtgtccgctcagaatcctaccaactgctggatctgcctgcctctgaacttcagaccctacgtgtcaatccccgtgcctgagcagtggaacaacttcagcaccgagatcaataccaccagcgtgctcgtgggacccctggtgtccaatctggaaatcacccacaccagcaacctgacctgcgtgaagttctccaacaccacctacaccaccaacagccagtgcatcagatgggtcacccctccaacacagatcgtgtgtctgcccagcggcatcttcttcgtgtgtggcacaagcgcctaccgctgcctgaatggcagcagcgagtctatgtgcttcctgagcttcctggtgcctcctatgaccatctacaccgagcaggacctgtacagctacgtgatctccaagcctcggaacaagcgggtgcccatcctgccttttgtgattggagctggcgtgctgggagccctcggaactggaatcggaggcatcaccacctctactcagttctactacaaactatctcaagaactaaatggggacatggaaagagtggccgacagcctggtcacactccaggaccagctcaattctctggctgccgtggtgctccagaatcggagagcactcgatctgctgacagccgagagaggcggcacctgtctgtttctgggcgaagagtgctgctactacgtgaaccagtccggaatcgtcactgagaagcttaaagaaattcgagatcgaatccagcggagagccgaggaactgagaaacacaggaccttggggcctgctgcaaggactgctcccttacctgctgcctttcctgggaccactgctgactctgctgctcctgctgaccatcggaccctgcatcttcaacagactgaccgccttcatcaacgacaagctgaacatcatccacgctatggtgctgacacagcag

SEQ ID NO: 187 - DNA, 1473 bp, synthetic construct
  source 1..1473: mol_type = other DNA
atggagacagacacactcctgctatgggtactgctgctctgggttccaggttccactggtgacgcaccccctccatgccgctgtatgacaagcagcagcccctaccaagagttcctgtggcgaatgcagaggcccggcaacattgacgcccctagctacagaagcctgagcaagggcacccctaccttcacagcccacacacacatgccccggaactgctaccatagcgccacactgtgtatgcacgccaacacacactactggaccggcaagatgattaaccctagctgccctggcggcctgggcgtgacagtttgttggacctactttacccagaccggcatgtccgatggtggcggagttcaagaccaggccagagaaaagcacgtgaaagaagtgatctcccagctgaccagagtgcacggcacaagcagcccttacaaaggactggacctgtccaagctgcacgagacactgagaacccacacacggctggtgtccctgttcaacaccacactgaccggactgcacgaggtgtccgctcagaatcctaccaactgctggatctgcctgcctctgaacttcagaccctacgtgtcaatccccgtgcctgagcagtggaacaacttcagcaccgagatcaataccaccagcgtgctcgtgggacccctggtgtccaatctggaaatcacccacaccagcaacctgacctgcgtgaagttctccaacaccacctacaccaccaacagccagtgcatcagatgggtcacccctccaacacagatcgtgtgtctgcccagcggcatcttcttcgtgtgtggcacaagcgcctaccgctgcctgaatggcagcagcgagtctatgtgcttcctgagcttcctggtgcctcctatgaccatctacaccgagcaggacctgtacagctacgtgatctccaagcctcggaacaagcgggtgcccatcctgccttttgtgattggagctggcgtgctgggagccctcggaactggaatcggaggcatcaccacctctactcagttctactacaaactatctcaagaactaaatggggacatggaaagagtggccgacagcctggtcacactccaggaccagctcaattctctggctgccgtggtgctccagaatcggagagcactcgatctgctgacagccgagagaggcggcacctgtctgtttctgggcgaagagtgctgctactacgtgaaccagtccggaatcgtcactgagaagcttaaagaaattcgagatcgaatccagcggagagccgaggaactgagaaacacaggaccttggggcctgctgcaaggactgctcccttacctgctgcctttcctgggaccactgctgactctgctgctcctgctgaccatcggaccctgcatcttcaacagactgaccgccttcatcaacgacaagctgaacatcatccacgctatggtgctgacacag

SEQ ID NO: 188 - DNA, 1470 bp, synthetic construct
  source 1..1470: mol_type = other DNA
atggagacagacacactcctgctatgggtactgctgctctgggttccaggttccactggtgacgcaccccctccatgccgctgtatgacaagcagcagcccctaccaagagttcctgtggcgaatgcagaggcccggcaacattgacgcccctagctacagaagcctgagcaagggcacccctaccttcacagcccacacacacatgccccggaactgctaccatagcgccacactgtgtatgcacgccaacacacactactggaccggcaagatgattaaccctagctgccctggcggcctgggcgtgacagtttgttggacctactttacccagaccggcatgtccgatggtggcggagttcaagaccaggccagagaaaagcacgtgaaagaagtgatctcccagctgaccagagtgcacggcacaagcagcccttacaaaggactggacctgtccaagctgcacgagacactgagaacccacacacggctggtgtccctgttcaacaccacactgaccggactgcacgaggtgtccgctcagaatcctaccaactgctggatctgcctgcctctgaacttcagaccctacgtgtcaatccccgtgcctgagcagtggaacaacttcagcaccgagatcaataccaccagcgtgctcgtgggacccctggtgtccaatctggaaatcacccacaccagcaacctgacctgcgtgaagttctccaacaccacctacaccaccaacagccagtgcatcagatgggtcacccctccaacacagatcgtgtgtctgcccagcggcatcttcttcgtgtgtggcacaagcgcctaccgctgcctgaatggcagcagcgagtctatgtgcttcctgagcttcctggtgcctcctatgaccatctacaccgagcaggacctgtacagctacgtgatctccaagcctcggaacaagcgggtgcccatcctgccttttgtgattggagctggcgtgctgggagccctcggaactggaatcggaggcatcaccacctctactcagttctactacaaactatctcaagaactaaatggggacatggaaagagtggccgacagcctggtcacactccaggaccagctcaattctctggctgccgtggtgctccagaatcggagagcactcgatctgctgacagccgagagaggcggcacctgtctgtttctgggcgaagagtgctgctactacgtgaaccagtccggaatcgtcactgagaagcttaaagaaattcgagatcgaatccagcggagagccgaggaactgagaaacacaggaccttggggcctgctgcaaggactgctcccttacctgctgcctttcctgggaccactgctgactctgctgctcctgctgaccatcggaccctgcatcttcaacagactgaccgccttcatcaacgacaagctgaacatcatccacgctatggtgctgaca

SEQ ID NO: 189 - DNA, 1503 bp, synthetic construct
  source 1..1503: mol_type = other DNA
atggagacagacacactcctgctatgggtactgctgctctgggttccaggttccactggtgacgcaccccctccatgccgctgtatgacaagcagcagcccctaccaagagttcctgtggcgaatgcagaggcccggcaacattgacgcccctagctacagaagcctgagcaagggcacccctaccttcacagcccacacacacatgccccggaactgctaccatagcgccacactgtgtatgcacgccaacacacactactggaccggcaagatgattaaccctagctgccctggcggcctgggcgtgacagtttgttggacctactttacccagaccggcatgtccgatggtggcggagttcaagaccaggccagagaaaagcacgtgaaagaagtgatctcccagctgaccagagtgcacggcacaagcagcccttacaaaggactggacctgtccaagctgcacgagacactgagaacccacacacggctggtgtccctgttcaacaccacactgaccggactgcacgaggtgtccgctcagaatcctaccaactgctggatctgcctgcctctgaacttcagaccctacgtgtcaatccccgtgcctgagcagtggaacaacttcagcaccgagatcaataccaccagcgtgctcgtgggacccctggtgtccaatctggaaatcacccacaccagcaacctgacctgcgtgaagttctccaacaccacctacaccaccaacagccagtgcatcagatgggtcacccctccaacacagatcgtgtgtctgcccagcggcatcttcttcgtgtgtggcacaagcgcctaccgctgcctgaatggcagcagcgagtctatgtgcttcctgagcttcctggtgcctcctatgaccatctacaccgagcaggacctgtacagctacgtgatctccaagcctcggaacaagcgggtgcccatcctgccttttgtgattggagctggcgtgctgggagccctcggaactggaatcggaggcatcaccacctctactcagttctactacaaactatctcaagaactaaatggggacatggaaagagtggccgacagcctggtcacactccaggaccagctcaattctctggctgccgtggtgctccagaatcggagagcactcgatctgctgacagccgagagaggcggcacctgtctgtttctgggcgaagagtgctgctactacgtgaaccagtccggaatcgtcactgagaagcttaaagaaattcgagatcgaatccagcggagagccgaggaactgagaaacacaggaccttggggcctgctgagccagtggatgccttggattctgcccttcctgggacctctggccgccatcattctgctgctgctgttcggaccctgcatcttcaacagactgaccgccttcatcaacgacaagctgaacatcatccacgctatggtgctgacacagcagtaccaggtgctgcggacagatgaggaa

SEQ ID NO: 190 - DNA, 1500 bp, synthetic construct
  source 1..1500: mol_type = other DNA
atggagacagacacactcctgctatgggtactgctgctctgggttccaggttccactggtgacgcaccccctccatgccgctgtatgacaagcagcagcccctaccaagagttcctgtggcgaatgcagaggcccggcaacattgacgcccctagctacagaagcctgagcaagggcacccctaccttcacagcccacacacacatgccccggaactgctaccatagcgccacactgtgtatgcacgccaacacacactactggaccggcaagatgattaaccctagctgccctggcggcctgggcgtgacagtttgttggacctactttacccagaccggcatgtccgatggtggcggagttcaagaccaggccagagaaaagcacgtgaaagaagtgatctcccagctgaccagagtgcacggcacaagcagcccttacaaaggactggacctgtccaagctgcacgagacactgagaacccacacacggctggtgtccctgttcaacaccacactgaccggactgcacgaggtgtccgctcagaatcctaccaactgctggatctgcctgcctctgaacttcagaccctacgtgtcaatccccgtgcctgagcagtggaacaacttcagcaccgagatcaataccaccagcgtgctcgtgggacccctggtgtccaatctggaaatcacccacaccagcaacctgacctgcgtgaagttctccaacaccacctacaccaccaacagccagtgcatcagatgggtcacccctccaacacagatcgtgtgtctgcccagcggcatcttcttcgtgtgtggcacaagcgcctaccgctgcctgaatggcagcagcgagtctatgtgcttcctgagcttcctggtgcctcctatgaccatctacaccgagcaggacctgtacagctacgtgatctccaagcctcggaacaagcgggtgcccatcctgccttttgtgattggagctggcgtgctgggagccctcggaactggaatcggaggcatcaccacctctactcagttctactacaaactatctcaagaactaaatggggacatggaaagagtggccgacagcctggtcacactccaggaccagctcaattctctggctgccgtggtgctccagaatcggagagcactcgatctgctgacagccgagagaggcggcacctgtctgtttctgggcgaagagtgctgctactacgtgaaccagtccggaatcgtcactgagaagcttaaagaaattcgagatcgaatccagcggagagccgaggaactgagaaacacaggaccttggggcctgctgagccagtggatgccttggattctgcccttcctgggacctctggccgccatcattctgctgctgctgttcggaccctgcatcttcaacagactgaccgccttcatcaacgacaagctgaacatcatccacgctatggtgctgacacagcagtaccaggtgctgcggacagatgag

SEQ ID NO: 191 - DNA, 1497 bp, synthetic construct
  source 1..1497: mol_type = other DNA
atggagacagacacactcctgctatgggtactgctgctctgggttccaggttccactggtgacgcaccccctccatgccgctgtatgacaagcagcagcccctaccaagagttcctgtggcgaatgcagaggcccggcaacattgacgcccctagctacagaagcctgagcaagggcacccctaccttcacagcccacacacacatgccccggaactgctaccatagcgccacactgtgtatgcacgccaacacacactactggaccggcaagatgattaaccctagctgccctggcggcctgggcgtgacagtttgttggacctactttacccagaccggcatgtccgatggtggcggagttcaagaccaggccagagaaaagcacgtgaaagaagtgatctcccagctgaccagagtgcacggcacaagcagcccttacaaaggactggacctgtccaagctgcacgagacactgagaacccacacacggctggtgtccctgttcaacaccacactgaccggactgcacgaggtgtccgctcagaatcctaccaactgctggatctgcctgcctctgaacttcagaccctacgtgtcaatccccgtgcctgagcagtggaacaacttcagcaccgagatcaataccaccagcgtgctcgtgggacccctggtgtccaatctggaaatcacccacaccagcaacctgacctgcgtgaagttctccaacaccacctacaccaccaacagccagtgcatcagatgggtcacccctccaacacagatcgtgtgtctgcccagcggcatcttcttcgtgtgtggcacaagcgcctaccgctgcctgaatggcagcagcgagtctatgtgcttcctgagcttcctggtgcctcctatgaccatctacaccgagcaggacctgtacagctacgtgatctccaagcctcggaacaagcgggtgcccatcctgccttttgtgattggagctggcgtgctgggagccctcggaactggaatcggaggcatcaccacctctactcagttctactacaaactatctcaagaactaaatggggacatggaaagagtggccgacagcctggtcacactccaggaccagctcaattctctggctgccgtggtgctccagaatcggagagcactcgatctgctgacagccgagagaggcggcacctgtctgtttctgggcgaagagtgctgctactacgtgaaccagtccggaatcgtcactgagaagcttaaagaaattcgagatcgaatccagcggagagccgaggaactgagaaacacaggaccttggggcctgctgagccagtggatgccttggattctgcccttcctgggacctctggccgccatcattctgctgctgctgttcggaccctgcatcttcaacagactgaccgccttcatcaacgacaagctgaacatcatccacgctatggtgctgacacagcagtaccaggtgctgcggacagat

SEQ ID NO: 192 - DNA, 1494 bp, synthetic construct
  source 1..1494: mol_type = other DNA
atggagacagacacactcctgctatgggtactgctgctctgggttccaggttccactggtgacgcaccccctccatgccgctgtatgacaagcagcagcccctaccaagagttcctgtggcgaatgcagaggcccggcaacattgacgcccctagctacagaagcctgagcaagggcacccctaccttcacagcccacacacacatgccccggaactgctaccatagcgccacactgtgtatgcacgccaacacacactactggaccggcaagatgattaaccctagctgccctggcggcctgggcgtgacagtttgttggacctactttacccagaccggcatgtccgatggtggcggagttcaagaccaggccagagaaaagcacgtgaaagaagtgatctcccagctgaccagagtgcacggcacaagcagcccttacaaaggactggacctgtccaagctgcacgagacactgagaacccacacacggctggtgtccctgttcaacaccacactgaccggactgcacgaggtgtccgctcagaatcctaccaactgctggatctgcctgcctctgaacttcagaccctacgtgtcaatccccgtgcctgagcagtggaacaacttcagcaccgagatcaataccaccagcgtgctcgtgggacccctggtgtccaatctggaaatcacccacaccagcaacctgacctgcgtgaagttctccaacaccacctacaccaccaacagccagtgcatcagatgggtcacccctccaacacagatcgtgtgtctgcccagcggcatcttcttcgtgtgtggcacaagcgcctaccgctgcctgaatggcagcagcgagtctatgtgcttcctgagcttcctggtgcctcctatgaccatctacaccgagcaggacctgtacagctacgtgatctccaagcctcggaacaagcgggtgcccatcctgccttttgtgattggagctggcgtgctgggagccctcggaactggaatcggaggcatcaccacctctactcagttctactacaaactatctcaagaactaaatggggacatggaaagagtggccgacagcctggtcacactccaggaccagctcaattctctggctgccgtggtgctccagaatcggagagcactcgatctgctgacagccgagagaggcggcacctgtctgtttctgggcgaagagtgctgctactacgtgaaccagtccggaatcgtcactgagaagcttaaagaaattcgagatcgaatccagcggagagccgaggaactgagaaacacaggaccttggggcctgctgagccagtggatgccttggattctgcccttcctgggacctctggccgccatcattctgctgctgctgttcggaccctgcatcttcaacagactgaccgccttcatcaacgacaagctgaacatcatccacgctatggtgctgacacagcagtaccaggtgctgcggaca

SEQ ID NO: 193 - DNA, 1491 bp, synthetic construct
  source 1..1491: mol_type = other DNA
atggagacagacacactcctgctatgggtactgctgctctgggttccaggttccactggtgacgcaccccctccatgccgctgtatgacaagcagcagcccctaccaagagttcctgtggcgaatgcagaggcccggcaacattgacgcccctagctacagaagcctgagcaagggcacccctaccttcacagcccacacacacatgccccggaactgctaccatagcgccacactgtgtatgcacgccaacacacactactggaccggcaagatgattaaccctagctgccctggcggcctgggcgtgacagtttgttggacctactttacccagaccggcatgtccgatggtggcggagttcaagaccaggccagagaaaagcacgtgaaagaagtgatctcccagctgaccagagtgcacggcacaagcagcccttacaaaggactggacctgtccaagctgcacgagacactgagaacccacacacggctggtgtccctgttcaacaccacactgaccggactgcacgaggtgtccgctcagaatcctaccaactgctggatctgcctgcctctgaacttcagaccctacgtgtcaatccccgtgcctgagcagtggaacaacttcagcaccgagatcaataccaccagcgtgctcgtgggacccctggtgtccaatctggaaatcacccacaccagcaacctgacctgcgtgaagttctccaacaccacctacaccaccaacagccagtgcatcagatgggtcacccctccaacacagatcgtgtgtctgcccagcggcatcttcttcgtgtgtggcacaagcgcctaccgctgcctgaatggcagcagcgagtctatgtgcttcctgagcttcctggtgcctcctatgaccatctacaccgagcaggacctgtacagctacgtgatctccaagcctcggaacaagcgggtgcccatcctgccttttgtgattggagctggcgtgctgggagccctcggaactggaatcggaggcatcaccacctctactcagttctactacaaactatctcaagaactaaatggggacatggaaagagtggccgacagcctggtcacactccaggaccagctcaattctctggctgccgtggtgctccagaatcggagagcactcgatctgctgacagccgagagaggcggcacctgtctgtttctgggcgaagagtgctgctactacgtgaaccagtccggaatcgtcactgagaagcttaaagaaattcgagatcgaatccagcggagagccgaggaactgagaaacacaggaccttggggcctgctgagccagtggatgccttggattctgcccttcctgggacctctggccgccatcattctgctgctgctgttcggaccctgcatcttcaacagactgaccgccttcatcaacgacaagctgaacatcatccacgctatggtgctgacacagcagtaccaggtgctgcgg

SEQ ID NO: 194 - DNA, 1488 bp, synthetic construct
  source 1..1488: mol_type = other DNA
atggagacagacacactcctgctatgggtactgctgctctgggttccaggttccactggtgacgcaccccctccatgccgctgtatgacaagcagcagcccctaccaagagttcctgtggcgaatgcagaggcccggcaacattgacgcccctagctacagaagcctgagcaagggcacccctaccttcacagcccacacacacatgccccggaactgctaccatagcgccacactgtgtatgcacgccaacacacactactggaccggcaagatgattaaccctagctgccctggcggcctgggcgtgacagtttgttggacctactttacccagaccggcatgtccgatggtggcggagttcaagaccaggccagagaaaagcacgtgaaagaagtgatctcccagctgaccagagtgcacggcacaagcagcccttacaaaggactggacctgtccaagctgcacgagacactgagaacccacacacggctggtgtccctgttcaacaccacactgaccggactgcacgaggtgtccgctcagaatcctaccaactgctggatctgcctgcctctgaacttcagaccctacgtgtcaatccccgtgcctgagcagtggaacaacttcagcaccgagatcaataccaccagcgtgctcgtgggacccctggtgtccaatctggaaatcacccacaccagcaacctgacctgcgtgaagttctccaacaccacctacaccaccaacagccagtgcatcagatgggtcacccctccaacacagatcgtgtgtctgcccagcggcatcttcttcgtgtgtggcacaagcgcctaccgctgcctgaatggcagcagcgagtctatgtgcttcctgagcttcctggtgcctcctatgaccatctacaccgagcaggacctgtacagctacgtgatctccaagcctcggaacaagcgggtgcccatcctgccttttgtgattggagctggcgtgctgggagccctcggaactggaatcggaggcatcaccacctctactcagttctactacaaactatctcaagaactaaatggggacatggaaagagtggccgacagcctggtcacactccaggaccagctcaattctctggctgccgtggtgctccagaatcggagagcactcgatctgctgacagccgagagaggcggcacctgtctgtttctgggcgaagagtgctgctactacgtgaaccagtccggaatcgtcactgagaagcttaaagaaattcgagatcgaatccagcggagagccgaggaactgagaaacacaggaccttggggcctgctgagccagtggatgccttggattctgcccttcctgggacctctggccgccatcattctgctgctgctgttcggaccctgcatcttcaacagactgaccgccttcatcaacgacaagctgaacatcatccacgctatggtgctgacacagcagtaccaggtgctg

SEQ ID NO: 195 - DNA, 1485 bp, synthetic construct
  source 1..1485: mol_type = other DNA
atggagacagacacactcctgctatgggtactgctgctctgggttccaggttccactggtgacgcaccccctccatgccgctgtatgacaagcagcagcccctaccaagagttcctgtggcgaatgcagaggcccggcaacattgacgcccctagctacagaagcctgagcaagggcacccctaccttcacagcccacacacacatgccccggaactgctaccatagcgccacactgtgtatgcacgccaacacacactactggaccggcaagatgattaaccctagctgccctggcggcctgggcgtgacagtttgttggacctactttacccagaccggcatgtccgatggtggcggagttcaagaccaggccagagaaaagcacgtgaaagaagtgatctcccagctgaccagagtgcacggcacaagcagcccttacaaaggactggacctgtccaagctgcacgagacactgagaacccacacacggctggtgtccctgttcaacaccacactgaccggactgcacgaggtgtccgctcagaatcctaccaactgctggatctgcctgcctctgaacttcagaccctacgtgtcaatccccgtgcctgagcagtggaacaacttcagcaccgagatcaataccaccagcgtgctcgtgggacccctggtgtccaatctggaaatcacccacaccagcaacctgacctgcgtgaagttctccaacaccacctacaccaccaacagccagtgcatcagatgggtcacccctccaacacagatcgtgtgtctgcccagcggcatcttcttcgtgtgtggcacaagcgcctaccgctgcctgaatggcagcagcgagtctatgtgcttcctgagcttcctggtgcctcctatgaccatctacaccgagcaggacctgtacagctacgtgatctccaagcctcggaacaagcgggtgcccatcctgccttttgtgattggagctggcgtgctgggagccctcggaactggaatcggaggcatcaccacctctactcagttctactacaaactatctcaagaactaaatggggacatggaaagagtggccgacagcctggtcacactccaggaccagctcaattctctggctgccgtggtgctccagaatcggagagcactcgatctgctgacagccgagagaggcggcacctgtctgtttctgggcgaagagtgctgctactacgtgaaccagtccggaatcgtcactgagaagcttaaagaaattcgagatcgaatccagcggagagccgaggaactgagaaacacaggaccttggggcctgctgagccagtggatgccttggattctgcccttcctgggacctctggccgccatcattctgctgctgctgttcggaccctgcatcttcaacagactgaccgccttcatcaacgacaagctgaacatcatccacgctatggtgctgacacagcagtaccaggtg

SEQ ID NO: 196 - DNA, 1482 bp, synthetic construct
  source 1..1482: mol_type = other DNA
atggagacagacacactcctgctatgggtactgctgctctgggttccaggttccactggtgacgcaccccctccatgccgctgtatgacaagcagcagcccctaccaagagttcctgtggcgaatgcagaggcccggcaacattgacgcccctagctacagaagcctgagcaagggcacccctaccttcacagcccacacacacatgccccggaactgctaccatagcgccacactgtgtatgcacgccaacacacactactggaccggcaagatgattaaccctagctgccctggcggcctgggcgtgacagtttgttggacctactttacccagaccggcatgtccgatggtggcggagttcaagaccaggccagagaaaagcacgtgaaagaagtgatctcccagctgaccagagtgcacggcacaagcagcccttacaaaggactggacctgtccaagctgcacgagacactgagaacccacacacggctggtgtccctgttcaacaccacactgaccggactgcacgaggtgtccgctcagaatcctaccaactgctggatctgcctgcctctgaacttcagaccctacgtgtcaatccccgtgcctgagcagtggaacaacttcagcaccgagatcaataccaccagcgtgctcgtgggacccctggtgtccaatctggaaatcacccacaccagcaacctgacctgcgtgaagttctccaacaccacctacaccaccaacagccagtgcatcagatgggtcacccctccaacacagatcgtgtgtctgcccagcggcatcttcttcgtgtgtggcacaagcgcctaccgctgcctgaatggcagcagcgagtctatgtgcttcctgagcttcctggtgcctcctatgaccatctacaccgagcaggacctgtacagctacgtgatctccaagcctcggaacaagcgggtgcccatcctgccttttgtgattggagctggcgtgctgggagccctcggaactggaatcggaggcatcaccacctctactcagttctactacaaactatctcaagaactaaatggggacatggaaagagtggccgacagcctggtcacactccaggaccagctcaattctctggctgccgtggtgctccagaatcggagagcactcgatctgctgacagccgagagaggcggcacctgtctgtttctgggcgaagagtgctgctactacgtgaaccagtccggaatcgtcactgagaagcttaaagaaattcgagatcgaatccagcggagagccgaggaactgagaaacacaggaccttggggcctgctgagccagtggatgccttggattctgcccttcctgggacctctggccgccatcattctgctgctgctgttcggaccctgcatcttcaacagactgaccgccttcatcaacgacaagctgaacatcatccacgctatggtgctgacacagcagtaccag

SEQ ID NO: 197 - DNA, 1479 bp, synthetic construct
  source 1..1479: mol_type = other DNA
atggagacagacacactcctgctatgggtactgctgctctgggttccaggttccactggtgacgcaccccctccatgccgctgtatgacaagcagcagcccctaccaagagttcctgtggcgaatgcagaggcccggcaacattgacgcccctagctacagaagcctgagcaagggcacccctaccttcacagcccacacacacatgccccggaactgctaccatagcgccacactgtgtatgcacgccaacacacactactggaccggcaagatgattaaccctagctgccctggcggcctgggcgtgacagtttgttggacctactttacccagaccggcatgtccgatggtggcggagttcaagaccaggccagagaaaagcacgtgaaagaagtgatctcccagctgaccagagtgcacggcacaagcagcccttacaaaggactggacctgtccaagctgcacgagacactgagaacccacacacggctggtgtccctgttcaacaccacactgaccggactgcacgaggtgtccgctcagaatcctaccaactgctggatctgcctgcctctgaacttcagaccctacgtgtcaatccccgtgcctgagcagtggaacaacttcagcaccgagatcaataccaccagcgtgctcgtgggacccctggtgtccaatctggaaatcacccacaccagcaacctgacctgcgtgaagttctccaacaccacctacaccaccaacagccagtgcatcagatgggtcacccctccaacacagatcgtgtgtctgcccagcggcatcttcttcgtgtgtggcacaagcgcctaccgctgcctgaatggcagcagcgagtctatgtgcttcctgagcttcctggtgcctcctatgaccatctacaccgagcaggacctgtacagctacgtgatctccaagcctcggaacaagcgggtgcccatcctgccttttgtgattggagctggcgtgctgggagccctcggaactggaatcggaggcatcaccacctctactcagttctactacaaactatctcaagaactaaatggggacatggaaagagtggccgacagcctggtcacactccaggaccagctcaattctctggctgccgtggtgctccagaatcggagagcactcgatctgctgacagccgagagaggcggcacctgtctgtttctgggcgaagagtgctgctactacgtgaaccagtccggaatcgtcactgagaagcttaaagaaattcgagatcgaatccagcggagagccgaggaactgagaaacacaggaccttggggcctgctgagccagtggatgccttggattctgcccttcctgggacctctggccgccatcattctgctgctgctgttcggaccctgcatcttcaacagactgaccgccttcatcaacgacaagctgaacatcatccacgctatggtgctgacacagcagtac

SEQ ID NO: 198 - DNA, 1476 bp, synthetic construct
  source 1..1476: mol_type = other DNA
atggagacagacacactcctgctatgggtactgctgctctgggttccaggttccactggtgacgcaccccctccatgccgctgtatgacaagcagcagcccctaccaagagttcctgtggcgaatgcagaggcccggcaacattgacgcccctagctacagaagcctgagcaagggcacccctaccttcacagcccacacacacatgccccggaactgctaccatagcgccacactgtgtatgcacgccaacacacactactggaccggcaagatgattaaccctagctgccctggcggcctgggcgtgacagtttgttggacctactttacccagaccggcatgtccgatggtggcggagttcaagaccaggccagagaaaagcacgtgaaagaagtgatctcccagctgaccagagtgcacggcacaagcagcccttacaaaggactggacctgtccaagctgcacgagacactgagaacccacacacggctggtgtccctgttcaacaccacactgaccggactgcacgaggtgtccgctcagaatcctaccaactgctggatctgcctgcctctgaacttcagaccctacgtgtcaatccccgtgcctgagcagtggaacaacttcagcaccgagatcaataccaccagcgtgctcgtgggacccctggtgtccaatctggaaatcacccacaccagcaacctgacctgcgtgaagttctccaacaccacctacaccaccaacagccagtgcatcagatgggtcacccctccaacacagatcgtgtgtctgcccagcggcatcttcttcgtgtgtggcacaagcgcctaccgctgcctgaatggcagcagcgagtctatgtgcttcctgagcttcctggtgcctcctatgaccatctacaccgagcaggacctgtacagctacgtgatctccaagcctcggaacaagcgggtgcccatcctgccttttgtgattggagctggcgtgctgggagccctcggaactggaatcggaggcatcaccacctctactcagttctactacaaactatctcaagaactaaatggggacatggaaagagtggccgacagcctggtcacactccaggaccagctcaattctctggctgccgtggtgctccagaatcggagagcactcgatctgctgacagccgagagaggcggcacctgtctgtttctgggcgaagagtgctgctactacgtgaaccagtccggaatcgtcactgagaagcttaaagaaattcgagatcgaatccagcggagagccgaggaactgagaaacacaggaccttggggcctgctgagccagtggatgccttggattctgcccttcctgggacctctggccgccatcattctgctgctgctgttcggaccctgcatcttcaacagactgaccgccttcatcaacgacaagctgaacatcatccacgctatggtgctgacacagcag

SEQ ID NO: 199 - DNA, 1473 bp, synthetic construct
  source 1..1473: mol_type = other DNA
atggagacagacacactcctgctatgggtactgctgctctgggttccaggttccactggtgacgcaccccctccatgccgctgtatgacaagcagcagcccctaccaagagttcctgtggcgaatgcagaggcccggcaacattgacgcccctagctacagaagcctgagcaagggcacccctaccttcacagcccacacacacatgccccggaactgctaccatagcgccacactgtgtatgcacgccaacacacactactggaccggcaagatgattaaccctagctgccctggcggcctgggcgtgacagtttgttggacctactttacccagaccggcatgtccgatggtggcggagttcaagaccaggccagagaaaagcacgtgaaagaagtgatctcccagctgaccagagtgcacggcacaagcagcccttacaaaggactggacctgtccaagctgcacgagacactgagaacccacacacggctggtgtccctgttcaacaccacactgaccggactgcacgaggtgtccgctcagaatcctaccaactgctggatctgcctgcctctgaacttcagaccctacgtgtcaatccccgtgcctgagcagtggaacaacttcagcaccgagatcaataccaccagcgtgctcgtgggacccctggtgtccaatctggaaatcacccacaccagcaacctgacctgcgtgaagttctccaacaccacctacaccaccaacagccagtgcatcagatgggtcacccctccaacacagatcgtgtgtctgcccagcggcatcttcttcgtgtgtggcacaagcgcctaccgctgcctgaatggcagcagcgagtctatgtgcttcctgagcttcctggtgcctcctatgaccatctacaccgagcaggacctgtacagctacgtgatctccaagcctcggaacaagcgggtgcccatcctgccttttgtgattggagctggcgtgctgggagccctcggaactggaatcggaggcatcaccacctctactcagttctactacaaactatctcaagaactaaatggggacatggaaagagtggccgacagcctggtcacactccaggaccagctcaattctctggctgccgtggtgctccagaatcggagagcactcgatctgctgacagccgagagaggcggcacctgtctgtttctgggcgaagagtgctgctactacgtgaaccagtccggaatcgtcactgagaagcttaaagaaattcgagatcgaatccagcggagagccgaggaactgagaaacacaggaccttggggcctgctgagccagtggatgccttggattctgcccttcctgggacctctggccgccatcattctgctgctgctgttcggaccctgcatcttcaacagactgaccgccttcatcaacgacaagctgaacatcatccacgctatggtgctgacacag

SEQ ID NO: 200 - DNA, 1470 bp, synthetic construct
  source 1..1470: mol_type = other DNA
atggagacagacacactcctgctatgggtactgctgctctgggttccaggttccactggtgacgcaccccctccatgccgctgtatgacaagcagcagcccctaccaagagttcctgtggcgaatgcagaggcccggcaacattgacgcccctagctacagaagcctgagcaagggcacccctaccttcacagcccacacacacatgccccggaactgctaccatagcgccacactgtgtatgcacgccaacacacactactggaccggcaagatgattaaccctagctgccctggcggcctgggcgtgacagtttgttggacctactttacccagaccggcatgtccgatggtggcggagttcaagaccaggccagagaaaagcacgtgaaagaagtgatctcccagctgaccagagtgcacggcacaagcagcccttacaaaggactggacctgtccaagctgcacgagacactgagaacccacacacggctggtgtccctgttcaacaccacactgaccggactgcacgaggtgtccgctcagaatcctaccaactgctggatctgcctgcctctgaacttcagaccctacgtgtcaatccccgtgcctgagcagtggaacaacttcagcaccgagatcaataccaccagcgtgctcgtgggacccctggtgtccaatctggaaatcacccacaccagcaacctgacctgcgtgaagttctccaacaccacctacaccaccaacagccagtgcatcagatgggtcacccctccaacacagatcgtgtgtctgcccagcggcatcttcttcgtgtgtggcacaagcgcctaccgctgcctgaatggcagcagcgagtctatgtgcttcctgagcttcctggtgcctcctatgaccatctacaccgagcaggacctgtacagctacgtgatctccaagcctcggaacaagcgggtgcccatcctgccttttgtgattggagctggcgtgctgggagccctcggaactggaatcggaggcatcaccacctctactcagttctactacaaactatctcaagaactaaatggggacatggaaagagtggccgacagcctggtcacactccaggaccagctcaattctctggctgccgtggtgctccagaatcggagagcactcgatctgctgacagccgagagaggcggcacctgtctgtttctgggcgaagagtgctgctactacgtgaaccagtccggaatcgtcactgagaagcttaaagaaattcgagatcgaatccagcggagagccgaggaactgagaaacacaggaccttggggcctgctgagccagtggatgccttggattctgcccttcctgggacctctggccgccatcattctgctgctgctgttcggaccctgcatcttcaacagactgaccgccttcatcaacgacaagctgaacatcatccacgctatggtgctgaca

SEQ ID NO: 201 - DNA, 1578 bp, synthetic construct
  source 1..1578: mol_type = other DNA
atggagacagacacactcctgctatgggtactgctgctctgggttccaggttccactggtgacgcaccccctccatgccgctgtatgacaagcagcagcccctaccaagagttcctgtggcgaatgcagaggcccggcaacattgacgcccctagctacagaagcctgagcaagggcacccctaccttcacagcccacacacacatgccccggaactgctaccatagcgccacactgtgtatgcacgccaacacacactactggaccggcaagatgattaaccctagctgccctggcggcctgggcgtgacagtttgttggacctactttacccagaccggcatgtccgatggtggcggagttcaagaccaggccagagaaaagcacgtgaaagaagtgatctcccagctgaccagagtgcacggcacaagcagcccttacaaaggactggacctgtccaagctgcacgagacactgagaacccacacacggctggtgtccctgttcaacaccacactgaccggactgcacgaggtgtccgctcagaatcctaccaactgctggatctgcctgcctctgaacttcagaccctacgtgtcaatccccgtgcctgagcagtggaacaacttcagcaccgagatcaataccaccagcgtgctcgtgggacccctggtgtccaatctggaaatcacccacaccagcaacctgacctgcgtgaagttctccaacaccacctacaccaccaacagccagtgcatcagatgggtcacccctccaacacagatcgtgtgtctgcccagcggcatcttcttcgtgtgtggcacaagcgcctaccgctgcctgaatggcagcagcgagtctatgtgcttcctgagcttcctggtgcctcctatgaccatctacaccgagcaggacctgtacagctacgtgatctccaagcctcggaacaagcgggtgcccatcctgccttttgtgattggagctggcgtgctgggagccctcggaactggaatcggaggcatcaccacctctactcagttctactacaaactatctcaagaactaaatggggacatggaaagagtggccgacagcctggtcacactccaggaccagctcaattctctggctgccgtggtgctccagaatcggagagcactcgatctgctgacagccgagagaggcggcacctgtctgtttctgggcgaagagtgctgctactacgtgaaccagtccggaatcgtcactgagaaagttaaagaaattcgagatcgaatccagcggagagccgaggaactgagaaacacaggaccttggggcctgctgagccattggatgccttggattctgcccttcctgggacctctggccgccatcattctgctgctgctgttcggcccctgtatctttaacctccttgttaactttgtctcttccagaatcgaagctgtaaaactacaaatggagcccaagatgcagtccaagactaagatctaccgcagacccctggaccggcctgccagcccacgatctgatgttaatgacatcaaaggcacccctcctgaggaaatctcataa

SEQ ID NO: 202 - DNA, 1767 bp, synthetic construct
  source 1..1767: mol_type = other DNA
atggccctcccttatcatatttttctctttactgttcttttaccctctttcactctcactgcaccccctccatgccgctgtatgaccagtagctccccttaccaagagtttctatggagaatgcagcgtcccggaaatattgatgccccatcgtataggagtctttctaagggaacccccaccttcactgcccacacccatatgccccgcaactgctatcactctgccactctttgcatgcatgcaaatactcattattggacaggaaaaatgattaatcctagttgtcctggaggacttggagtcactgtctgttggacttacttcacccaaactggtatgtctgatgggggtggagttcaagatcaggcaagagaaaaacatgtaaaagaagtaatctcccaactcacccgggtacatggcacctctagcccctacaaaggactagatctctcaaaactacatgaaaccctccgtacccatactcgcctggtaagcctatttaataccaccctcactgggctccatgaggtctcggcccaaaaccctactaactgttggatatgcctccccctgaacttcaggccatatgtttcaatccctgtacctgaacaatggaacaacttcagcacagaaataaacaccacttccgttttagtaggacctcttgtttccaatctggaaataacccatacctcaaacctcacctgtgtaaaatttagcaatactacatacacaaccaactcccaatgcatcaggtgggtaactcctcccacacaaatagtctgcctaccctcaggaatattttttgtctgtggaacctcagcctatcgttgtttgaatggctcttcagaatctatgtgcttcctctcattcttagtgccccctatgaccatctacactgaacaagatttatacagttatgtcatatctaagccccgcaacaaaagagtacccattcttccttttgttataggagcaggagtgctaggtgcactaggtactggcattggcggtatcacaacctctactcagttctactacaaactatctcaagaactaaatggggacatggaacgggtcgccgactccctggtcaccttgcaagatcaacttaactccctagcagcagtagtccttcaaaatcgaagagctttagacttgctaaccgctgaaagagggggaacctgtttatttttaggggaagaatgctgttattatgttaatcaatccggaatcgtcactgagaagcttagcaaccagctgatctccgacgtgcagatcctgagcagcaccatccaggacctccaggatcaggtggactctctggccgaagtggtgctccagaacagaagaggactggacctgctgacagccgagcaaggcggaatttgtctggccctgcaagagaagtgctgcttctacgtgaacaagagcggcatcgtgcgcgacaagatcaagacactgcaagaggaactggaacggcggagaaaggacctggcctccaatcctctgtggaccggcctgcaaggactgctcccttacctgctgcctttcctgggaccactgctgactctgctgctcctgctgaccatcggaccctgcatcttcaacagactgaccgccttcatcaacgacaagctgaacatcatccacgctatgggatccactagtccagtgtggtggaattctgcagatatccagcacagtggcggccgctcgagtctagagggcccgaacaaaaactcatctcagaagaggatctga

SEQ ID NO: 203 - DNA, 1482 bp, synthetic construct
  source 1..1482: mol_type = other DNA
atggccctcccttatcatatttttctctttactgttcttttaccctctttcactctcactgcaccccctccatgccgctgtatgaccagtagctccccttaccaagagtttctatggagaatgcagcgtcccggaaatattgatgccccatcgtataggagtctttctaagggaacccccaccttcactgcccacacccatatgccccgcaactgctatcactctgccactctttgcatgcatgcaaatactcattattggacaggaaaaatgattaatcctagttgtcctggaggacttggagtcactgtctgttggacttacttcacccaaactggtatgtctgatgggggtggagttcaagatcaggcaagagaaaaacatgtaaaagaagtaatctcccaactcacccgggtacatggcacctctagcccctacaaaggactagatctctcaaaactacatgaaaccctccgtacccatactcgcctggtaagcctatttaataccaccctcactgggctccatgaggtctcggcccaaaaccctactaactgttggatatgcctccccctgaacttcaggccatatgtttcaatccctgtacctgaacaatggaacaacttcagcacagaaataaacaccacttccgttttagtaggacctcttgtttccaatctggaaataacccatacctcaaacctcacctgtgtaaaatttagcaatactacatacacaaccaactcccaatgcatcaggtgggtaactcctcccacacaaatagtctgcctaccctcaggaatattttttgtctgtggaacctcagcctatcgttgtttgaatggctcttcagaatctatgtgcttcctctcattcttagtgccccctatgaccatctacactgaacaagatttatacagttatgtcatatctaagccccgcaacaaaagagtacccattcttccttttgttataggagcaggagtgctaggtgcactaggtactggcattggcggtatcacaacctctactcagttctactacaaactatctcaagaactaaatggggacatggaacgggtcgccgactccctggtcaccttgcaagatcaacttaactccctagcagcagtagtccttcaaaatcgaagagctttagacttgctaaccgctgaaagagggggaacctgtttatttttaggggaagaatgctgttattatgttaatcaatccggaatcgtcactgagaagcttaaagaaattcgagatcgaatccagcggagagccgaggaactgagaaacacaggaccttggggcctgctgagccagtggatgccttggattctgcccttcctgggacctctggccgccatcattctgctgctgctgttcggaccctgcatcttcaacagactgaccgccttcatcaacgacaagctgaacatcatccacgctatggtgctgacacagcagtaccagtaa

SEQ ID NO: 204 - DNA, 1488 bp, synthetic construct
  source 1..1488: mol_type = other DNA
atggccctcccttatcatatttttctctttactgttcttttaccctctttcactctcactgcaccccctccatgccgctgtatgaccagtagctccccttaccaagagtttctatggagaatgcagcgtcccggaaatattgatgccccatcgtataggagtctttctaagggaacccccaccttcactgcccacacccatatgccccgcaactgctatcactctgccactctttgcatgcatgcaaatactcattattggacaggaaaaatgattaatcctagttgtcctggaggacttggagtcactgtctgttggacttacttcacccaaactggtatgtctgatgggggtggagttcaagatcaggcaagagaaaaacatgtaaaagaagtaatctcccaactcacccgggtacatggcacctctagcccctacaaaggactagatctctcaaaactacatgaaaccctccgtacccatactcgcctggtaagcctatttaataccaccctcactgggctccatgaggtctcggcccaaaaccctactaactgttggatatgcctccccctgaacttcaggccatatgtttcaatccctgtacctgaacaatggaacaacttcagcacagaaataaacaccacttccgttttagtaggacctcttgtttccaatctggaaataacccatacctcaaacctcacctgtgtaaaatttagcaatactacatacacaaccaactcccaatgcatcaggtgggtaactcctcccacacaaatagtctgcctaccctcaggaatattttttgtctgtggaacctcagcctatcgttgtttgaatggctcttcagaatctatgtgcttcctctcattcttagtgccccctatgaccatctacactgaacaagatttatacagttatgtcatatctaagccccgcaacaaaagagtacccattcttccttttgttataggagcaggagtgctaggtgcactaggtactggcattggcggtatcacaacctctactcagttctactacaaactatctcaagaactaaatggggacatggaacgggtcgccgactccctggtcaccttgcaagatcaacttaactccctagcagcagtagtccttcaaaatcgaagagctttagacttgctaaccgctgaaagagggggaacctgtttatttttaggggaagaatgctgttattatgttaatcaatccggaatcgtcactgagaagcttaaagaaattcgagatcgaatccagcggagaagaaaggacctggcctccaatcctctgtggaccggcctgcaaggactgctcccttacctgctgcctttcctgggaccactgctgactctgctgctcctgctgaccatcggaccctgcatcttcaacagactgaccgccttcatcaacgacaagctgaacatcatccacgctatggtgctgacacagcagtaccaggtgctgtaa

SEQ ID NO: 205 - DNA, 1482 bp, synthetic construct
  source 1..1482: mol_type = other DNA
atggccctcccttatcatatttttctctttactgttcttttaccctctttcactctcactgcaccccctccatgccgctgtatgaccagtagctccccttaccaagagtttctatggagaatgcagcgtcccggaaatattgatgccccatcgtataggagtctttctaagggaacccccaccttcactgcccacacccatatgccccgcaactgctatcactctgccactctttgcatgcatgcaaatactcattattggacaggaaaaatgattaatcctagttgtcctggaggacttggagtcactgtctgttggacttacttcacccaaactggtatgtctgatgggggtggagttcaagatcaggcaagagaaaaacatgtaaaagaagtaatctcccaactcacccgggtacatggcacctctagcccctacaaaggactagatctctcaaaactacatgaaaccctccgtacccatactcgcctggtaagcctatttaataccaccctcactgggctccatgaggtctcggcccaaaaccctactaactgttggatatgcctccccctgaacttcaggccatatgtttcaatccctgtacctgaacaatggaacaacttcagcacagaaataaacaccacttccgttttagtaggacctcttgtttccaatctggaaataacccatacctcaaacctcacctgtgtaaaatttagcaatactacatacacaaccaactcccaatgcatcaggtgggtaactcctcccacacaaatagtctgcctaccctcaggaatattttttgtctgtggaacctcagcctatcgttgtttgaatggctcttcagaatctatgtgcttcctctcattcttagtgccccctatgaccatctacactgaacaagatttatacagttatgtcatatctaagccccgcaacaaaagagtacccattcttccttttgttataggagcaggagtgctaggtgcactaggtactggcattggcggtatcacaacctctactcagttctactacaaactatctcaagaactaaatggggacatggaacgggtcgccgactccctggtcaccttgcaagatcaacttaactccctagcagcagtagtccttcaaaatcgaagagctttagacttgctaaccgctgaaagagggggaacctgtttatttttaggggaagaatgctgttattatgttaatcaatccggaatcgtcactgagaagcttaaagaaattcgagatcgaatccagcggagagccgaggaactgagaaacacaggaccttggggcctgctgcaaggactgctcccttacctgctgcctttcctgggaccactgctgactctgctgctcctgctgaccatcggaccctgcatcttcaacagactgaccgccttcatcaacgacaagctgaacatcatccacgctatggtgctgacacagcagtaccagtaa

SEQ ID NO: 206 - DNA, 1476 bp, synthetic construct
  source 1..1476: mol_type = other DNA
atggccctcccttatcatatttttctctttactgttcttttaccctctttcactctcactgcaccccctccatgccgctgtatgaccagtagctccccttaccaagagtttctatggagaatgcagcgtcccggaaatattgatgccccatcgtataggagtctttctaagggaacccccaccttcactgcccacacccatatgccccgcaactgctatcactctgccactctttgcatgcatgcaaatactcattattggacaggaaaaatgattaatcctagttgtcctggaggacttggagtcactgtctgttggacttacttcacccaaactggtatgtctgatgggggtggagttcaagatcaggcaagagaaaaacatgtaaaagaagtaatctcccaactcacccgggtacatggcacctctagcccctacaaaggactagatctctcaaaactacatgaaaccctccgtacccatactcgcctggtaagcctatttaataccaccctcactgggctccatgaggtctcggcccaaaaccctactaactgttggatatgcctccccctgaacttcaggccatatgtttcaatccctgtacctgaacaatggaacaacttcagcacagaaataaacaccacttccgttttagtaggacctcttgtttccaatctggaaataacccatacctcaaacctcacctgtgtaaaatttagcaatactacatacacaaccaactcccaatgcatcaggtgggtaactcctcccacacaaatagtctgcctaccctcaggaatattttttgtctgtggaacctcagcctatcgttgtttgaatggctcttcagaatctatgtgcttcctctcattcttagtgccccctatgaccatctacactgaacaagatttatacagttatgtcatatctaagccccgcaacaaaagagtacccattcttccttttgttataggagcaggagtgctaggtgcactaggtactggcattggcggtatcacaacctctactcagttctactacaaactatctcaagaactaaatggggacatggaacgggtcgccgactccctggtcaccttgcaagatcaacttaactccctagcagcagtagtccttcaaaatcgaagagctttagacttgctaaccgctgaaagagggggaacctgtttatttttaggggaagaatgctgttattatgttaatcaatccggaatcgtcactgagaagcttaaagaaattcgagatcgaatccagcggagagccgaggaactgagaaacacaggaccttggggcctgctgcaaggactgctcccttacctgctgcctttcctgggaccactgctgactctgctgctcctgctgaccatcggaccctgcatcttcaacagactgaccgccttcatcaacgacaagctgaacatcatccacgctatggtgctgacacagcagtaa

SEQ ID NO: 207 - DNA, 1473 bp, synthetic construct
  source 1..1473: mol_type = other DNA
atggccctcccttatcatatttttctctttactgttcttttaccctctttcactctcactgcaccccctccatgccgctgtatgaccagtagctccccttaccaagagtttctatggagaatgcagcgtcccggaaatattgatgccccatcgtataggagtctttctaagggaacccccaccttcactgcccacacccatatgccccgcaactgctatcactctgccactctttgcatgcatgcaaatactcattattggacaggaaaaatgattaatcctagttgtcctggaggacttggagtcactgtctgttggacttacttcacccaaactggtatgtctgatgggggtggagttcaagatcaggcaagagaaaaacatgtaaaagaagtaatctcccaactcacccgggtacatggcacctctagcccctacaaaggactagatctctcaaaactacatgaaaccctccgtacccatactcgcctggtaagcctatttaataccaccctcactgggctccatgaggtctcggcccaaaaccctactaactgttggatatgcctccccctgaacttcaggccatatgtttcaatccctgtacctgaacaatggaacaacttcagcacagaaataaacaccacttccgttttagtaggacctcttgtttccaatctggaaataacccatacctcaaacctcacctgtgtaaaatttagcaatactacatacacaaccaactcccaatgcatcaggtgggtaactcctcccacacaaatagtctgcctaccctcaggaatattttttgtctgtggaacctcagcctatcgttgtttgaatggctcttcagaatctatgtgcttcctctcattcttagtgccccctatgaccatctacactgaacaagatttatacagttatgtcatatctaagccccgcaacaaaagagtacccattcttccttttgttataggagcaggagtgctaggtgcactaggtactggcattggcggtatcacaacctctactcagttctactacaaactatctcaagaactaaatggggacatggaacgggtcgccgactccctggtcaccttgcaagatcaacttaactccctagcagcagtagtccttcaaaatcgaagagctttagacttgctaaccgctgaaagagggggaacctgtttatttttaggggaagaatgctgttattatgttaatcaatccggaatcgtcactgagaagcttaaagaaattcgagatcgaatccagcggagagccgaggaactgagaaacacaggaccttggggcctgctgcaaggactgctcccttacctgctgcctttcctgggaccactgctgactctgctgctcctgctgaccatcggaccctgcatcttcaacagactgaccgccttcatcaacgacaagctgaacatcatccacgctatggtgctgacacagtaa

SEQ ID NO: 208 - DNA, 1482 bp, synthetic construct
  source 1..1482: mol_type = other DNA
atggccctcccttatcatatttttctctttactgttcttttaccctctttcactctcactgcaccccctccatgccgctgtatgaccagtagctccccttaccaagagtttctatggagaatgcagcgtcccggaaatattgatgccccatcgtataggagtctttctaagggaacccccaccttcactgcccacacccatatgccccgcaactgctatcactctgccactctttgcatgcatgcaaatactcattattggacaggaaaaatgattaatcctagttgtcctggaggacttggagtcactgtctgttggacttacttcacccaaactggtatgtctgatgggggtggagttcaagatcaggcaagagaaaaacatgtaaaagaagtaatctcccaactcacccgggtacatggcacctctagcccctacaaaggactagatctctcaaaactacatgaaaccctccgtacccatactcgcctggtaagcctatttaataccaccctcactgggctccatgaggtctcggcccaaaaccctactaactgttggatatgcctccccctgaacttcaggccatatgtttcaatccctgtacctgaacaatggaacaacttcagcacagaaataaacaccacttccgttttagtaggacctcttgtttccaatctggaaataacccatacctcaaacctcacctgtgtaaaatttagcaatactacatacacaaccaactcccaatgcatcaggtgggtaactcctcccacacaaatagtctgcctaccctcaggaatattttttgtctgtggaacctcagcctatcgttgtttgaatggctcttcagaatctatgtgcttcctctcattcttagtgccccctatgaccatctacactgaacaagatttatacagttatgtcatatctaagccccgcaacaaaagagtacccattcttccttttgttataggagcaggagtgctaggtgcactaggtactggcattggcggtatcacaacctctactcagttctactacaaactatctcaagaactaaatggggacatggaacgggtcgccgactccctggtcaccttgcaagatcaacttaactccctagcagcagtagtccttcaaaatcgaagagctttagacttgctaaccgctgaaagagggggaacctgtttatttttaggggaagaatgctgttattatgttaatcaatccggaatcgtcactgagaagcttaaagaaattcgagatcgaatccagcggagaagaaaggacctggcctccaatcctctgtggaccggcctgcaaggactgctcccttacctgctgcctttcctgggaccactgctgactctgctgctcctgctgaccatcggaccctgcatcttcaacagactgaccgccttcatcaacgacaagctgaacatcatccacgctatggtgctgacacagcagtaccagtaa

SEQ ID NO: 209 - DNA, 1770 bp, synthetic construct
  source 1..1770: mol_type = other DNA
atggagacagacacactcctgctatgggtactgctgctctgggttccaggttccactggtgacgcaccccctccatgccgctgtatgaccagtagctccccttaccaagagtttctatggagaatgcagcgtcccggaaatattgatgccccatcgtataggagtctttctaagggaacccccaccttcactgcccacacccatatgccccgcaactgctatcactctgccactctttgcatgcatgcaaatactcattattggacaggaaaaatgattaatcctagttgtcctggaggacttggagtcactgtctgttggacttacttcacccaaactggtatgtctgatgggggtggagttcaagatcaggcaagagaaaaacatgtaaaagaagtaatctcccaactcacccgggtacatggcacctctagcccctacaaaggactagatctctcaaaactacatgaaaccctccgtacccatactcgcctggtaagcctatttaataccaccctcactgggctccatgaggtctcggcccaaaaccctactaactgttggatatgcctccccctgaacttcaggccatatgtttcaatccctgtacctgaacaatggaacaacttcagcacagaaataaacaccacttccgttttagtaggacctcttgtttccaatctggaaataacccatacctcaaacctcacctgtgtaaaatttagcaatactacatacacaaccaactcccaatgcatcaggtgggtaactcctcccacacaaatagtctgcctaccctcaggaatattttttgtctgtggaacctcagcctatcgttgtttgaatggctcttcagaatctatgtgcttcctctcattcttagtgccccctatgaccatctacactgaacaagatttatacagttatgtcatatctaagccccgcaacaaaagagtacccattcttccttttgttataggagcaggagtgctaggtgcactaggtactggcattggcggtatcacaacctctactcagttctactacaaactatctcaagaactaaatggggacatggaacgggtcgccgactccctggtcaccttgcaagatcaacttaactccctagcagcagtagtccttcaaaatcgaagagctttagacttgctaaccgctgaaagagggggaacctgtttatttttaggggaagaatgctgttattatgttaatcaatccggaatcgtcactgagaagcttagcaaccagctgatctccgacgtgcagatcctgagcagcaccatccaggacctccaggatcaggtggactctctggccgaagtggtgctccagaacagaagaggactggacctgctgacagccgagcaaggcggaatttgtctggccctgcaagagaagtgctgcttctacgtgaacaagagcggcatcgtgcgcgacaagatcaagacactgcaagaggaactggaacggcggagaaaggacctggcctccaatcctctgtggaccggcctgcaaggactgctcccttacctgctgcctttcctgggaccactgctgactctgctgctcctgctgaccatcggaccctgcatcttcaacagactgaccgccttcatcaacgacaagctgaacatcatccacgctatgggatccactagtccagtgtggtggaattctgcagatatccagcacagtggcggccgctcgagtctagagggcccgaacaaaaactcatctcagaagaggatctga

SEQ ID NO: 210 - DNA, 1485 bp, synthetic construct
  source 1..1485: mol_type = other DNA
atggagacagacacactcctgctatgggtactgctgctctgggttccaggttccactggtgacgcaccccctccatgccgctgtatgaccagtagctccccttaccaagagtttctatggagaatgcagcgtcccggaaatattgatgccccatcgtataggagtctttctaagggaacccccaccttcactgcccacacccatatgccccgcaactgctatcactctgccactctttgcatgcatgcaaatactcattattggacaggaaaaatgattaatcctagttgtcctggaggacttggagtcactgtctgttggacttacttcacccaaactggtatgtctgatgggggtggagttcaagatcaggcaagagaaaaacatgtaaaagaagtaatctcccaactcacccgggtacatggcacctctagcccctacaaaggactagatctctcaaaactacatgaaaccctccgtacccatactcgcctggtaagcctatttaataccaccctcactgggctccatgaggtctcggcccaaaaccctactaactgttggatatgcctccccctgaacttcaggccatatgtttcaatccctgtacctgaacaatggaacaacttcagcacagaaataaacaccacttccgttttagtaggacctcttgtttccaatctggaaataacccatacctcaaacctcacctgtgtaaaatttagcaatactacatacacaaccaactcccaatgcatcaggtgggtaactcctcccacacaaatagtctgcctaccctcaggaatattttttgtctgtggaacctcagcctatcgttgtttgaatggctcttcagaatctatgtgcttcctctcattcttagtgccccctatgaccatctacactgaacaagatttatacagttatgtcatatctaagccccgcaacaaaagagtacccattcttccttttgttataggagcaggagtgctaggtgcactaggtactggcattggcggtatcacaacctctactcagttctactacaaactatctcaagaactaaatggggacatggaacgggtcgccgactccctggtcaccttgcaagatcaacttaactccctagcagcagtagtccttcaaaatcgaagagctttagacttgctaaccgctgaaagagggggaacctgtttatttttaggggaagaatgctgttattatgttaatcaatccggaatcgtcactgagaagcttaaagaaattcgagatcgaatccagcggagagccgaggaactgagaaacacaggaccttggggcctgctgagccagtggatgccttggattctgcccttcctgggacctctggccgccatcattctgctgctgctgttcggaccctgcatcttcaacagactgaccgccttcatcaacgacaagctgaacatcatccacgctatggtgctgacacagcagtaccagtaa

SEQ ID NO: 211 - DNA, 1491 bp, synthetic construct
  source 1..1491: mol_type = other DNA
atggagacagacacactcctgctatgggtactgctgctctgggttccaggttccactggtgacgcaccccctccatgccgctgtatgaccagtagctccccttaccaagagtttctatggagaatgcagcgtcccggaaatattgatgccccatcgtataggagtctttctaagggaacccccaccttcactgcccacacccatatgccccgcaactgctatcactctgccactctttgcatgcatgcaaatactcattattggacaggaaaaatgattaatcctagttgtcctggaggacttggagtcactgtctgttggacttacttcacccaaactggtatgtctgatgggggtggagttcaagatcaggcaagagaaaaacatgtaaaagaagtaatctcccaactcacccgggtacatggcacctctagcccctacaaaggactagatctctcaaaactacatgaaaccctccgtacccatactcgcctggtaagcctatttaataccaccctcactgggctccatgaggtctcggcccaaaaccctactaactgttggatatgcctccccctgaacttcaggccatatgtttcaatccctgtacctgaacaatggaacaacttcagcacagaaataaacaccacttccgttttagtaggacctcttgtttccaatctggaaataacccatacctcaaacctcacctgtgtaaaatttagcaatactacatacacaaccaactcccaatgcatcaggtgggtaactcctcccacacaaatagtctgcctaccctcaggaatattttttgtctgtggaacctcagcctatcgttgtttgaatggctcttcagaatctatgtgcttcctctcattcttagtgccccctatgaccatctacactgaacaagatttatacagttatgtcatatctaagccccgcaacaaaagagtacccattcttccttttgttataggagcaggagtgctaggtgcactaggtactggcattggcggtatcacaacctctactcagttctactacaaactatctcaagaactaaatggggacatggaacgggtcgccgactccctggtcaccttgcaagatcaacttaactccctagcagcagtagtccttcaaaatcgaagagctttagacttgctaaccgctgaaagagggggaacctgtttatttttaggggaagaatgctgttattatgttaatcaatccggaatcgtcactgagaagcttaaagaaattcgagatcgaatccagcggagaagaaaggacctggcctccaatcctctgtggaccggcctgcaaggactgctcccttacctgctgcctttcctgggaccactgctgactctgctgctcctgctgaccatcggaccctgcatcttcaacagactgaccgccttcatcaacgacaagctgaacatcatccacgctatggtgctgacacagcagtaccaggtgctgtaa

SEQ ID NO: 212 - DNA, 1485 bp, synthetic construct
  source 1..1485: mol_type = other DNA
atggagacagacacactcctgctatgggtactgctgctctgggttccaggttccactggtgacgcaccccctccatgccgctgtatgaccagtagctccccttaccaagagtttctatggagaatgcagcgtcccggaaatattgatgccccatcgtataggagtctttctaagggaacccccaccttcactgcccacacccatatgccccgcaactgctatcactctgccactctttgcatgcatgcaaatactcattattggacaggaaaaatgattaatcctagttgtcctggaggacttggagtcactgtctgttggacttacttcacccaaactggtatgtctgatgggggtggagttcaagatcaggcaagagaaaaacatgtaaaagaagtaatctcccaactcacccgggtacatggcacctctagcccctacaaaggactagatctctcaaaactacatgaaaccctccgtacccatactcgcctggtaagcctatttaataccaccctcactgggctccatgaggtctcggcccaaaaccctactaactgttggatatgcctccccctgaacttcaggccatatgtttcaatccctgtacctgaacaatggaacaacttcagcacagaaataaacaccacttccgttttagtaggacctcttgtttccaatctggaaataacccatacctcaaacctcacctgtgtaaaatttagcaatactacatacacaaccaactcccaatgcatcaggtgggtaactcctcccacacaaatagtctgcctaccctcaggaatattttttgtctgtggaacctcagcctatcgttgtttgaatggctcttcagaatctatgtgcttcctctcattcttagtgccccctatgaccatctacactgaacaagatttatacagttatgtcatatctaagccccgcaacaaaagagtacccattcttccttttgttataggagcaggagtgctaggtgcactaggtactggcattggcggtatcacaacctctactcagttctactacaaactatctcaagaactaaatggggacatggaacgggtcgccgactccctggtcaccttgcaagatcaacttaactccctagcagcagtagtccttcaaaatcgaagagctttagacttgctaaccgctgaaagagggggaacctgtttatttttaggggaagaatgctgttattatgttaatcaatccggaatcgtcactgagaagcttaaagaaattcgagatcgaatccagcggagagccgaggaactgagaaacacaggaccttggggcctgctgcaaggactgctcccttacctgctgcctttcctgggaccactgctgactctgctgctcctgctgaccatcggaccctgcatcttcaacagactgaccgccttcatcaacgacaagctgaacatcatccacgctatggtgctgacacagcagtaccagtaa

SEQ ID NO: 213 - DNA, 1479 bp, synthetic construct
  source 1..1479: mol_type = other DNA
atggagacagacacactcctgctatgggtactgctgctctgggttccaggttccactggtgacgcaccccctccatgccgctgtatgaccagtagctccccttaccaagagtttctatggagaatgcagcgtcccggaaatattgatgccccatcgtataggagtctttctaagggaacccccaccttcactgcccacacccatatgccccgcaactgctatcactctgccactctttgcatgcatgcaaatactcattattggacaggaaaaatgattaatcctagttgtcctggaggacttggagtcactgtctgttggacttacttcacccaaactggtatgtctgatgggggtggagttcaagatcaggcaagagaaaaacatgtaaaagaagtaatctcccaactcacccgggtacatggcacctctagcccctacaaaggactagatctctcaaaactacatgaaaccctccgtacccatactcgcctggtaagcctatttaataccaccctcactgggctccatgaggtctcggcccaaaaccctactaactgttggatatgcctccccctgaacttcaggccatatgtttcaatccctgtacctgaacaatggaacaacttcagcacagaaataaacaccacttccgttttagtaggacctcttgtttccaatctggaaataacccatacctcaaacctcacctgtgtaaaatttagcaatactacatacacaaccaactcccaatgcatcaggtgggtaactcctcccacacaaatagtctgcctaccctcaggaatattttttgtctgtggaacctcagcctatcgttgtttgaatggctcttcagaatctatgtgcttcctctcattcttagtgccccctatgaccatctacactgaacaagatttatacagttatgtcatatctaagccccgcaacaaaagagtacccattcttccttttgttataggagcaggagtgctaggtgcactaggtactggcattggcggtatcacaacctctactcagttctactacaaactatctcaagaactaaatggggacatggaacgggtcgccgactccctggtcaccttgcaagatcaacttaactccctagcagcagtagtccttcaaaatcgaagagctttagacttgctaaccgctgaaagagggggaacctgtttatttttaggggaagaatgctgttattatgttaatcaatccggaatcgtcactgagaagcttaaagaaattcgagatcgaatccagcggagagccgaggaactgagaaacacaggaccttggggcctgctgcaaggactgctcccttacctgctgcctttcctgggaccactgctgactctgctgctcctgctgaccatcggaccctgcatcttcaacagactgaccgccttcatcaacgacaagctgaacatcatccacgctatggtgctgacacagcagtaa

SEQ ID NO: 214 - DNA, 1476 bp, synthetic construct
  source 1..1476: mol_type = other DNA
atggagacagacacactcctgctatgggtactgctgctctgggttccaggttccactggtgacgcaccccctccatgccgctgtatgaccagtagctccccttaccaagagtttctatggagaatgcagcgtcccggaaatattgatgccccatcgtataggagtctttctaagggaacccccaccttcactgcccacacccatatgccccgcaactgctatcactctgccactctttgcatgcatgcaaatactcattattggacaggaaaaatgattaatcctagttgtcctggaggacttggagtcactgtctgttggacttacttcacccaaactggtatgtctgatgggggtggagttcaagatcaggcaagagaaaaacatgtaaaagaagtaatctcccaactcacccgggtacatggcacctctagcccctacaaaggactagatctctcaaaactacatgaaaccctccgtacccatactcgcctggtaagcctatttaataccaccctcactgggctccatgaggtctcggcccaaaaccctactaactgttggatatgcctccccctgaacttcaggccatatgtttcaatccctgtacctgaacaatggaacaacttcagcacagaaataaacaccacttccgttttagtaggacctcttgtttccaatctggaaataacccatacctcaaacctcacctgtgtaaaatttagcaatactacatacacaaccaactcccaatgcatcaggtgggtaactcctcccacacaaatagtctgcctaccctcaggaatattttttgtctgtggaacctcagcctatcgttgtttgaatggctcttcagaatctatgtgcttcctctcattcttagtgccccctatgaccatctacactgaacaagatttatacagttatgtcatatctaagccccgcaacaaaagagtacccattcttccttttgttataggagcaggagtgctaggtgcactaggtactggcattggcggtatcacaacctctactcagttctactacaaactatctcaagaactaaatggggacatggaacgggtcgccgactccctggtcaccttgcaagatcaacttaactccctagcagcagtagtccttcaaaatcgaagagctttagacttgctaaccgctgaaagagggggaacctgtttatttttaggggaagaatgctgttattatgttaatcaatccggaatcgtcactgagaagcttaaagaaattcgagatcgaatccagcggagagccgaggaactgagaaacacaggaccttggggcctgctgcaaggactgctcccttacctgctgcctttcctgggaccactgctgactctgctgctcctgctgaccatcggaccctgcatcttcaacagactgaccgccttcatcaacgacaagctgaacatcatccacgctatggtgctgacacagtaa

SEQ ID NO: 215 - DNA, 25 bp, synthetic construct
  source 1..25: mol_type = other DNA
ggggggggggggggggggggggggg

SEQ ID NO: 216 - DNA, 25 bp, synthetic construct
  source 1..25: mol_type = other DNA
ggggggggggggggggggggggggg

SEQ ID NO: 217 - DNA, 25 bp, synthetic construct
  source 1..25: mol_type = other DNA
ggggggggggggggggggggggggg

SEQ ID NO: 218 - DNA, 25 bp, synthetic construct
  source 1..25: mol_type = other DNA
ggggggggggggggggggggggggg

SEQ ID NO: 219 - DNA, 25 bp, synthetic construct
  source 1..25: mol_type = other DNA
ggggggggggggggggggggggggg

SEQ ID NO: 220 - DNA, 25 bp, synthetic construct
  source 1..25: mol_type = other DNA
ggggggggggggggggggggggggg

SEQ ID NO: 221 - DNA, 25 bp, synthetic construct
  source 1..25: mol_type = other DNA
ggggggggggggggggggggggggg

SEQ ID NO: 222 - DNA, 25 bp, synthetic construct
  source 1..25: mol_type = other DNA
ggggggggggggggggggggggggg

SEQ ID NO: 223 - DNA, 25 bp, synthetic construct
  source 1..25: mol_type = other DNA
ggggggggggggggggggggggggg

SEQ ID NO: 224 - DNA, 25 bp, synthetic construct
  source 1..25: mol_type = other DNA
ggggggggggggggggggggggggg

SEQ ID NO: 225 - DNA, 1617 bp, synthetic construct; identical to SEQ ID NO: 42
  source 1..1617: mol_type = other DNA

SEQ ID NO: 226 - DNA, 1563 bp, synthetic construct
  source 1..1563: mol_type = other DNA
atgggactgctgctgctggtgctgatcctgacaccttctctggccgcctacagacaccctgacttcccactgctggaaaaggcccagcagctcctgcaaagcacaggcagcccctacagcaccaactgctggctgtgtaccagctccagcacagagacacccggcacagcctatcctgcctctccaagagagtggacctctatcgaggccgagctgcacatcagctacagatgggaccccaacctgaagggcctgatgaggccagccaatagcctgctgagcaccgtgaagcaggacttccccgacatcagacagaagcctccaatcttcggccccatcttcaccaacatcaacctgatgggaatcgcccctatctgcgtgatggctaagcggaagaacggcaccaacgtgggcacactgcctagcaccgtgtgcaacgtgaccttcaccgtggacagcaaccagcagacctaccagacatacacccacaaccagttccggcaccagcctcggtttcccaagcctcctaacatcacctttccacagggcaccctgctggacaagagcagcagattctgtcagggcagaccctccagctgctctactcggaacttctggttcagacccgccgactacaaccagtgcctccagatcagcaacctgagcagcacagccgaatgggtgctgctggaccagaccagaaacagcctgttctgggagaacaagaccaagggcgctaaccagagccagacaccttgtgtgcaggttctggccggcatgacaatcgccacaagctacctgggcatcagcgccgtgtctgagttcttcggcacaagcctgacaccactgttccacttccacatcagcacatgcctgaaaacccagggcgctttctacatctgcggccagtccatccaccagtgtctgccatctaactggaccggcacctgtaccatcggctacgtgacccctgacatctttatcgcccctggcaacctgtctctgcccattcctatctacggcaacagccctctgcctagagtgcggagagccatccacttcattcctctgctggccggcctgggaatcctggctggaacaggcactggaatcgccggcattacaaaggccagcctgacctacagccagctgagcaaagagatcgccaacaacatcgacacaatggctaaggccctgaccaccatgcaagagcagatcgactctctggctgccgtggtgctccagaatagacgcggactggacatgctgacagccgctcaaggcggaatttgtctggccctggatgagaagtgctgcttctgggtcaaccagagcggcaaggtgcaggacaacatccggcagctgctgaatcaggccagcagcctgagagagagagccacacaaggctggctgaactgggaaggtacctggaagtggttcagctgggtgctccctctgaccggacctctggtttctctgctcctcctgctgctgttcggcccctgtctgctgaacctgattacccagtttgtgtccagccggctccaggccatcaagctctaa

SEQ ID NO: 227 - DNA, 1578 bp, synthetic construct
  source 1..1578: mol_type = other DNA
atgggactgctgctgctggtgctgatcctgacaccttctctggccgcctacagacaccctgacttcccactgctggaaaaggcccagcagctcctgcaaagcacaggcagcccctacagcaccaactgctggctgtgtaccagctccagcacagagacacccggcacagcctatcctgcctctccaagagagtggacctctatcgaggccgagctgcacatcagctacagatgggaccccaacctgaagggcctgatgaggccagccaatagcctgctgagcaccgtgaagcaggacttccccgacatcagacagaagcctccaatcttcggccccatcttcaccaacatcaacctgatgggaatcgcccctatctgcgtgatggctaagcggaagaacggcaccaacgtgggcacactgcctagcaccgtgtgcaacgtgaccttcaccgtggacagcaaccagcagacctaccagacatacacccacaaccagttccggcaccagcctcggtttcccaagcctcctaacatcacctttccacagggcaccctgctggacaagagcagcagattctgtcagggcagaccctccagctgctctacccggaacttctggttcagacccgccgactacaaccagtgcctccagatcagcaacctgagcagcacagccgaatgggtgctgctggaccagaccagaaacagcctgttctgggagaacaagaccaagggcgctaaccagagccagacaccttgtgtgcaggttctggccggcatgacaatcgccacaagctacctgggcatcagcgccgtgtctgagttcttcggcacaagcctgacaccactgttccacttccacatcagcacatgcctgaaaacccagggcgctttctacatctgcggccagtccatccaccagtgtctgccatctaactggaccggcacctgtaccatcggctacgtgacccctgacatctttatcgcccctggcaacctgtctctgcccattcctatctacggcaacagccctctgcctagagtgcggagagccatccacttcattcctctgctggccggcctgggaatcctggctggaacaggcactggaatcgccggcattacaaaggccagcctgacctacagccagctgagcaaagagatcgccaacaacatcgacacaatggctaaggccctgaccaccatgcaagagcagatcgactctctggctgccgtggtgctccagaatagacgcggactggacatgctgacagccgctcaaggcggaatttgtctggccctggatgagaagtgctgcttctgggtcaaccagagcggcaaggtgcaggacaacatccggcagctgctgaatcaggccagcagcctgagagagagagccacacaaggctggctgaactgggaaggtacctggaagtggttcagctgggtgctccctctgaccggacctctggtttctctgctcctcctgctgctgttcggcccctgtctgctgaacctgattacccagtttgtgtccagccggctccaggccatcaagctccagaccaatttgagctaa

SEQ ID NO: 228 - DNA, 1602 bp, synthetic construct
  source 1..1602: mol_type = other DNA
atgggactgctgctgctggtgctgatcctgacaccttctctggccgcctacagacaccctgacttcccactgctggaaaaggcccagcagctcctgcaaagcacaggcagcccctacagcaccaactgctggctgtgtaccagctccagcacagagacacccggcacagcctatcctgcctctccaagagagtggacctctatcgaggccgagctgcacatcagctacagatgggaccccaacctgaagggcctgatgaggccagccaatagcctgctgagcaccgtgaagcaggacttccccgacatcagacagaagcctccaatcttcggccccatcttcaccaacatcaacctgatgggaatcgcccctatctgcgtgatggctaagcggaagaacggcaccaacgtgggcacactgcctagcaccgtgtgcaacgtgaccttcaccgtggacagcaaccagcagacctaccagacatacacccacaaccagttccggcaccagcctcggtttcccaagcctcctaacatcacctttccacagggcaccctgctggacaagagcagcagattctgtcagggcagaccctccagctgctctacccggaacttctggttcagacccgccgactacaaccagtgcctccagatcagcaacctgagcagcacagccgaatgggtgctgctggaccagaccagaaacagcctgttctgggagaacaagaccaagggcgctaaccagagccagacaccttgtgtgcaggttctggccggcatgacaatcgccacaagctacctgggcatcagcgccgtgtctgagttcttcggcacaagcctgacaccactgttccacttccacatcagcacatgcctgaaaacccagggcgctttctacatctgcggccagtccatccaccagtgtctgccatctaactggaccggcacctgtaccatcggctacgtgacccctgacatctttatcgcccctggcaacctgtctctgcccattcctatctacggcaacagccctctgcctagagtgcggagagccatccacttcattcctctgctggccggcctgggaatcctggctggaacaggcactggaatcgccggcattacaaaggccagcctgacctacagccagctgagcaaagagatcgccaacaacatcgacacaatggctaaggccctgaccaccatgcaagagcagatcgactctctggctgccgtggtgctccagaatagacgcggactggacatgctgacagccgctcaaggcggaatttgtctggccctggatgagaagtgctgcttctgggtcaaccagagcggcaaggtgcaggacaacatccggcagctgctgaatcaggccagcagcctgagagagagagccacacaaggctggctgaactgggaaggtacctggaagtggttcagctgggtgctccctctgaccggacctctggtttctctgctcctcctgctgctgttcggcccctgtctgctgaacctgattacccagtttgtgtccagccggctccaggccatcaagctccagaccaatttgagcgccggcagacaccccagaaacatctaa

SEQ ID NO: 229 - DNA, 1617 bp, synthetic construct; identical to SEQ ID NO: 42
  source 1..1617: mol_type = other DNA

SEQ ID NO: 230 - DNA, 1665 bp, synthetic construct
  source 1..1665: mol_type = other DNA
atgggactgctgctgctggtgctgatcctgacaccttctctggccgcctacagacaccctgacttcccactgctggaaaaggcccagcagctcctgcaaagcacaggcagcccctacagcaccaactgctggctgtgtaccagctccagcacagagacacccggcacagcctatcctgcctctccaagagagtggacctctatcgaggccgagctgcacatcagctacagatgggaccccaacctgaagggcctgatgaggccagccaatagcctgctgagcaccgtgaagcaggacttccccgacatcagacagaagcctccaatcttcggccccatcttcaccaacatcaacctgatgggaatcgcccctatctgcgtgatggctaagcggaagaacggcaccaacgtgggcacactgcctagcaccgtgtgcaacgtgaccttcaccgtggacagcaaccagcagacctaccagacatacacccacaaccagttccggcaccagcctcggtttcccaagcctcctaacatcacctttccacagggcaccctgctggacaagagcagcagattctgtcagggcagaccctccagctgctctacccggaacttctggttcagacccgccgactacaaccagtgcctccagatcagcaacctgagcagcacagccgaatgggtgctgctggaccagaccagaaacagcctgttctgggagaacaagaccaagggcgctaaccagagccagacaccttgtgtgcaggttctggccggcatgacaatcgccacaagctacctgggcatcagcgccgtgtctgagttcttcggcacaagcctgacaccactgttccacttccacatcagcacatgcctgaaaacccagggcgctttctacatctgcggccagtccatccaccagtgtctgccatctaactggaccggcacctgtaccatcggctacgtgacccctgacatctttatcgcccctggcaacctgtctctgcccattcctatctacggcaacagccctctgcctagagtgcggagagccatccacttcattcctctgctggccggcctgggaatcctggctggaacaggcactggaatcgccggcattacaaaggccagcctgacctacagccagctgagcaaagagatcgccaacaacatcgacacaatggctaaggccctgaccaccatgcaagagcagatcgactctctggctgccgtggtgctccagaatagacgcggactggacatgctgacagccgctcaaggcggaatttgtctggccctggatgagaagtgctgcttctgggtcaaccagagcggcaaggtgcaggacaacatccggcagctgctgaatcaggccagcagcctgagagagagagccacacaaggctggctgaactgggaaggtacctggaagtggttcagctgggtgctccctctgaccggacctctggtttctctgctcctcctgctgctgttcggcccctgtctgctgaacctgattacccagtttgtgtccagccggctccaggccatcaagctcggatccactagtccagtgtggtggaattctgcagatatccagcacagtggcggccgctcgagtctagagggcccgaacaaaaactcatctcagaagaggatctga

SEQ ID NO: 231 - DNA, 1668 bp, synthetic construct
  source 1..1668: mol_type = other DNA
atgggactgctgctgctggtgctgatcctgacaccttctctggccgcctacagacaccctgacttcccactgctggaaaaggcccagcagctcctgcaaagcacaggcagcccctacagcaccaactgctggctgtgtaccagctccagcacagagacacccggcacagcctatcctgcctctccaagagagtggacctctatcgaggccgagctgcacatcagctacagatgggaccccaacctgaagggcctgatgaggccagccaatagcctgctgagcaccgtgaagcaggacttccccgacatcagacagaagcctccaatcttcggccccatcttcaccaacatcaacctgatgggaatcgcccctatctgcgtgatggctaagcggaagaacggcaccaacgtgggcacactgcctagcaccgtgtgcaacgtgaccttcaccgtggacagcaaccagcagacctaccagacatacacccacaaccagttccggcaccagcctcggtttcccaagcctcctaacatcacctttccacagggcaccctgctggacaagagcagcagattctgtcagggcagaccctccagctgctctacccggaacttctggttcagacccgccgactacaaccagtgcctccagatcagcaacctgagcagcacagccgaatgggtgctgctggaccagaccagaaacagcctgttctgggagaacaagaccaagggcgctaaccagagccagacaccttgtgtgcaggttctggccggcatgacaatcgccacaagctacctgggcatcagcgccgtgtctgagttcttcggcacaagcctgacaccactgttccacttccacatcagcacatgcctgaaaacccagggcgctttctacatctgcggccagtccatccaccagtgtctgccatctaactggaccggcacctgtaccatcggctacgtgacccctgacatctttatcgcccctggcaacctgtctctgcccattcctatctacggcaacagccctctgcctagagtgcggagagccatccacttcattcctctgctggccggcctgggaatcctggctggaacaggcactggaatcgccggcattacaaaggccagcctgacctacagccagctgagcaaagagatcgccaacaacatcgacacaatggctaaggccctgaccaccatgcaagagcagatcgactctctggctgccgtggtgctccagaatagacgcggactggacatgctgacagccgctcaaggcggaatttgtctggccctggatgagaagtgctgcttctgggtcaaccagagcggcaaggtgcaggacaacatccggcagctgctgaatcaggccagcagcctgagagagagagccacacaaggctggctgaactgggaaggtacctggaagtggttcagctgggtgctccctctgaccggacctctggtttctctgctcctcctgctgctgttcggcccctgtctgctgaacctgattacccagtttgtgtccagcaagcttaacatcatccacgctatgggatccactagtccagtgtggtggaattctgcagatatccagcacagtggcggccgctcgagtctagagggcccgaacaaaaactcatctcagaagaggatctga

SEQ ID NO: 232 - DNA, 1617 bp, synthetic construct
  source 1..1617: mol_type = other DNA
atgggactgctgctgctggtgctgatcctgacaccttctctggccgcctacagacaccctgacttcccactgctggaaaaggcccagcagctcctgcaaagcacaggcagcccctacagcaccaactgctggctgtgtaccagctccagcacagagacacccggcacagcctatcctgcctctccaagagagtggacctctatcgaggccgagctgcacatcagctacagatgggaccccaacctgaagggcctgatgaggccagccaatagcctgctgagcaccgtgaagcaggacttccccgacatcagacagaagcctccaatcttcggccccatcttcaccaacatcaacctgatgggaatcgcccctatctgcgtgatggctaagcggaagaacggcaccaacgtgggcacactgcctagcaccgtgtgcaacgtgaccttcaccgtggacagcaaccagcagacctaccagacatacacccacaaccagttccggcaccagcctcggtttcccaagcctcctaacatcacctttccacagggcaccctgctggacaagagcagcagattctgtcagggcagaccctccagctgctctacccggaacttctggttcagacccgccgactacaaccagtgcctccagatcagcaacctgagcagcacagccgaatgggtgctgctggaccagaccagaaacagcctgttctgggagaacaagaccaagggcgctaaccagagccagacaccttgtgtgcaggttctggccggcatgacaatcgccacaagctacctgggcatcagcgccgtgtctgagttcttcggcacaagcctgacaccactgttccacttccacatcagcacatgcctgaaaacccagggcgctttctacatctgcggccagtccatccaccagtgtctgccatctaactggaccggcacctgtaccatcggctacgtgacccctgacatctttatcgcccctggcaacctgtctctgcccattcctatctacggcaacagccctctgcctagagtgcggagagccatccacttcattcctctgctggccggcctgggaatcctggctggaacaggcactggaatcgccggcattacaaaggccagcctgacctacagccagctgagcaaagagatcgccaacaacatcgacacaatggctaaggccctgaccaccatgcaagagcagatcgactctctggctgccgtggtgctccagaatagacgcggactggacatgctgacagccgctcaaggcggaatttgtctggccctggatgagaagtgctgcttctgggtcaaccagagcggcaaggtgcaggacaacatccggcagctgctgaatcaggccagcagcctgagagagagagccacacaaggctggctgaactgggaaggtacctggaagtggttcagctgggtgctccctctgaccggacctctggtttctctgctcctcctgctgctgttcggcccctgtatcttcaacagactgaccgccttcatcaacgacaagctgaacatcatccacgctatggtgctgacacagcagtaccaggtgctgcggacagatgaggaagcccaggattaa

SEQ ID NO: 233 - DNA, 1590 bp, synthetic construct
  source 1..1590: mol_type = other DNA
atgggactgctgctgctggtgctgatcctgacaccttctctggccgcctacagacaccctgacttcccactgctggaaaaggcccagcagctcctgcaaagcacaggcagcccctacagcaccaactgctggctgtgtaccagctccagcacagagacacccggcacagcctatcctgcctctccaagagagtggacctctatcgaggccgagctgcacatcagctacagatgggaccccaacctgaagggcctgatgaggccagccaatagcctgctgagcaccgtgaagcaggacttccccgacatcagacagaagcctccaatcttcggccccatcttcaccaacatcaacctgatgggaatcgcccctatctgcgtgatggctaagcggaagaacggcaccaacgtgggcacactgcctagcaccgtgtgcaacgtgaccttcaccgtggacagcaaccagcagacctaccagacatacacccacaaccagttccggcaccagcctcggtttcccaagcctcctaacatcacctttccacagggcaccctgctggacaagagcagcagattctgtcagggcagaccctccagctgctctacccggaacttctggttcagacccgccgactacaaccagtgcctccagatcagcaacctgagcagcacagccgaatgggtgctgctggaccagaccagaaacagcctgttctgggagaacaagaccaagggcgctaaccagagccagacaccttgtgtgcaggttctggccggcatgacaatcgccacaagctacctgggcatcagcgccgtgtctgagttcttcggcacaagcctgacaccactgttccacttccacatcagcacatgcctgaaaacccagggcgctttctacatctgcggccagtccatccaccagtgtctgccatctaactggaccggcacctgtaccatcggctacgtgacccctgacatctttatcgcccctggcaacctgtctctgcccattcctatctacggcaacagccctctgcctagagtgcggagagccatccacttcattcctctgctggccggcctgggaatcctggctggaacaggcactggaatcgccggcattacaaaggccagcctgacctacagccagctgagcaaagagatcgccaacaacatcgacacaatggctaaggccctgaccaccatgcaagagcagatcgactctctggctgccgtggtgctccagaatagacgcggactggacatgctgacagccgctcaaggcggaatttgtctggccctggatgagaagtgctgcttctgggtcaaccagagcggcaaggtgcaggacaacatccggcagctgctgaatcaggccagcagcctgagagagagagccacacaaggctggctgaactgggaaggtacctggaagtggttcagctgggtgctccctctgaccggacctctggtttctctgctcctcctgctgctgttcggcccctgtatcttcaacagactgaccgccttcatcaacgacaagctgaacatcatccacgctatggtgctgacacagcagtaccaggtgctg

SEQ ID NO: 234 - DNA, 1587 bp, synthetic construct
  source 1..1587: mol_type = other DNA
atgggactgctgctgctggtgctgatcctgacaccttctctggccgcctacagacaccctgacttcccactgctggaaaaggcccagcagctcctgcaaagcacaggcagcccctacagcaccaactgctggctgtgtaccagctccagcacagagacacccggcacagcctatcctgcctctccaagagagtggacctctatcgaggccgagctgcacatcagctacagatgggaccccaacctgaagggcctgatgaggccagccaatagcctgctgagcaccgtgaagcaggacttccccgacatcagacagaagcctccaatcttcggccccatcttcaccaacatcaacctgatgggaatcgcccctatctgcgtgatggctaagcggaagaacggcaccaacgtgggcacactgcctagcaccgtgtgcaacgtgaccttcaccgtggacagcaaccagcagacctaccagacatacacccacaaccagttccggcaccagcctcggtttcccaagcctcctaacatcacctttccacagggcaccctgctggacaagagcagcagattctgtcagggcagaccctccagctgctctacccggaacttctggttcagacccgccgactacaaccagtgcctccagatcagcaacctgagcagcacagccgaatgggtgctgctggaccagaccagaaacagcctgttctgggagaacaagaccaagggcgctaaccagagccagacaccttgtgtgcaggttctggccggcatgacaatcgccacaagctacctgggcatcagcgccgtgtctgagttcttcggcacaagcctgacaccactgttccacttccacatcagcacatgcctgaaaacccagggcgctttctacatctgcggccagtccatccaccagtgtctgccatctaactggaccggcacctgtaccatcggctacgtgacccctgacatctttatcgcccctggcaacctgtctctgcccattcctatctacggcaacagccctctgcctagagtgcggagagccatccacttcattcctctgctggccggcctgggaatcctggctggaacaggcactggaatcgccggcattacaaaggccagcctgacctacagccagctgagcaaagagatcgccaacaacatcgacacaatggctaaggccctgaccaccatgcaagagcagatcgactctctggctgccgtggtgctccagaatagacgcggactggacatgctgacagccgctcaaggcggaatttgtctggccctggatgagaagtgctgcttctgggtcaaccagagcggcaaggtgcaggacaacatccggcagctgctgaatcaggccagcagcctgagagagagagccacacaaggctggctgaactgggaaggtacctggaagtggttcagctgggtgctccctctgaccggacctctggtttctctgctcctcctgctgctgttcggcccctgtatcttcaacagactgaccgccttcatcaacgacaagctgaacatcatccacgctatggtgctgacacagcagtaccaggtg

SEQ ID NO: 235 - DNA, 1584 bp, synthetic construct
  source 1..1584: mol_type = other DNA
atgggactgctgctgctggtgctgatcctgacaccttctctggccgcctacagacaccctgacttcccactgctggaaaaggcccagcagctcctgcaaagcacaggcagcccctacagcaccaactgctggctgtgtaccagctccagcacagagacacccggcacagcctatcctgcctctccaagagagtggacctctatcgaggccgagctgcacatcagctacagatgggaccccaacctgaagggcctgatgaggccagccaatagcctgctgagcaccgtgaagcaggacttccccgacatcagacagaagcctccaatcttcggccccatcttcaccaacatcaacctgatgggaatcgcccctatctgcgtgatggctaagcggaagaacggcaccaacgtgggcacactgcctagcaccgtgtgcaacgtgaccttcaccgtggacagcaaccagcagacctaccagacatacacccacaaccagttccggcaccagcctcggtttcccaagcctcctaacatcacctttccacagggcaccctgctggacaagagcagcagattctgtcagggcagaccctccagctgctctacccggaacttctggttcagacccgccgactacaaccagtgcctccagatcagcaacctgagcagcacagccgaatgggtgctgctggaccagaccagaaacagcctgttctgggagaacaagaccaagggcgctaaccagagccagacaccttgtgtgcaggttctggccggcatgacaatcgccacaagctacctgggcatcagcgccgtgtctgagttcttcggcacaagcctgacaccactgttccacttccacatcagcacatgcctgaaaacccagggcgctttctacatctgcggccagtccatccaccagtgtctgccatctaactggaccggcacctgtaccatcggctacgtgacccctgacatctttatcgcccctggcaacctgtctctgcccattcctatctacggcaacagccctctgcctagagtgcggagagccatccacttcattcctctgctggccggcctgggaatcctggctggaacaggcactggaatcgccggcattacaaaggccagcctgacctacagccagctgagcaaagagatcgccaacaacatcgacacaatggctaaggccctgaccaccatgcaagagcagatcgactctctggctgccgtggtgctccagaatagacgcggactggacatgctgacagccgctcaaggcggaatttgtctggccctggatgagaagtgctgcttctgggtcaaccagagcggcaaggtgcaggacaacatccggcagctgctgaatcaggccagcagcctgagagagagagccacacaaggctggctgaactgggaaggtacctggaagtggttcagctgggtgctccctctgaccggacctctggtttctctgctcctcctgctgctgttcggcccctgtatcttcaacagactgaccgccttcatcaacgacaagctgaacatcatccacgctatggtgctgacacagcagtaccag

SEQ ID NO: 236 - DNA, 1581 bp, synthetic construct
  source 1..1581: mol_type = other DNA
atgggactgctgctgctggtgctgatcctgacaccttctctggccgcctacagacaccctgacttcccactgctggaaaaggcccagcagctcctgcaaagcacaggcagcccctacagcaccaactgctggctgtgtaccagctccagcacagagacacccggcacagcctatcctgcctctccaagagagtggacctctatcgaggccgagctgcacatcagctacagatgggaccccaacctgaagggcctgatgaggccagccaatagcctgctgagcaccgtgaagcaggacttccccgacatcagacagaagcctccaatcttcggccccatcttcaccaacatcaacctgatgggaatcgcccctatctgcgtgatggctaagcggaagaacggcaccaacgtgggcacactgcctagcaccgtgtgcaacgtgaccttcaccgtggacagcaaccagcagacctaccagacatacacccacaaccagttccggcaccagcctcggtttcccaagcctcctaacatcacctttccacagggcaccctgctggacaagagcagcagattctgtcagggcagaccctccagctgctctacccggaacttctggttcagacccgccgactacaaccagtgcctccagatcagcaacctgagcagcacagccgaatgggtgctgctggaccagaccagaaacagcctgttctgggagaacaagaccaagggcgctaaccagagccagacaccttgtgtgcaggttctggccggcatgacaatcgccacaagctacctgggcatcagcgccgtgtctgagttcttcggcacaagcctgacaccactgttccacttccacatcagcacatgcctgaaaacccagggcgctttctacatctgcggccagtccatccaccagtgtctgccatctaactggaccggcacctgtaccatcggctacgtgacccctgacatctttatcgcccctggcaacctgtctctgcccattcctatctacggcaacagccctctgcctagagtgcggagagccatccacttcattcctctgctggccggcctgggaatcctggctggaacaggcactggaatcgccggcattacaaaggccagcctgacctacagccagctgagcaaagagatcgccaacaacatcgacacaatggctaaggccctgaccaccatgcaagagcagatcgactctctggctgccgtggtgctccagaatagacgcggactggacatgctgacagccgctcaaggcggaatttgtctggccctggatgagaagtgctgcttctgggtcaaccagagcggcaaggtgcaggacaacatccggcagctgctgaatcaggccagcagcctgagagagagagccacacaaggctggctgaactgggaaggtacctggaagtggttcagctgggtgctccctctgaccggacctctggtttctctgctcctcctgctgctgttcggcccctgtatcttcaacagactgaccgccttcatcaacgacaagctgaacatcatccacgctatggtgctgacacagcagtac

SEQ ID NO: 237 - DNA, 1578 bp, synthetic construct
  source 1..1578: mol_type = other DNA
atgggactgctgctgctggtgctgatcctgacaccttctctggccgcctacagacaccctgacttcccactgctggaaaaggcccagcagctcctgcaaagcacaggcagcccctacagcaccaactgctggctgtgtaccagctccagcacagagacacccggcacagcctatcctgcctctccaagagagtggacctctatcgaggccgagctgcacatcagctacagatgggaccccaacctgaagggcctgatgaggccagccaatagcctgctgagcaccgtgaagcaggacttccccgacatcagacagaagcctccaatcttcggccccatcttcaccaacatcaacctgatgggaatcgcccctatctgcgtgatggctaagcggaagaacggcaccaacgtgggcacactgcctagcaccgtgtgcaacgtgaccttcaccgtggacagcaaccagcagacctaccagacatacacccacaaccagttccggcaccagcctcggtttcccaagcctcctaacatcacctttccacagggcaccctgctggacaagagcagcagattctgtcagggcagaccctccagctgctctacccggaacttctggttcagacccgccgactacaaccagtgcctccagatcagcaacctgagcagcacagccgaatgggtgctgctggaccagaccagaaacagcctgttctgggagaacaagaccaagggcgctaaccagagccagacaccttgtgtgcaggttctggccggcatgacaatcgccacaagctacctgggcatcagcgccgtgtctgagttcttcggcacaagcctgacaccactgttccacttccacatcagcacatgcctgaaaacccagggcgctttctacatctgcggccagtccatccaccagtgtctgccatctaactggaccggcacctgtaccatcggctacgtgacccctgacatctttatcgcccctggcaacctgtctctgcccattcctatctacggcaacagccctctgcctagagtgcggagagccatccacttcattcctctgctggccggcctgggaatcctggctggaacaggcactggaatcgccggcattacaaaggccagcctgacctacagccagctgagcaaagagatcgccaacaacatcgacacaatggctaaggccctgaccaccatgcaagagcagatcgactctctggctgccgtggtgctccagaatagacgcggactggacatgctgacagccgctcaaggcggaatttgtctggccctggatgagaagtgctgcttctgggtcaaccagagcggcaaggtgcaggacaacatccggcagctgctgaatcaggccagcagcctgagagagagagccacacaaggctggctgaactgggaaggtacctggaagtggttcagctgggtgctccctctgaccggacctctggtttctctgctcctcctgctgctgttcggcccctgtatcttcaacagactgaccgccttcatcaacgacaagctgaacatcatccacgctatggtgctgacacagcag

SEQ ID NO: 238 - DNA, 1575 bp, synthetic construct
  source 1..1575: mol_type = other DNA
atgggactgctgctgctggtgctgatcctgacaccttctctggccgcctacagacaccctgacttcccactgctggaaaaggcccagcagctcctgcaaagcacaggcagcccctacagcaccaactgctggctgtgtaccagctccagcacagagacacccggcacagcctatcctgcctctccaagagagtggacctctatcgaggccgagctgcacatcagctacagatgggaccccaacctgaagggcctgatgaggccagccaatagcctgctgagcaccgtgaagcaggacttccccgacatcagacagaagcctccaatcttcggccccatcttcaccaacatcaacctgatgggaatcgcccctatctgcgtgatggctaagcggaagaacggcaccaacgtgggcacactgcctagcaccgtgtgcaacgtgaccttcaccgtggacagcaaccagcagacctaccagacatacacccacaaccagttccggcaccagcctcggtttcccaagcctcctaacatcacctttccacagggcaccctgctggacaagagcagcagattctgtcagggcagaccctccagctgctctacccggaacttctggttcagacccgccgactacaaccagtgcctccagatcagcaacctgagcagcacagccgaatgggtgctgctggaccagaccagaaacagcctgttctgggagaacaagaccaagggcgctaaccagagccagacaccttgtgtgcaggttctggccggcatgacaatcgccacaagctacctgggcatcagcgccgtgtctgagttcttcggcacaagcctgacaccactgttccacttccacatcagcacatgcctgaaaacccagggcgctttctacatctgcggccagtccatccaccagtgtctgccatctaactggaccggcacctgtaccatcggctacgtgacccctgacatctttatcgcccctggcaacctgtctctgcccattcctatctacggcaacagccctctgcctagagtgcggagagccatccacttcattcctctgctggccggcctgggaatcctggctggaacaggcactggaatcgccggcattacaaaggccagcctgacctacagccagctgagcaaagagatcgccaacaacatcgacacaatggctaaggccctgaccaccatgcaagagcagatcgactctctggctgccgtggtgctccagaatagacgcggactggacatgctgacagccgctcaaggcggaatttgtctggccctggatgagaagtgctgcttctgggtcaaccagagcggcaaggtgcaggacaacatccggcagctgctgaatcaggccagcagcctgagagagagagccacacaaggctggctgaactgggaaggtacctggaagtggttcagctgggtgctccctctgaccggacctctggtttctctgctcctcctgctgctgttcggcccctgtatcttcaacagactgaccgccttcatcaacgacaagctgaacatcatccacgctatggtgctgacacag

SEQ ID NO: 239 - DNA, 1572 bp, synthetic construct
  source 1..1572: mol_type = other DNA
atgggactgctgctgctggtgctgatcctgacaccttctctggccgcctacagacaccctgacttcccactgctggaaaaggcccagcagctcctgcaaagcacaggcagcccctacagcaccaactgctggctgtgtaccagctccagcacagagacacccggcacagcctatcctgcctctccaagagagtggacctctatcgaggccgagctgcacatcagctacagatgggaccccaacctgaagggcctgatgaggccagccaatagcctgctgagcaccgtgaagcaggacttccccgacatcagacagaagcctccaatcttcggccccatcttcaccaacatcaacctgatgggaatcgcccctatctgcgtgatggctaagcggaagaacggcaccaacgtgggcacactgcctagcaccgtgtgcaacgtgaccttcaccgtggacagcaaccagcagacctaccagacatacacccacaaccagttccggcaccagcctcggtttcccaagcctcctaacatcacctttccacagggcaccctgctggacaagagcagcagattctgtcagggcagaccctccagctgctctacccggaacttctggttcagacccgccgactacaaccagtgcctccagatcagcaacctgagcagcacagccgaatgggtgctgctggaccagaccagaaacagcctgttctgggagaacaagaccaagggcgctaaccagagccagacaccttgtgtgcaggttctggccggcatgacaatcgccacaagctacctgggcatcagcgccgtgtctgagttcttcggcacaagcctgacaccactgttccacttccacatcagcacatgcctgaaaacccagggcgctttctacatctgcggccagtccatccaccagtgtctgccatctaactggaccggcacctgtaccatcggctacgtgacccctgacatctttatcgcccctggcaacctgtctctgcccattcctatctacggcaacagccctctgcctagagtgcggagagccatccacttcattcctctgctggccggcctgggaatcctggctggaacaggcactggaatcgccggcattacaaaggccagcctgacctacagccagctgagcaaagagatcgccaacaacatcgacacaatggctaaggccctgaccaccatgcaagagcagatcgactctctggctgccgtggtgctccagaatagacgcggactggacatgctgacagccgctcaaggcggaatttgtctggccctggatgagaagtgctgcttctgggtcaaccagagcggcaaggtgcaggacaacatccggcagctgctgaatcaggccagcagcctgagagagagagccacacaaggctggctgaactgggaaggtacctggaagtggttcagctgggtgctccctctgaccggacctctggtttctctgctcctcctgctgctgttcggcccctgtatcttcaacagactgaccgccttcatcaacgacaagctgaacatcatccacgctatggtgctgaca

SEQ ID NO: 240 - DNA, 1719 bp, synthetic construct
  source 1..1719: mol_type = other DNA
atgggactgctgctgctggtgctgatcctgacaccttctctggccgcctacagacaccctgacttcccactgctggaaaaggcccagcagctcctgcaaagcacaggcagcccctacagcaccaactgctggctgtgtaccagctccagcacagagacacccggcacagcctatcctgcctctccaagagagtggacctctatcgaggccgagctgcacatcagctacagatgggaccccaacctgaagggcctgatgaggccagccaatagcctgctgagcaccgtgaagcaggacttccccgacatcagacagaagcctccaatcttcggccccatcttcaccaacatcaacctgatgggaatcgcccctatctgcgtgatggctaagcggaagaacggcaccaacgtgggcacactgcctagcaccgtgtgcaacgtgaccttcaccgtggacagcaaccagcagacctaccagacatacacccacaaccagttccggcaccagcctcggtttcccaagcctcctaacatcacctttccacagggcaccctgctggacaagagcagcagattctgtcagggcagaccctccagctgctctacccggaacttctggttcagacccgccgactacaaccagtgcctccagatcagcaacctgagcagcacagccgaatgggtgctgctggaccagaccagaaacagcctgttctgggagaacaagaccaagggcgctaaccagagccagacaccttgtgtgcaggttctggccggcatgacaatcgccacaagctacctgggcatcagcgccgtgtctgagttcttcggcacaagcctgacaccactgttccacttccacatcagcacatgcctgaaaacccagggcgctttctacatctgcggccagtccatccaccagtgtctgccatctaactggaccggcacctgtaccatcggctacgtgacccctgacatctttatcgcccctggcaacctgtctctgcccattcctatctacggcaacagccctctgcctagagtgcggagagccatccacttcattcctctgctggccggcctgggaatcctggctggaacaggcactggaatcgccggcattacaaaggccagcctgacctacagccagctgagcaaagagatcgccaacaacatcgacacaatggctaaggccctgaccaccatgcaagagcagatcgactctctggctgccgtggtgctccagaatagacgcggactggacatgctgacagccgctcaaggcggaatttgtctggccctggatgagaagtgctgcttctgggtcaaccagagcggcaaggtgcaggacaacatccggcagctgctgaatcaggccagcagcctgagagagagagccacacaaggctggctgaactgggaaggtacctggaagtggttcagctgggtgctccctctgaccggacctctggtttctctgctcctcctgctgctgttcggcccctgtatctttaacctccttgttaactttgtctcttccagaatcgaagctgtaaaactacaaatggagcccaagatgcagtccaagactaagatctaccgcagacccctggaccggcctgccagcccacgatctgatgttaatgacatcaaaggcacccctcctgaggaaatctcagctgcacaacctctactacgccccaattcagcaggaagcagt

SEQ ID NO: 241 - DNA, 1650 bp, synthetic construct
  source 1..1650: mol_type = other DNA
atgggactgctgctgctggtgctgatcctgacaccttctctggccgcctacagacaccctgacttcccactgctggaaaaggcccagcagctcctgcaaagcacaggcagcccctacagcaccaactgctggctgtgtaccagctccagcacagagacacccggcacagcctatcctgcctctccaagagagtggacctctatcgaggccgagctgcacatcagctacagatgggaccccaacctgaagggcctgatgaggccagccaatagcctgctgagcaccgtgaagcaggacttccccgacatcagacagaagcctccaatcttcggccccatcttcaccaacatcaacctgatgggaatcgcccctatctgcgtgatggctaagcggaagaacggcaccaacgtgggcacactgcctagcaccgtgtgcaacgtgaccttcaccgtggacagcaaccagcagacctaccagacatacacccacaaccagttccggcaccagcctcggtttcccaagcctcctaacatcacctttccacagggcaccctgctggacaagagcagcagattctgtcagggcagaccctccagctgctctacccggaacttctggttcagacccgccgactacaaccagtgcctccagatcagcaacctgagcagcacagccgaatgggtgctgctggaccagaccagaaacagcctgttctgggagaacaagaccaagggcgctaaccagagccagacaccttgtgtgcaggttctggccggcatgacaatcgccacaagctacctgggcatcagcgccgtgtctgagttcttcggcacaagcctgacaccactgttccacttccacatcagcacatgcctgaaaacccagggcgctttctacatctgcggccagtccatccaccagtgtctgccatctaactggaccggcacctgtaccatcggctacgtgacccctgacatctttatcgcccctggcaacctgtctctgcccattcctatctacggcaacagccctctgcctagagtgcggagagccatccacttcattcctctgctggccggcctgggaatcctggctggaacaggcactggaatcgccggcattacaaaggccagcctgacctacagccagctgagcaaagagatcgccaacaacatcgacacaatggctaaggccctgaccaccatgcaagagcagatcgactctctggctgccgtggtgctccagaatagacgcggactggacatgctgacagccgctcaaggcggaatttgtctggccctggatgagaagtgctgcttctgggtcaaccagagcggcaaggtgcaggacaacatccggcagctgctgaatcaggccagcagcctgagagagagagccacacaaggctggctgaactgggaaggtacctggaagtggttcagctgggtgctccctctgaccggacctctggtttctctgctcctcctgctgctgttcggcccctgtatctttaacctccttgttaactttgtctcttccagaatcgaagctgtaaaactacaaatggagcccaagatgcagtccaagactaagatctaccgcagacccctggaccggcctgccagcccacgatctgatgttaatgacatc

SEQ ID NO: 242 - DNA, 1677 bp, synthetic construct
  source 1..1677: mol_type = other DNA
atgggactgctgctgctggtgctgatcctgacaccttctctggccgcctacagacaccctgacttcccactgctggaaaaggcccagcagctcctgcaaagcacaggcagcccctacagcaccaactgctggctgtgtaccagctccagcacagagacacccggcacagcctatcctgcctctccaagagagtggacctctatcgaggccgagctgcacatcagctacagatgggaccccaacctgaagggcctgatgaggccagccaatagcctgctgagcaccgtgaagcaggacttccccgacatcagacagaagcctccaatcttcggccccatcttcaccaacatcaacctgatgggaatcgcccctatctgcgtgatggctaagcggaagaacggcaccaacgtgggcacactgcctagcaccgtgtgcaacgtgaccttcaccgtggacagcaaccagcagacctaccagacatacacccacaaccagttccggcaccagcctcggtttcccaagcctcctaacatcacctttccacagggcaccctgctggacaagagcagcagattctgtcagggcagaccctccagctgctctacccggaacttctggttcagacccgccgactacaaccagtgcctccagatcagcaacctgagcagcacagccgaatgggtgctgctggaccagaccagaaacagcctgttctgggagaacaagaccaagggcgctaaccagagccagacaccttgtgtgcaggttctggccggcatgacaatcgccacaagctacctgggcatcagcgccgtgtctgagttcttcggcacaagcctgacaccactgttccacttccacatcagcacatgcctgaaaacccagggcgctttctacatctgcggccagtccatccaccagtgtctgccatctaactggaccggcacctgtaccatcggctacgtgacccctgacatctttatcgcccctggcaacctgtctctgcccattcctatctacggcaacagccctctgcctagagtgcggagagccatccacttcattcctctgctggccggcctgggaatcctggctggaacaggcactggaatcgccggcattacaaaggccagcctgacctacagccagctgagcaaagagatcgccaacaacatcgacacaatggctaaggccctgaccaccatgcaagagcagatcgactctctggctgccgtggtgctccagaatagacgcggactggacatgctgacagccgctcaaggcggaatttgtctggccctggatgagaagtgctgcttctgggtcaaccagagcggcaaggtgcaggacaacatccggcagctgctgaatcaggccagcagcctgagagagagagccacacaaggctggctgaactgggaaggtacctggaagtggttcagctgggtgctccctctgaccggacctctggtttctctgctcctcctgctgctgttcggcccctgtatctttaacctccttgttaactttgtctcttccagaatcgaagctgtaaaactacaaatggagcccaagatgcagtccaagactaagatctaccgcagacccctggaccggcctgccagcccacgatctgatgttaatgacatcaaaggcacccctcctgaggaaatctca

SEQ ID NO: 243 - DNA, 25 bp, synthetic construct
  source 1..25: mol_type = other DNA
ggggggggggggggggggggggggg

SEQ ID NO: 244 - DNA, 25 bp, synthetic construct
  source 1..25: mol_type = other DNA
ggggggggggggggggggggggggg

SEQ ID NO: 245 - DNA, 25 bp, synthetic construct
  source 1..25: mol_type = other DNA
ggggggggggggggggggggggggg

SEQ ID NO: 246 - DNA, 25 bp, synthetic construct
  source 1..25: mol_type = other DNA
ggggggggggggggggggggggggg

SEQ ID NO: 247 - DNA, 25 bp, synthetic construct
  source 1..25: mol_type = other DNA
ggggggggggggggggggggggggg

SEQ ID NO: 248 - DNA, 25 bp, synthetic construct
  source 1..25: mol_type = other DNA
ggggggggggggggggggggggggg

SEQ ID NO: 249 - DNA, 25 bp, synthetic construct
  source 1..25: mol_type = other DNA
ggggggggggggggggggggggggg

SEQ ID NO: 250 - DNA, 25 bp, synthetic construct
  source 1..25: mol_type = other DNA
ggggggggggggggggggggggggg

SEQ ID NO: 251 - DNA, 1671 bp, synthetic construct
  source 1..1671: mol_type = other DNA
atggagacagacacactcctgctatgggtactgctgctctgggttccaggttccactggtgacggcttcgacgaccccagaaaggctattgccctggtgcagaagcagcacggcaagccttgtgaatgctctggcggccaagtgtctgaggcccctcctaactctatccagcaagtgacatgccccggcaagaccgcctacctgatgaccaaccagaaatggaagtgccgcgtgacccctaagaatctgacaccttctggcggcgaactccagaactgcccctgcaacaccttccaggactccatgcactccagctgctacaccgagtacagacagtgccgggccaacaacaagacctactacaccgccacactgctgaagatcagaagcggcagcctgaacgaggtgcagatcctccagaatcctaaccagctgctgcaaagcccttgcagaggcagcatcaaccagcctgtgtgttggagcgccaccgctcctatccacatctctgatggcggaggccctctggacaccaagagagtgtggaccgtccagaagagactggaacagatccacaaggccatgcatcccgagctgcaatatcaccctctggctctgcccaaagtgcgggacgatctgtctctggacgcccggacattcgacatcctgaacaccaccttccggctgctccagatgagcaacttcagcctggctcaggactgctggctgtgtctgaagctgggcacacctacacctctggctatccccacacctagcctgacatacagcctggccgatagcctggctaatgccagctgccagatcatccctccactgctggttcagcccatgcagttcagcaacagcagctgcctgagcagccccttcatcaacgacaccgagcagattgacctgggagccgtgaccttcaccaactgcacctctgtggctaacgtgtcctctcctctgtgcgccctgaatggcagcgtgttcctgtgcggcaacaacatggcctacacctacctgcctcagaactggaccggactgtgcgtgcaggcttctctgctgcctgacatcgacatcatccctggcgacgagcccgtgcctattcctgccatcgaccactacatccaccggcctaaaagagccgtgcagttcatccctctgctggccggactgggaatcaccgccgcttttacaacaggcgctacaggactgggcgtgtccgtgacacagtacaccaagctgagccaccagctgatctccgacgtgcaggttctgagcggcaccattcaggacctccaggatcaggtggactctctggctgaagtggccctccagaaccgcagaggactggatctgctgacagccgagcaaggcggaatctgtctggccctgcaagagaagtgctgcttttacgccaacaagagcggcatcgtgcggaacaagatcaggacactgcaagaggaactgcaaaagcggagagagagcctggcctccaatcctctgtggacaggactgcaaggcttcctgccttacctgctgccactgcttggacctctgctgaccctgctgctgatcctgacaatcggcccttgcgtgttcagcagactgatggcctttatcaacgatcggctgaatgtggtgcacgctatggtgctggcccagcagtaa

SEQ ID NO: 252 - DNA, 1677 bp, synthetic construct
  source 1..1677: mol_type = other DNA
atggagacagacacactcctgctatgggtactgctgctctgggttccaggttccactggtgacggcttcgacgaccccagaaaggctattgccctggtgcagaagcagcacggcaagccttgtgaatgctctggcggccaagtgtctgaggcccctcctaactctatccagcaagtgacatgccccggcaagaccgcctacctgatgaccaaccagaaatggaagtgccgcgtgacccctaagaatctgacaccttctggcggcgaactccagaactgcccctgcaacaccttccaggactccatgcactccagctgctacaccgagtacagacagtgccgggccaacaacaagacctactacaccgccacactgctgaagatcagaagcggcagcctgaacgaggtgcagatcctccagaatcctaaccagctgctgcaaagcccttgcagaggcagcatcaaccagcctgtgtgttggagcgccaccgctcctatccacatctctgatggcggaggccctctggacaccaagagagtgtggaccgtccagaagagactggaacagatccacaaggccatgcatcccgagctgcaatatcaccctctggctctgcccaaagtgcgggacgatctgtctctggacgcccggacattcgacatcctgaacaccaccttccggctgctccagatgagcaacttcagcctggctcaggactgctggctgtgtctgaagctgggcacacctacacctctggctatccccacacctagcctgacatacagcctggccgatagcctggctaatgccagctgccagatcatccctccactgctggttcagcccatgcagttcagcaacagcagctgcctgagcagccccttcatcaacgacaccgagcagattgacctgggagccgtgaccttcaccaactgcacctctgtggctaacgtgtcctctcctctgtgcgccctgaatggcagcgtgttcctgtgcggcaacaacatggcctacacctacctgcctcagaactggaccggactgtgcgtgcaggcttctctgctgcctgacatcgacatcatccctggcgacgagcccgtgcctattcctgccatcgaccactacatccaccggcctaaaagagccgtgcagttcatccctctgctggccggactgggaatcaccgccgcttttacaacaggcgctacaggactgggcgtgtccgtgacacagtacaccaagctgagccaccagctgatctccgacgtgcaggttctgagcggcaccattcaggacctccaggatcaggtggactctctggctgaagtggccctccagaaccgcagaggactggatctgctgacagccgagcaaggcggaatctgtctggccctgcaagagaagtgctgcttttacgccaacaagagcggcatcgtgcggaacaagatcaggacactgcaagaggaactgcaaaagcggagagagagcctggcctccaatcctctgtggacaggactgcaaggcttcctgccttacctgctgccactgcttggacctctgctgaccctgctgctgatcctgacaatcggcccttgcgtgttcagcagactgatggcctttatcaacgatcggctgaatgtggtgcacgctatggtgctggcccagcagtatcagtaa

SEQ ID NO: 253 - DNA, 1656 bp, synthetic construct
  source 1..1656: mol_type = other DNA
atggagacagacacactcctgctatgggtactgctgctctgggttccaggttccactggtgacggcttcgacgaccccagaaaggctattgccctggtgcagaagcagcacggcaagccttgtgaatgctctggcggccaagtgtctgaggcccctcctaactctatccagcaagtgacatgccccggcaagaccgcctacctgatgaccaaccagaaatggaagtgccgcgtgacccctaagaatctgacaccttctggcggcgaactccagaactgcccctgcaacaccttccaggactccatgcactccagctgctacaccgagtacagacagtgccgggccaacaacaagacctactacaccgccacactgctgaagatcagaagcggcagcctgaacgaggtgcagatcctccagaatcctaaccagctgctgcaaagcccttgcagaggcagcatcaaccagcctgtgtgttggagcgccaccgctcctatccacatctctgatggcggaggccctctggacaccaagagagtgtggaccgtccagaagagactggaacagatccacaaggccatgcatcccgagctgcaatatcaccctctggctctgcccaaagtgcgggacgatctgtctctggacgcccggacattcgacatcctgaacaccaccttccggctgctccagatgagcaacttcagcctggctcaggactgctggctgtgtctgaagctgggcacacctacacctctggctatccccacacctagcctgacatacagcctggccgatagcctggctaatgccagctgccagatcatccctccactgctggttcagcccatgcagttcagcaacagcagctgcctgagcagccccttcatcaacgacaccgagcagattgacctgggagccgtgaccttcaccaactgcacctctgtggctaacgtgtcctctcctctgtgcgccctgaatggcagcgtgttcctgtgcggcaacaacatggcctacacctacctgcctcagaactggaccggactgtgcgtgcaggcttctctgctgcctgacatcgacatcatccctggcgacgagcccgtgcctattcctgccatcgaccactacatccaccggcctaaaagagccgtgcagttcatccctctgctggccggactgggaatcaccgccgcttttacaacaggcgctacaggactgggcgtgtccgtgacacagtacaccaagctgagccaccagctgatctccgacgtgcaggttctgagcggcaccattcaggacctccaggatcaggtggactctctggctgaagtggccctccagaaccgcagaggactggatctgctgacagccgagcaaggcggaatctgtctggccctgcaagagaagtgctgcttttacgccaacaagagcggcatcgtgcggaacaagatcaggacactgcaagaggaactgcaaaagcggagagagagcctggcctccaatcctctgtggacaggactgcaaggcttcctgccttacctgctgccactgcttggacctctgctgaccctgctgctgatcctgacaatcggcccttgcgtgttcagcagactgatggcctttatcaacgatcggctgaatgtggtgcacgctatgtaa

SEQ ID NO: 254 - DNA, 1497 bp, synthetic construct
  source 1..1497: mol_type = other DNA
atggagacagacacactcctgctatgggtactgctgctctgggttccaggttccactggtgacgctttcgaaggatctacgcgtgctcctcctccttgctgctgtaccacaagcagcagcccctaccaagagttcctgtggcggacaagactgcccggcaacattgacgcccctagctacagaagcctgagcaagggcaacagcaccttcacagcccacacacacatgccccggaactgctacaatagcgccacactgtgtatgcacgccaacacacactactggaccggcaagatgattaaccctagctgccctggcggactgggagccacagtgtgttggacctacttcacccacaccagcatgtccgatggcggcggaatccaaggacaggccagagaaaagcaagtgaaagaggccatcagccagctgaccagaggccactctaccccatctccatacaaaggactggtgctgagcaagctgcacgaaaccctgcggacccacacaagactggtgtccctgttcaacaccacactgaccagactgcacgaagtgtccgctcagaaccccaccaactgctggatgtgtctgcccctgcacttcagaccctacatcagcatccctgtgcctgagcagtggaacaacttcagcaccgagatcaataccacctccgtgcttgtgggacccctggtgtccaacctggaaatcacacacacctccaacctgacctgcgtgaagttcagcaacaccatcgacaccaccagcagccagtgcatcagatgggtcacccctccaaccagaatcgtgtgcctgcctagcggcatcttcttcgtgtgtggcacaagcgcctaccactgcctgaatggcagcagcgagtctatgtgcttcctgagcttcctggtgcctcctatgaccatctacaccgagcaggacctgtacaatcacgtggtgcccaagcctcacaacaagcgggtgcccatcctgcctttcgtgattagagctggcgtgctgggcagactcggaacaggcatcggcagcatcacaaccagcacacagttctactacaagctgagccaagagatcaacggcgacatggaacaagtgaccgacagcctggtcacactccaggaccagctgaatagtctggccgccgtggtgctccagaatcggagagcactggatctgctgaccgccaagagaggcggcacctgtctgtttctgggcgaagaacggtgctactacgtgaaccagagccggatcgtgaccgagaaagtcaaagagatccgggacagaatccagtgcagagccgaggaactccagaacaccgagagatggggactgctgagccagtggatgccttggacactgccctttctgggacctctggccgctatcatcttcctgctgctgttcggcccctgtatcttcaacttcctggtcaagttcgtgtccagcagaatcgaggccgtgaagctccagatcgtgctgcaataa

SEQ ID NO: 255 - DNA, 1515 bp, synthetic construct
  source 1..1515: mol_type = other DNA
atggagacagacacactcctgctatgggtactgctgctctgggttccaggttccactggtgacgctttcgaaggatctacgcgtgctcctcctccttgctgctgtaccacaagcagcagcccctaccaagagttcctgtggcggacaagactgcccggcaacattgacgcccctagctacagaagcctgagcaagggcaacagcaccttcacagcccacacacacatgccccggaactgctacaatagcgccacactgtgtatgcacgccaacacacactactggaccggcaagatgattaaccctagctgccctggcggactgggagccacagtgtgttggacctacttcacccacaccagcatgtccgatggcggcggaatccaaggacaggccagagaaaagcaagtgaaagaggccatcagccagctgaccagaggccactctaccccatctccatacaaaggactggtgctgagcaagctgcacgaaaccctgcggacccacacaagactggtgtccctgttcaacaccacactgaccagactgcacgaagtgtccgctcagaaccccaccaactgctggatgtgtctgcccctgcacttcagaccctacatcagcatccctgtgcctgagcagtggaacaacttcagcaccgagatcaataccacctccgtgcttgtgggacccctggtgtccaacctggaaatcacacacacctccaacctgacctgcgtgaagttcagcaacaccatcgacaccaccagcagccagtgcatcagatgggtcacccctccaaccagaatcgtgtgcctgcctagcggcatcttcttcgtgtgtggcacaagcgcctaccactgcctgaatggcagcagcgagtctatgtgcttcctgagcttcctggtgcctcctatgaccatctacaccgagcaggacctgtacaatcacgtggtgcccaagcctcacaacaagcgggtgcccatcctgcctttcgtgattagagctggcgtgctgggcagactcggaacaggcatcggcagcatcacaaccagcacacagttctactacaagctgagccaagagatcaacggcgacatggaacaagtgaccgacagcctggtcacactccaggaccagctgaatagtctggccgccgtggtgctccagaatcggagagcactggatctgctgaccgccaagagaggcggcacctgtctgtttctgggcgaagaacggtgctactacgtgaaccagagccggatcgtgaccgagaaagtcaaagagatccgggacagaatccagtgcagagccgaggaactccagaacaccgagagatggggactgctgagccagtggatgccttggacactgccctttctgggacctctggccgctatcatcttcctgctgctgttcggcccctgtatcttcaacttcctggtcaagttcgtgtccagcagaatcgaggccgtgaagctccagatcgtgctgcaaatggaaccccagatgcagtaa

SEQ ID NO: 256 - DNA, 1569 bp, synthetic construct
  source 1..1569: mol_type = other DNA
atggagacagacacactcctgctatgggtactgctgctctgggttccaggttccactggtgacgctttcgaaggatctacgcgtgctcctcctccttgctgctgtaccacaagcagcagcccctaccaagagttcctgtggcggacaagactgcccggcaacattgacgcccctagctacagaagcctgagcaagggcaacagcaccttcacagcccacacacacatgccccggaactgctacaatagcgccacactgtgtatgcacgccaacacacactactggaccggcaagatgattaaccctagctgccctggcggactgggagccacagtgtgttggacctacttcacccacaccagcatgtccgatggcggcggaatccaaggacaggccagagaaaagcaagtgaaagaggccatcagccagctgaccagaggccactctaccccatctccatacaaaggactggtgctgagcaagctgcacgaaaccctgcggacccacacaagactggtgtccctgttcaacaccacactgaccagactgcacgaagtgtccgctcagaaccccaccaactgctggatgtgtctgcccctgcacttcagaccctacatcagcatccctgtgcctgagcagtggaacaacttcagcaccgagatcaataccacctccgtgcttgtgggacccctggtgtccaacctggaaatcacacacacctccaacctgacctgcgtgaagttcagcaacaccatcgacaccaccagcagccagtgcatcagatgggtcacccctccaaccagaatcgtgtgcctgcctagcggcatcttcttcgtgtgtggcacaagcgcctaccactgcctgaatggcagcagcgagtctatgtgcttcctgagcttcctggtgcctcctatgaccatctacaccgagcaggacctgtacaatcacgtggtgcccaagcctcacaacaagcgggtgcccatcctgcctttcgtgattagagctggcgtgctgggcagactcggaacaggcatcggcagcatcacaaccagcacacagttctactacaagctgagccaagagatcaacggcgacatggaacaagtgaccgacagcctggtcacactccaggaccagctgaatagtctggccgccgtggtgctccagaatcggagagcactggatctgctgaccgccaagagaggcggcacctgtctgtttctgggcgaagaacggtgctactacgtgaaccagagccggatcgtgaccgagaaagtcaaagagatccgggacagaatccagtgcagagccgaggaactccagaacaccgagagatggggactgctgagccagtggatgccttggacactgccctttctgggacctctggccgctatcatcttcctgctgctgttcggcccctgtatcttcaacttcctggtcaagttcgtgtccagcagaatcgaggccgtgaagctccagatcgtgctgcaaatggaaccccagatgcagagcatgaccaaaatctacagaggccctctggacagacccgccagactgtgctcttaa

SEQ ID NO: 257 - DNA, 1593 bp, synthetic construct
  source 1..1593: mol_type = other DNA
atggagacagacacactcctgctatgggtactgctgctctgggttccaggttccactggtgacgctttcgaaggatctacgcgtgctcctcctccttgctgctgtaccacaagcagcagcccctaccaagagttcctgtggcggacaagactgcccggcaacattgacgcccctagctacagaagcctgagcaagggcaacagcaccttcacagcccacacacacatgccccggaactgctacaatagcgccacactgtgtatgcacgccaacacacactactggaccggcaagatgattaaccctagctgccctggcggactgggagccacagtgtgttggacctacttcacccacaccagcatgtccgatggcggcggaatccaaggacaggccagagaaaagcaagtgaaagaggccatcagccagctgaccagaggccactctaccccatctccatacaaaggactggtgctgagcaagctgcacgaaaccctgcggacccacacaagactggtgtccctgttcaacaccacactgaccagactgcacgaagtgtccgctcagaaccccaccaactgctggatgtgtctgcccctgcacttcagaccctacatcagcatccctgtgcctgagcagtggaacaacttcagcaccgagatcaataccacctccgtgcttgtgggacccctggtgtccaacctggaaatcacacacacctccaacctgacctgcgtgaagttcagcaacaccatcgacaccaccagcagccagtgcatcagatgggtcacccctccaaccagaatcgtgtgcctgcctagcggcatcttcttcgtgtgtggcacaagcgcctaccactgcctgaatggcagcagcgagtctatgtgcttcctgagcttcctggtgcctcctatgaccatctacaccgagcaggacctgtacaatcacgtggtgcccaagcctcacaacaagcgggtgcccatcctgcctttcgtgattagagctggcgtgctgggcagactcggaacaggcatcggcagcatcacaaccagcacacagttctactacaagctgagccaagagatcaacggcgacatggaacaagtgaccgacagcctggtcacactccaggaccagctgaatagtctggccgccgtggtgctccagaatcggagagcactggatctgctgaccgccaagagaggcggcacctgtctgtttctgggcgaagaacggtgctactacgtgaaccagagccggatcgtgaccgagaaagtcaaagagatccgggacagaatccagtgcagagccgaggaactccagaacaccgagagatggggactgctgagccagtggatgccttggacactgccctttctgggacctctggccgctatcatcttcctgctgctgttcggcccctgtatcttcaacttcctggtcaagttcgtgtccagcagaatcgaggccgtgaagctccagatcgtgctgcaaatggaaccccagatgcagagcatgaccaaaatctacagaggccctctggacagacccgccagactgtgctctgacgtgaacgacatcgaagtgacctaa

SEQ ID NO: 258 - DNA, 1629 bp, synthetic construct
  source 1..1629: mol_type = other DNA
atggagacagacacactcctgctatgggtactgctgctctgggttccaggttccactggtgacgctttcgaaggatctacgcgtgctcctcctccttgctgctgtaccacaagcagcagcccctaccaagagttcctgtggcggacaagactgcccggcaacattgacgcccctagctacagaagcctgagcaagggcaacagcaccttcacagcccacacacacatgccccggaactgctacaatagcgccacactgtgtatgcacgccaacacacactactggaccggcaagatgattaaccctagctgccctggcggactgggagccacagtgtgttggacctacttcacccacaccagcatgtccgatggcggcggaatccaaggacaggccagagaaaagcaagtgaaagaggccatcagccagctgaccagaggccactctaccccatctccatacaaaggactggtgctgagcaagctgcacgaaaccctgcggacccacacaagactggtgtccctgttcaacaccacactgaccagactgcacgaagtgtccgctcagaaccccaccaactgctggatgtgtctgcccctgcacttcagaccctacatcagcatccctgtgcctgagcagtggaacaacttcagcaccgagatcaataccacctccgtgcttgtgggacccctggtgtccaacctggaaatcacacacacctccaacctgacctgcgtgaagttcagcaacaccatcgacaccaccagcagccagtgcatcagatgggtcacccctccaaccagaatcgtgtgcctgcctagcggcatcttcttcgtgtgtggcacaagcgcctaccactgcctgaatggcagcagcgagtctatgtgcttcctgagcttcctggtgcctcctatgaccatctacaccgagcaggacctgtacaatcacgtggtgcccaagcctcacaacaagcgggtgcccatcctgcctttcgtgattagagctggcgtgctgggcagactcggaacaggcatcggcagcatcacaaccagcacacagttctactacaagctgagccaagagatcaacggcgacatggaacaagtgaccgacagcctggtcacactccaggaccagctgaatagtctggccgccgtggtgctccagaatcggagagcactggatctgctgaccgccaagagaggcggcacctgtctgtttctgggcgaagaacggtgctactacgtgaaccagagccggatcgtgaccgagaaagtcaaagagatccgggacagaatccagtgcagagccgaggaactccagaacaccgagagatggggactgctgagccagtggatgccttggacactgccctttctgggacctctggccgctatcatcttcctgctgctgttcggcccctgtatcttcaacttcctggtcaagttcgtgtccagcagaatcgaggccgtgaagctccagatcgtgctgcaaatggaaccccagatgcagagcatgaccaaaatctacagaggccctctggacagacccgccagactgtgctctgacgtgaacgacatcgaagtgacccctccagaggaaatcagcacagcccagcctctgctgtaa

SEQ ID NO: 259 - DNA, 1977 bp, synthetic construct
  source 1..1977: mol_type = other DNA
atgggacaagaattaagccaacatcagatctatgtaggacaattaaaagaggctttaaagatacgaggagtaaaggttaaaggtaatgatttgtttaaattttttgattttgtaaaagacacttgcccttggttcccacaggaaggaactattgatattaaaagatggcgtagagtaggggattgtcttcaggactattataatacttttgggccagaaaaaattcctgtgactgccttctcttattggaacctcattagagatttaatagataagaaggaggccgatccgcaagtcatggctgcggtcgctcagacagagcatattttaaaggttagctcccgctctaaccttacaaagcctccgcaagatacggaggaggatctcatttccctcgaaagtgatcatgaggaaatcaagtctccttctgtaacagataaagaaatgccacacgaaaacaaaccaaaaaaatacccaattttacagatgcttcaaaaagaggaggaaattaataagcctaatcaatcagacataaattgggatgatttagaggaagaggcggctaaatatcacaaccctgatttgcctccccttacttcatacccgcccccatataataagacacataatgaggcttctgcgcccattgttatggcagcaatagatcccaaagaagaattaaaacaaaaaattgctcaactagaggaacaaattaaacttgaagagttacatcaatcattgataattaggctccaaaagctaaagacaggaaatgaaaaaatacccaactcagacgctatggagggttccttgcgcccacctcagcggcctggacaacatgttccaaaaggggggttagttgctagccgacatagagaagactcctcccccaaagacgtttttccggtcactgaaaccatagatgaacggggacaggcttggaggcatcatactggatttgactttactattataaaagagttaaagactgctgcctctcagtatggggctactgctccatatactcttgctatagtggaatctgtagctgagaattggctcactcctacagactggaataccttagttagggcagtcctttctgggggagaccatttaatttggaagtcagagttctttgaaaattgtagagacacggctaaaagaaatcaacaggcaggaaacggttgggattttgatatgttaactggtttaggtaattatgcagacactcaggcccaaatgcaatatgatcctggattgttctcgcaaatccaggctgccgctacaaaagcctggagaaaacttcccgttaaaggagatccaggggcctcgctcacagcggttaaacaaggacctgatgagccattttcagactttgtgcatagacttatgaccacggcaggtagaatctttggaaatgcagaaacgggtgtagattatgttaaacagttagcttatgaaaacgctaaccccgcctgccaagcggcaatcagaccttatcgaaagaaaacagatttaacaggatacattcgcctttgttcagatattgggccctcatatcaacaaggcctagcaatggccgccgcttttagcggccaaacagtaagagacttcctcattaacaaaggtagagataaagggggatgttttagatgcggtaaaaggggacactttgcaaaagattgccatgaaaaccaaaataaaaatccagaagcaaaaattccaggcctttgcccaaggtgtaaaagaggaaggcactgggcaaacgaatgtaaatctaaaactgacagtcaaggaaatcctttatcccctaggcagggaaacgggatgaggggccagcctcaggccccgaaacaagcatatggggcagtcagctttgttccagccagcaacagcaatccatttcaaaacttagtagagcaaccccaggaagtgcagggctggacctcagttccacctcccacacagtactaa

SEQ ID NO: 260 - DNA, 1710 bp, synthetic construct
  source 1..1710: mol_type = other DNA
atgcgctttttgtggcggatcatcgctctttacaatatagttacggtatatgcgggatttggcgacccgcgaaaggcacgaggtctgctccgcaagcaatacgggcaaccctgtgactgtcgagggggccaaataagcgaacctccctcagatagaatcacacaggtaacgtgttccggcaaaacagcctatctcatgcccgatcaaagttggaaatgtaagagtacacctagagacacctcaccaaatggaccattgcttgagtgcccgtgctcttcctttcagtcttctgtgcattcaagttgctataccagctatcagcaatgtaaatcagggaataagacttactatacggccacgctgttgaagacgcaaacagggagtacgaacgatgtgcaagttctgggaacgactaacaaactggtgcaatccagctgcaatggccagaaggggaaacccgtttgttggagtactacagcgcctattcatatcagcgatggcggcggtcctctggacattgctcggataaaaaccgtacagaagaagttggaaaaaatccacaaagccctttaccctgagctccaatatcacccgctcgcactcccggagataagggacaactttagattggatgcgcaaacgttcgacatactcaacgcgacttacaatctgcttcaaatgagcaatacttctcttgcacacgactgctggttgtgcctcaagatggggcctcccataccactcgccattcccaactttctccttagttatgtcaactattccaatgaatctctggtaaacaacccatgccccatcatatcaccgctgttgattcaacccatgactttctccaattctttctgcctcttctctccatcttattcctccactaaggagatcgatctcggttacgtcgtgttcgataattgtacatccattatccatgcaactgatccgttgtgtgcggtgaacgggtctgttttcgtttgtgggaacaacatggcttatacgtaccttcctacaaactggactggtctgtgcgtcctggcaactcttctcccggatatagacattattcccggggacgagcccatcccgatcccggcaatagaacattttatttaccggcctaaacgggctatccagtttataccgttgctggccggccttgggattactacggcgttcacgacaggagcgacgggattgggagtaagtctcacgcaatatacaaaacttagcaatcagctgatttccgatgtacaaacgctttcctctacgatacaggatttgcaggaccaagttgattcattggccgaagtcgtgttgcagaaccgacggggactggatctgctcacggcagagcaaggagggatctgcctggctctccaagagaagtgctgcttttatgcaaataagtccggaattgtccgcgacaagatcaagacgttgcaagaggagttggaaaaacggcgaaaagggcttgcggcaaatccactctggaccggtctggacgggctgttgccttacctcttgccttttctcgggccacttcttacccttcttttgtttctcacgctggggcctattatattgaacaagctgatggcatttgttaggaagcaaatcgaggcctttcaagccaagcctatccaagtacattaccatcaccttgaaatgacagaaaacggcgagagttatctcccacag

SEQ ID NO: 261 - DNA, 1674 bp, synthetic construct
  source 1..1674: mol_type = other DNA
atgcgctttttgtggcggatcatcgctctttacaatatagttacggtatatgcgggatttggcgacccgcgaaaggcacgaggtctgctccgcaagcaatacgggcaaccctgtgactgtcgagggggccaaataagcgaacctccctcagatagaatcacacaggtaacgtgttccggcaaaacagcctatctcatgcccgatcaaagttggaaatgtaagagtacacctagagacacctcaccaaatggaccattgcttgagtgcccgtgctcttcctttcagtcttctgtgcattcaagttgctataccagctatcagcaatgtaaatcagggaataagacttactatacggccacgctgttgaagacgcaaacagggagtacgaacgatgtgcaagttctgggaacgactaacaaactggtgcaatccagctgcaatggccagaaggggaaacccgtttgttggagtactacagcgcctattcatatcagcgatggcggcggtcctctggacattgctcggataaaaaccgtacagaagaagttggaaaaaatccacaaagccctttaccctgagctccaatatcacccgctcgcactcccggagataagggacaactttagattggatgcgcaaacgttcgacatactcaacgcgacttacaatctgcttcaaatgagcaatacttctcttgcacacgactgctggttgtgcctcaagatggggcctcccataccactcgccattcccaactttctccttagttatgtcaactattccaatgaatctctggtaaacaacccatgccccatcatatcaccgctgttgattcaacccatgactttctccaattctttctgcctcttctctccatcttattcctccactaaggagatcgatctcggttacgtcgtgttcgataattgtacatccattatccatgcaactgatccgttgtgtgcggtgaacgggtctgttttcgtttgtgggaacaacatggcttatacgtaccttcctacaaactggactggtctgtgcgtcctggcaactcttctcccggatatagacattattcccggggacgagcccatcccgatcccggcaatagaacattttatttaccggcctaaacgggctatccagtttataccgttgctggccggccttgggattactacggcgttcacgacaggagcgacgggattgggagtaagtctcacgcaatatacaaaacttagcaatcagctgatttccgatgtacaaacgctttcctctacgatacaggatttgcaggaccaagttgattcattggccgaagtcgtgttgcagaaccgacggggactggatctgctcacggcagagcaaggagggatctgcctggctctccaagagaagtgctgcttttatgcaaataagtccggaattgtccgcgacaagatcaagacgttgcaagaggagttggaaaaacggcgaaaagggcttgcggcaaatccactctggaccggtctggacgggctgttgccttacctcttgccttttctcgggccacttcttacccttcttttgtttctcacgctggggcctattatattgaacaagctgatggcatttgttaggaagcaaatcgaggcctttcaagccaagcctatccaagtacattaccatcacctt

SEQ ID NO: 262 - DNA, 1671 bp, synthetic construct
  source 1..1671: mol_type = other DNA
atgcgctttttgtggcggatcatcgctctttacaatatagttacggtatatgcgggatttggcgacccgcgaaaggcacgaggtctgctccgcaagcaatacgggcaaccctgtgactgtcgagggggccaaataagcgaacctccctcagatagaatcacacaggtaacgtgttccggcaaaacagcctatctcatgcccgatcaaagttggaaatgtaagagtacacctagagacacctcaccaaatggaccattgcttgagtgcccgtgctcttcctttcagtcttctgtgcattcaagttgctataccagctatcagcaatgtaaatcagggaataagacttactatacggccacgctgttgaagacgcaaacagggagtacgaacgatgtgcaagttctgggaacgactaacaaactggtgcaatccagctgcaatggccagaaggggaaacccgtttgttggagtactacagcgcctattcatatcagcgatggcggcggtcctctggacattgctcggataaaaaccgtacagaagaagttggaaaaaatccacaaagccctttaccctgagctccaatatcacccgctcgcactcccggagataagggacaactttagattggatgcgcaaacgttcgacatactcaacgcgacttacaatctgcttcaaatgagcaatacttctcttgcacacgactgctggttgtgcctcaagatggggcctcccataccactcgccattcccaactttctccttagttatgtcaactattccaatgaatctctggtaaacaacccatgccccatcatatcaccgctgttgattcaacccatgactttctccaattctttctgcctcttctctccatcttattcctccactaaggagatcgatctcggttacgtcgtgttcgataattgtacatccattatccatgcaactgatccgttgtgtgcggtgaacgggtctgttttcgtttgtgggaacaacatggcttatacgtaccttcctacaaactggactggtctgtgcgtcctggcaactcttctcccggatatagacattattcccggggacgagcccatcccgatcccggcaatagaacattttatttaccggcctaaacgggctatccagtttataccgttgctggccggccttgggattactacggcgttcacgacaggagcgacgggattgggagtaagtctcacgcaatatacaaaacttagcaatcagctgatttccgatgtacaaacgctttcctctacgatacaggatttgcaggaccaagttgattcattggccgaagtcgtgttgcagaaccgacggggactggatctgctcacggcagagcaaggagggatctgcctggctctccaagagaagtgctgcttttatgcaaataagtccggaattgtccgcgacaagatcaagacgttgcaagaggagttggaaaaacggcgaaaagggcttgcggcaaatccactctggaccggtctggacgggctgttgccttacctcttgccttttctcgggccacttcttacccttcttttgtttctcacgctggggcctattatattgaacaagctgatggcatttgttaggaagcaaatcgaggcctttcaagccaagcctatccaagtacattaccatcac

SEQ ID NO: 263 - DNA, 1686 bp, synthetic construct
  source 1..1686: mol_type = other DNA
atgggctttacgaccaagatcatcttcctgtacaacctggtgctggtgtacgccggcttcgacgatcctagaaaggccatcgagctggtgcagaagagatacggcagaccctgcgattgctctggcggccaagtttctgagcctcctagcgacagagtgtcccaagtgacctgtagcggcaagaccgcctacctgatgcctgaccagagatggaagtgcaagagcatccccaaggacacaagccctagcggccctctgcaagagtgcccctgtaatagctaccagagcagcgtgcacagctcctgctacacaagctaccagcagtgcagaagcggcaacaagacctactacaccgccacactgctgaaaacccagaccggcggcacatccgatgttcaggtgctgggcagcaccaacaagctgattcagagcccctgcaacggcatcaagggccagagcatctgctggtccacaacagcccctatccacgtgtcagatggcggcggacctctggacaccaccagaatcaagagcgtgcagcggaagctggaagagatccacaaggctctgtaccccgaactccagtatcaccctctggctatccccaaagtgcgggacaacctgatggtggacgcccagacactgaatatcctgaacgccacctacaatctgctgctgatgagcaacaccagcctggtggacgattgctggctgtgcctgaaactgggacctcctacacctctggcaattcccaacttcctgctgagctacgtgaccagaagcagcgacaacatcagctgcctgattatcccacctctgctcgtgcagcccatgcagttcagcaactcctcctgcctgttcagccccagctacaacagcaccgaggaaatcgacctgggacacgtggccttctccaactgcacctccatcaccaacgtgacaggccctatctgcgccgtgaatggcagcgtgttcctgtgtggcaacaacatggcctacacctacctgcctaccaactggaccggactgtgcgtgctggctacactgctgcctgacatcgacatcatccctggcgacgagcccgtgcctattcctgccatcgaccacttcatctacagacccaagcgggctatccagttcatcccactgctggccggactgggaatcaccgccgcttttacaacaggcgctacaggactgggcgtgtccgtgacacagtacaccaagctgagcaaccagctgatctccgacgtgcagatcctgagcagcaccatccaggacctccaggatcaggtggactctctggccgaagtggtgctccagaacagaagaggactggacctgctgacagccgagcaaggcggaatttgtctggccctgcaagagaagtgctgcttctacgtgaacaagagcggcatcgtgcgcgacaagatcaagacactgcaagaggaactggaacggcggagaaaggacctggcctccaatcctctgtggaccggcctgcaaggactgctcccttacctgctgcctttcctgggaccactgctgactctgctgctcctgctgaccatcggaccctgcatcttcaacagactggtccagttcgttaaggatagaatatctgtcgtccaagcacttgtcctgacgcagcagtaccatcaattgaagccgttggagtacgagcca

SEQ ID NO: 264 - DNA, 1686 bp, synthetic construct; identical to SEQ ID NO: 263
  source 1..1686: mol_type = other DNA

SEQ ID NO: 265 - DNA, 1680 bp, synthetic construct
  source 1..1680: mol_type = other DNA
atgggctttacgaccaagatcatcttcctgtacaacctggtgctggtgtacgccggcttcgacgatcctagaaaggccatcgagctggtgcagaagagatacggcagaccctgcgattgctctggcggccaagtttctgagcctcctagcgacagagtgtcccaagtgacctgtagcggcaagaccgcctacctgatgcctgaccagagatggaagtgcaagagcatccccaaggacacaagccctagcggccctctgcaagagtgcccctgtaatagctaccagagcagcgtgcacagctcctgctacacaagctaccagcagtgcagaagcggcaacaagacctactacaccgccacactgctgaaaacccagaccggcggcacatccgatgttcaggtgctgggcagcaccaacaagctgattcagagcccctgcaacggcatcaagggccagagcatctgctggtccacaacagcccctatccacgtgtcagatggcggcggacctctggacaccaccagaatcaagagcgtgcagcggaagctggaagagatccacaaggctctgtaccccgaactccagtatcaccctctggctatccccaaagtgcgggacaacctgatggtggacgcccagacactgaatatcctgaacgccacctacaatctgctgctgatgagcaacaccagcctggtggacgattgctggctgtgcctgaaactgggacctcctacacctctggcaattcccaacttcctgctgagctacgtgaccagaagcagcgacaacatcagctgcctgattatcccacctctgctcgtgcagcccatgcagttcagcaactcctcctgcctgttcagccccagctacaacagcaccgaggaaatcgacctgggacacgtggccttctccaactgcacctccatcaccaacgtgacaggccctatctgcgccgtgaatggcagcgtgttcctgtgtggcaacaacatggcctacacctacctgcctaccaactggaccggactgtgcgtgctggctacactgctgcctgacatcgacatcatccctggcgacgagcccgtgcctattcctgccatcgaccacttcatctacagacccaagcgggctatccagttcatcccactgctggccggactgggaatcaccgccgcttttacaacaggcgctacaggactgggcgtgtccgtgacacagtacaccaagctgagcaaccagctgatctccgacgtgcagatcctgagcagcaccatccaggacctccaggatcaggtggactctctggccgaagtggtgctccagaacagaagaggactggacctgctgacagccgagcaaggcggaatttgtctggccctgcaagagaagtgctgcttctacgtgaacaagagcggcatcgtgcgcgacaagatcaagacactgcaagaggaactggaacggcggagaaaggacctggcctccaatcctctgtggaccggcctgcaaggactgctcccttacctgctgcctttcctgggaccactgctgactctgctgctcctgctgaccatcggaccctgcatcttcaacagactggtccagttcgttaaggatagaatatctgtcgtccaagcacttgtcctgacgcagcagtaccatcaattgaagccgttggagtac

SEQ ID NO: 266 - DNA, 1677 bp, synthetic construct
  source 1..1677: mol_type = other DNA
atgggctttacgaccaagatcatcttcctgtacaacctggtgctggtgtacgccggcttcgacgatcctagaaaggccatcgagctggtgcagaagagatacggcagaccctgcgattgctctggcggccaagtttctgagcctcctagcgacagagtgtcccaagtgacctgtagcggcaagaccgcctacctgatgcctgaccagagatggaagtgcaagagcatccccaaggacacaagccctagcggccctctgcaagagtgcccctgtaatagctaccagagcagcgtgcacagctcctgctacacaagctaccagcagtgcagaagcggcaacaagacctactacaccgccacactgctgaaaacccagaccggcggcacatccgatgttcaggtgctgggcagcaccaacaagctgattcagagcccctgcaacggcatcaagggccagagcatctgctggtccacaacagcccctatccacgtgtcagatggcggcggacctctggacaccaccagaatcaagagcgtgcagcggaagctggaagagatccacaaggctctgtaccccgaactccagtatcaccctctggctatccccaaagtgcgggacaacctgatggtggacgcccagacactgaatatcctgaacgccacctacaatctgctgctgatgagcaacaccagcctggtggacgattgctggctgtgcctgaaactgggacctcctacacctctggcaattcccaacttcctgctgagctacgtgaccagaagcagcgacaacatcagctgcctgattatcccacctctgctcgtgcagcccatgcagttcagcaactcctcctgcctgttcagccccagctacaacagcaccgaggaaatcgacctgggacacgtggccttctccaactgcacctccatcaccaacgtgacaggccctatctgcgccgtgaatggcagcgtgttcctgtgtggcaacaacatggcctacacctacctgcctaccaactggaccggactgtgcgtgctggctacactgctgcctgacatcgacatcatccctggcgacgagcccgtgcctattcctgccatcgaccacttcatctacagacccaagcgggctatccagttcatcccactgctggccggactgggaatcaccgccgcttttacaacaggcgctacaggactgggcgtgtccgtgacacagtacaccaagctgagcaaccagctgatctccgacgtgcagatcctgagcagcaccatccaggacctccaggatcaggtggactctctggccgaagtggtgctccagaacagaagaggactggacctgctgacagccgagcaaggcggaatttgtctggccctgcaagagaagtgctgcttctacgtgaacaagagcggcatcgtgcgcgacaagatcaagacactgcaagaggaactggaacggcggagaaaggacctggcctccaatcctctgtggaccggcctgcaaggactgctcccttacctgctgcctttcctgggaccactgctgactctgctgctcctgctgaccatcggaccctgcatcttcaacagactggtccagttcgttaaggatagaatatctgtcgtccaagcacttgtcctgacgcagcagtaccatcaattgaagccgttggag

SEQ ID NO: 267 - DNA, 1674 bp, synthetic construct
  source 1..1674: mol_type = other DNA
atgggctttacgaccaagatcatcttcctgtacaacctggtgctggtgtacgccggcttcgacgatcctagaaaggccatcgagctggtgcagaagagatacggcagaccctgcgattgctctggcggccaagtttctgagcctcctagcgacagagtgtcccaagtgacctgtagcggcaagaccgcctacctgatgcctgaccagagatggaagtgcaagagcatccccaaggacacaagccctagcggccctctgcaagagtgcccctgtaatagctaccagagcagcgtgcacagctcctgctacacaagctaccagcagtgcagaagcggcaacaagacctactacaccgccacactgctgaaaacccagaccggcggcacatccgatgttcaggtgctgggcagcaccaacaagctgattcagagcccctgcaacggcatcaagggccagagcatctgctggtccacaacagcccctatccacgtgtcagatggcggcggacctctggacaccaccagaatcaagagcgtgcagcggaagctggaagagatccacaaggctctgtaccccgaactccagtatcaccctctggctatccccaaagtgcgggacaacctgatggtggacgcccagacactgaatatcctgaacgccacctacaatctgctgctgatgagcaacaccagcctggtggacgattgctggctgtgcctgaaactgggacctcctacacctctggcaattcccaacttcctgctgagctacgtgaccagaagcagcgacaacatcagctgcctgattatcccacctctgctcgtgcagcccatgcagttcagcaactcctcctgcctgttcagccccagctacaacagcaccgaggaaatcgacctgggacacgtggccttctccaactgcacctccatcaccaacgtgacaggccctatctgcgccgtgaatggcagcgtgttcctgtgtggcaacaacatggcctacacctacctgcctaccaactggaccggactgtgcgtgctggctacactgctgcctgacatcgacatcatccctggcgacgagcccgtgcctattcctgccatcgaccacttcatctacagacccaagcgggctatccagttcatcccactgctggccggactgggaatcaccgccgcttttacaacaggcgctacaggactgggcgtgtccgtgacacagtacaccaagctgagcaaccagctgatctccgacgtgcagatcctgagcagcaccatccaggacctccaggatcaggtggactctctggccgaagtggtgctccagaacagaagaggactggacctgctgacagccgagcaaggcggaatttgtctggccctgcaagagaagtgctgcttctacgtgaacaagagcggcatcgtgcgcgacaagatcaagacactgcaagaggaactggaacggcggagaaaggacctggcctccaatcctctgtggaccggcctgcaaggactgctcccttacctgctgcctttcctgggaccactgctgactctgctgctcctgctgaccatcggaccctgcatcttcaacagactggtccagttcgttaaggatagaatatctgtcgtccaagcacttgtcctgacgcagcagtaccatcaattgaagccgttg

SEQ ID NO: 268 - DNA, 1671 bp, synthetic construct
  source 1..1671: mol_type = other DNA
atgggctttacgaccaagatcatcttcctgtacaacctggtgctggtgtacgccggcttcgacgatcctagaaaggccatcgagctggtgcagaagagatacggcagaccctgcgattgctctggcggccaagtttctgagcctcctagcgacagagtgtcccaagtgacctgtagcggcaagaccgcctacctgatgcctgaccagagatggaagtgcaagagcatccccaaggacacaagccctagcggccctctgcaagagtgcccctgtaatagctaccagagcagcgtgcacagctcctgctacacaagctaccagcagtgcagaagcggcaacaagacctactacaccgccacactgctgaaaacccagaccggcggcacatccgatgttcaggtgctgggcagcaccaacaagctgattcagagcccctgcaacggcatcaagggccagagcatctgctggtccacaacagcccctatccacgtgtcagatggcggcggacctctggacaccaccagaatcaagagcgtgcagcggaagctggaagagatccacaaggctctgtaccccgaactccagtatcaccctctggctatccccaaagtgcgggacaacctgatggtggacgcccagacactgaatatcctgaacgccacctacaatctgctgctgatgagcaacaccagcctggtggacgattgctggctgtgcctgaaactgggacctcctacacctctggcaattcccaacttcctgctgagctacgtgaccagaagcagcgacaacatcagctgcctgattatcccacctctgctcgtgcagcccatgcagttcagcaactcctcctgcctgttcagccccagctacaacagcaccgaggaaatcgacctgggacacgtggccttctccaactgcacctccatcaccaacgtgacaggccctatctgcgccgtgaatggcagcgtgttcctgtgtggcaacaacatggcctacacctacctgcctaccaactggaccggactgtgcgtgctggctacactgctgcctgacatcgacatcatccctggcgacgagcccgtgcctattcctgccatcgaccacttcatctacagacccaagcgggctatccagttcatcccactgctggccggactgggaatcaccgccgcttttacaacaggcgctacaggactgggcgtgtccgtgacacagtacaccaagctgagcaaccagctgatctccgacgtgcagatcctgagcagcaccatccaggacctccaggatcaggtggactctctggccgaagtggtgctccagaacagaagaggactggacctgctgacagccgagcaaggcggaatttgtctggccctgcaagagaagtgctgcttctacgtgaacaagagcggcatcgtgcgcgacaagatcaagacactgcaagaggaactggaacggcggagaaaggacctggcctccaatcctctgtggaccggcctgcaaggactgctcccttacctgctgcctttcctgggaccactgctgactctgctgctcctgctgaccatcggaccctgcatcttcaacagactggtccagttcgttaaggatagaatatctgtcgtccaagcacttgtcctgacgcagcagtaccatcaattgaagccg

SEQ ID NO: 269 - DNA, 1668 bp, synthetic construct
  source 1..1668: mol_type = other DNA
atgggctttacgaccaagatcatcttcctgtacaacctggtgctggtgtacgccggcttcgacgatcctagaaaggccatcgagctggtgcagaagagatacggcagaccctgcgattgctctggcggccaagtttctgagcctcctagcgacagagtgtcccaagtgacctgtagcggcaagaccgcctacctgatgcctgaccagagatggaagtgcaagagcatccccaaggacacaagccctagcggccctctgcaagagtgcccctgtaatagctaccagagcagcgtgcacagctcctgctacacaagctaccagcagtgcagaagcggcaacaagacctactacaccgccacactgctgaaaacccagaccggcggcacatccgatgttcaggtgctgggcagcaccaacaagctgattcagagcccctgcaacggcatcaagggccagagcatctgctggtccacaacagcccctatccacgtgtcagatggcggcggacctctggacaccaccagaatcaagagcgtgcagcggaagctggaagagatccacaaggctctgtaccccgaactccagtatcaccctctggctatccccaaagtgcgggacaacctgatggtggacgcccagacactgaatatcctgaacgccacctacaatctgctgctgatgagcaacaccagcctggtggacgattgctggctgtgcctgaaactgggacctcctacacctctggcaattcccaacttcctgctgagctacgtgaccagaagcagcgacaacatcagctgcctgattatcccacctctgctcgtgcagcccatgcagttcagcaactcctcctgcctgttcagccccagctacaacagcaccgaggaaatcgacctgggacacgtggccttctccaactgcacctccatcaccaacgtgacaggccctatctgcgccgtgaatggcagcgtgttcctgtgtggcaacaacatggcctacacctacctgcctaccaactggaccggactgtgcgtgctggctacactgctgcctgacatcgacatcatccctggcgacgagcccgtgcctattcctgccatcgaccacttcatctacagacccaagcgggctatccagttcatcccactgctggccggactgggaatcaccgccgcttttacaacaggcgctacaggactgggcgtgtccgtgacacagtacaccaagctgagcaaccagctgatctccgacgtgcagatcctgagcagcaccatccaggacctccaggatcaggtggactctctggccgaagtggtgctccagaacagaagaggactggacctgctgacagccgagcaaggcggaatttgtctggccctgcaagagaagtgctgcttctacgtgaacaagagcggcatcgtgcgcgacaagatcaagacactgcaagaggaactggaacggcggagaaaggacctggcctccaatcctctgtggaccggcctgcaaggactgctcccttacctgctgcctttcctgggaccactgctgactctgctgctcctgctgaccatcggaccctgcatcttcaacagactggtccagttcgttaaggatagaatatctgtcgtccaagcacttgtcctgacgcagcagtaccatcaattgaag

SEQ ID NO: 270 - DNA, 1665 bp, synthetic construct
  source 1..1665: mol_type = other DNA
atgggctttacgaccaagatcatcttcctgtacaacctggtgctggtgtacgccggcttcgacgatcctagaaaggccatcgagctggtgcagaagagatacggcagaccctgcgattgctctggcggccaagtttctgagcctcctagcgacagagtgtcccaagtgacctgtagcggcaagaccgcctacctgatgcctgaccagagatggaagtgcaagagcatccccaaggacacaagccctagcggccctctgcaagagtgcccctgtaatagctaccagagcagcgtgcacagctcctgctacacaagctaccagcagtgcagaagcggcaacaagacctactacaccgccacactgctgaaaacccagaccggcggcacatccgatgttcaggtgctgggcagcaccaacaagctgattcagagcccctgcaacggcatcaagggccagagcatctgctggtccacaacagcccctatccacgtgtcagatggcggcggacctctggacaccaccagaatcaagagcgtgcagcggaagctggaagagatccacaaggctctgtaccccgaactccagtatcaccctctggctatccccaaagtgcgggacaacctgatggtggacgcccagacactgaatatcctgaacgccacctacaatctgctgctgatgagcaacaccagcctggtggacgattgctggctgtgcctgaaactgggacctcctacacctctggcaattcccaacttcctgctgagctacgtgaccagaagcagcgacaacatcagctgcctgattatcccacctctgctcgtgcagcccatgcagttcagcaactcctcctgcctgttcagccccagctacaacagcaccgaggaaatcgacctgggacacgtggccttctccaactgcacctccatcaccaacgtgacaggccctatctgcgccgtgaatggcagcgtgttcctgtgtggcaacaacatggcctacacctacctgcctaccaactggaccggactgtgcgtgctggctacactgctgcctgacatcgacatcatccctggcgacgagcccgtgcctattcctgccatcgaccacttcatctacagacccaagcgggctatccagttcatcccactgctggccggactgggaatcaccgccgcttttacaacaggcgctacaggactgggcgtgtccgtgacacagtacaccaagctgagcaaccagctgatctccgacgtgcagatcctgagcagcaccatccaggacctccaggatcaggtggactctctggccgaagtggtgctccagaacagaagaggactggacctgctgacagccgagcaaggcggaatttgtctggccctgcaagagaagtgctgcttctacgtgaacaagagcggcatcgtgcgcgacaagatcaagacactgcaagaggaactggaacggcggagaaaggacctggcctccaatcctctgtggaccggcctgcaaggactgctcccttacctgctgcctttcctgggaccactgctgactctgctgctcctgctgaccatcggaccctgcatcttcaacagactggtccagttcgttaaggatagaatatctgtcgtccaagcacttgtcctgacgcagcagtaccatcaattg

SEQ ID NO: 271 - DNA, 1662 bp, synthetic construct
  source 1..1662: mol_type = other DNA
atgggctttacgaccaagatcatcttcctgtacaacctggtgctggtgtacgccggcttcgacgatcctagaaaggccatcgagctggtgcagaagagatacggcagaccctgcgattgctctggcggccaagtttctgagcctcctagcgacagagtgtcccaagtgacctgtagcggcaagaccgcctacctgatgcctgaccagagatggaagtgcaagagcatccccaaggacacaagccctagcggccctctgcaagagtgcccctgtaatagctaccagagcagcgtgcacagctcctgctacacaagctaccagcagtgcagaagcggcaacaagacctactacaccgccacactgctgaaaacccagaccggcggcacatccgatgttcaggtgctgggcagcaccaacaagctgattcagagcccctgcaacggcatcaagggccagagcatctgctggtccacaacagcccctatccacgtgtcagatggcggcggacctctggacaccaccagaatcaagagcgtgcagcggaagctggaagagatccacaaggctctgtaccccgaactccagtatcaccctctggctatccccaaagtgcgggacaacctgatggtggacgcccagacactgaatatcctgaacgccacctacaatctgctgctgatgagcaacaccagcctggtggacgattgctggctgtgcctgaaactgggacctcctacacctctggcaattcccaacttcctgctgagctacgtgaccagaagcagcgacaacatcagctgcctgattatcccacctctgctcgtgcagcccatgcagttcagcaactcctcctgcctgttcagccccagctacaacagcaccgaggaaatcgacctgggacacgtggccttctccaactgcacctccatcaccaacgtgacaggccctatctgcgccgtgaatggcagcgtgttcctgtgtggcaacaacatggcctacacctacctgcctaccaactggaccggactgtgcgtgctggctacactgctgcctgacatcgacatcatccctggcgacgagcccgtgcctattcctgccatcgaccacttcatctacagacccaagcgggctatccagttcatcccactgctggccggactgggaatcaccgccgcttttacaacaggcgctacaggactgggcgtgtccgtgacacagtacaccaagctgagcaaccagctgatctccgacgtgcagatcctgagcagcaccatccaggacctccaggatcaggtggactctctggccgaagtggtgctccagaacagaagaggactggacctgctgacagccgagcaaggcggaatttgtctggccctgcaagagaagtgctgcttctacgtgaacaagagcggcatcgtgcgcgacaagatcaagacactgcaagaggaactggaacggcggagaaaggacctggcctccaatcctctgtggaccggcctgcaaggactgctcccttacctgctgcctttcctgggaccactgctgactctgctgctcctgctgaccatcggaccctgcatcttcaacagactggtccagttcgttaaggatagaatatctgtcgtccaagcacttgtcctgacgcagcagtaccatcaa

SEQ ID NO: 272 - DNA, 1659 bp, synthetic construct
  source 1..1659: mol_type = other DNA
atgggctttacgaccaagatcatcttcctgtacaacctggtgctggtgtacgccggcttcgacgatcctagaaaggccatcgagctggtgcagaagagatacggcagaccctgcgattgctctggcggccaagtttctgagcctcctagcgacagagtgtcccaagtgacctgtagcggcaagaccgcctacctgatgcctgaccagagatggaagtgcaagagcatccccaaggacacaagccctagcggccctctgcaagagtgcccctgtaatagctaccagagcagcgtgcacagctcctgctacacaagctaccagcagtgcagaagcggcaacaagacctactacaccgccacactgctgaaaacccagaccggcggcacatccgatgttcaggtgctgggcagcaccaacaagctgattcagagcccctgcaacggcatcaagggccagagcatctgctggtccacaacagcccctatccacgtgtcagatggcggcggacctctggacaccaccagaatcaagagcgtgcagcggaagctggaagagatccacaaggctctgtaccccgaactccagtatcaccctctggctatccccaaagtgcgggacaacctgatggtggacgcccagacactgaatatcctgaacgccacctacaatctgctgctgatgagcaacaccagcctggtggacgattgctggctgtgcctgaaactgggacctcctacacctctggcaattcccaacttcctgctgagctacgtgaccagaagcagcgacaacatcagctgcctgattatcccacctctgctcgtgcagcccatgcagttcagcaactcctcctgcctgttcagccccagctacaacagcaccgaggaaatcgacctgggacacgtggccttctccaactgcacctccatcaccaacgtgacaggccctatctgcgccgtgaatggcagcgtgttcctgtgtggcaacaacatggcctacacctacctgcctaccaactggaccggactgtgcgtgctggctacactgctgcctgacatcgacatcatccctggcgacgagcccgtgcctattcctgccatcgaccacttcatctacagacccaagcgggctatccagttcatcccactgctggccggactgggaatcaccgccgcttttacaacaggcgctacaggactgggcgtgtccgtgacacagtacaccaagctgagcaaccagctgatctccgacgtgcagatcctgagcagcaccatccaggacctccaggatcaggtggactctctggccgaagtggtgctccagaacagaagaggactggacctgctgacagccgagcaaggcggaatttgtctggccctgcaagagaagtgctgcttctacgtgaacaagagcggcatcgtgcgcgacaagatcaagacactgcaagaggaactggaacggcggagaaaggacctggcctccaatcctctgtggaccggcctgcaaggactgctcccttacctgctgcctttcctgggaccactgctgactctgctgctcctgctgaccatcggaccctgcatcttcaacagactggtccagttcgttaaggatagaatatctgtcgtccaagcacttgtcctgacgcagcagtaccat

SEQ ID NO: 273 - DNA, 1656 bp, synthetic construct
  source 1..1656: mol_type = other DNA
atgggctttacgaccaagatcatcttcctgtacaacctggtgctggtgtacgccggcttcgacgatcctagaaaggccatcgagctggtgcagaagagatacggcagaccctgcgattgctctggcggccaagtttctgagcctcctagcgacagagtgtcccaagtgacctgtagcggcaagaccgcctacctgatgcctgaccagagatggaagtgcaagagcatccccaaggacacaagccctagcggccctctgcaagagtgcccctgtaatagctaccagagcagcgtgcacagctcctgctacacaagctaccagcagtgcagaagcggcaacaagacctactacaccgccacactgctgaaaacccagaccggcggcacatccgatgttcaggtgctgggcagcaccaacaagctgattcagagcccctgcaacggcatcaagggccagagcatctgctggtccacaacagcccctatccacgtgtcagatggcggcggacctctggacaccaccagaatcaagagcgtgcagcggaagctggaagagatccacaaggctctgtaccccgaactccagtatcaccctctggctatccccaaagtgcgggacaacctgatggtggacgcccagacactgaatatcctgaacgccacctacaatctgctgctgatgagcaacaccagcctggtggacgattgctggctgtgcctgaaactgggacctcctacacctctggcaattcccaacttcctgctgagctacgtgaccagaagcagcgacaacatcagctgcctgattatcccacctctgctcgtgcagcccatgcagttcagcaactcctcctgcctgttcagccccagctacaacagcaccgaggaaatcgacctgggacacgtggccttctccaactgcacctccatcaccaacgtgacaggccctatctgcgccgtgaatggcagcgtgttcctgtgtggcaacaacatggcctacacctacctgcctaccaactggaccggactgtgcgtgctggctacactgctgcctgacatcgacatcatccctggcgacgagcccgtgcctattcctgccatcgaccacttcatctacagacccaagcgggctatccagttcatcccactgctggccggactgggaatcaccgccgcttttacaacaggcgctacaggactgggcgtgtccgtgacacagtacaccaagctgagcaaccagctgatctccgacgtgcagatcctgagcagcaccatccaggacctccaggatcaggtggactctctggccgaagtggtgctccagaacagaagaggactggacctgctgacagccgagcaaggcggaatttgtctggccctgcaagagaagtgctgcttctacgtgaacaagagcggcatcgtgcgcgacaagatcaagacactgcaagaggaactggaacggcggagaaaggacctggcctccaatcctctgtggaccggcctgcaaggactgctcccttacctgctgcctttcctgggaccactgctgactctgctgctcctgctgaccatcggaccctgcatcttcaacagactggtccagttcgttaaggatagaatatctgtcgtccaagcacttgtcctgacgcagcagtac

SEQ ID NO: 274 - DNA, 1653 bp, synthetic construct
  source 1..1653: mol_type = other DNA
atgggctttacgaccaagatcatcttcctgtacaacctggtgctggtgtacgccggcttcgacgatcctagaaaggccatcgagctggtgcagaagagatacggcagaccctgcgattgctctggcggccaagtttctgagcctcctagcgacagagtgtcccaagtgacctgtagcggcaagaccgcctacctgatgcctgaccagagatggaagtgcaagagcatccccaaggacacaagccctagcggccctctgcaagagtgcccctgtaatagctaccagagcagcgtgcacagctcctgctacacaagctaccagcagtgcagaagcggcaacaagacctactacaccgccacactgctgaaaacccagaccggcggcacatccgatgttcaggtgctgggcagcaccaacaagctgattcagagcccctgcaacggcatcaagggccagagcatctgctggtccacaacagcccctatccacgtgtcagatggcggcggacctctggacaccaccagaatcaagagcgtgcagcggaagctggaagagatccacaaggctctgtaccccgaactccagtatcaccctctggctatccccaaagtgcgggacaacctgatggtggacgcccagacactgaatatcctgaacgccacctacaatctgctgctgatgagcaacaccagcctggtggacgattgctggctgtgcctgaaactgggacctcctacacctctggcaattcccaacttcctgctgagctacgtgaccagaagcagcgacaacatcagctgcctgattatcccacctctgctcgtgcagcccatgcagttcagcaactcctcctgcctgttcagccccagctacaacagcaccgaggaaatcgacctgggacacgtggccttctccaactgcacctccatcaccaacgtgacaggccctatctgcgccgtgaatggcagcgtgttcctgtgtggcaacaacatggcctacacctacctgcctaccaactggaccggactgtgcgtgctggctacactgctgcctgacatcgacatcatccctggcgacgagcccgtgcctattcctgccatcgaccacttcatctacagacccaagcgggctatccagttcatcccactgctggccggactgggaatcaccgccgcttttacaacaggcgctacaggactgggcgtgtccgtgacacagtacaccaagctgagcaaccagctgatctccgacgtgcagatcctgagcagcaccatccaggacctccaggatcaggtggactctctggccgaagtggtgctccagaacagaagaggactggacctgctgacagccgagcaaggcggaatttgtctggccctgcaagagaagtgctgcttctacgtgaacaagagcggcatcgtgcgcgacaagatcaagacactgcaagaggaactggaacggcggagaaaggacctggcctccaatcctctgtggaccggcctgcaaggactgctcccttacctgctgcctttcctgggaccactgctgactctgctgctcctgctgaccatcggaccctgcatcttcaacagactggtccagttcgttaaggatagaatatctgtcgtccaagcacttgtcctgacgcagcag

SEQ ID NO: 275 - DNA, 1650 bp, synthetic construct
  source 1..1650: mol_type = other DNA
atgggctttacgaccaagatcatcttcctgtacaacctggtgctggtgtacgccggcttcgacgatcctagaaaggccatcgagctggtgcagaagagatacggcagaccctgcgattgctctggcggccaagtttctgagcctcctagcgacagagtgtcccaagtgacctgtagcggcaagaccgcctacctgatgcctgaccagagatggaagtgcaagagcatccccaaggacacaagccctagcggccctctgcaagagtgcccctgtaatagctaccagagcagcgtgcacagctcctgctacacaagctaccagcagtgcagaagcggcaacaagacctactacaccgccacactgctgaaaacccagaccggcggcacatccgatgttcaggtgctgggcagcaccaacaagctgattcagagcccctgcaacggcatcaagggccagagcatctgctggtccacaacagcccctatccacgtgtcagatggcggcggacctctggacaccaccagaatcaagagcgtgcagcggaagctggaagagatccacaaggctctgtaccccgaactccagtatcaccctctggctatccccaaagtgcgggacaacctgatggtggacgcccagacactgaatatcctgaacgccacctacaatctgctgctgatgagcaacaccagcctggtggacgattgctggctgtgcctgaaactgggacctcctacacctctggcaattcccaacttcctgctgagctacgtgaccagaagcagcgacaacatcagctgcctgattatcccacctctgctcgtgcagcccatgcagttcagcaactcctcctgcctgttcagccccagctacaacagcaccgaggaaatcgacctgggacacgtggccttctccaactgcacctccatcaccaacgtgacaggccctatctgcgccgtgaatggcagcgtgttcctgtgtggcaacaacatggcctacacctacctgcctaccaactggaccggactgtgcgtgctggctacactgctgcctgacatcgacatcatccctggcgacgagcccgtgcctattcctgccatcgaccacttcatctacagacccaagcgggctatccagttcatcccactgctggccggactgggaatcaccgccgcttttacaacaggcgctacaggactgggcgtgtccgtgacacagtacaccaagctgagcaaccagctgatctccgacgtgcagatcctgagcagcaccatccaggacctccaggatcaggtggactctctggccgaagtggtgctccagaacagaagaggactggacctgctgacagccgagcaaggcggaatttgtctggccctgcaagagaagtgctgcttctacgtgaacaagagcggcatcgtgcgcgacaagatcaagacactgcaagaggaactggaacggcggagaaaggacctggcctccaatcctctgtggaccggcctgcaaggactgctcccttacctgctgcctttcctgggaccactgctgactctgctgctcctgctgaccatcggaccctgcatcttcaacagactggtccagttcgttaaggatagaatatctgtcgtccaagcacttgtcctgacgcag

SEQ ID NO: 276 - DNA, 4641 bp, synthetic construct
  source 1..4641: mol_type = other DNA
atggacccccagtgcaccatgggcctgtctaatatcctgtttgtgatggccttcctgctgagcggagcagcaccactgaagatccaggcctactttaacgagacagccgacctgccctgtcagttcgccaactcccagaatcagtctctgagcgagctggtggtgttctggcaggatcaggagaacctggtgctgaatgaggtgtacctgggcaaggagaagtttgacagcgtgcactccaagtatatgggccggaccagcttcgactccgattcttggaccctgaggctgcacaatctgcagatcaaggataagggcctgtaccagtgcatcatccaccacaagaagcctaccggcatgatcagaatccaccagatgaacagcgagctgagcgtgctggccaacttttcccagcctgagatcgtgccaatctctaacatcacagagaacgtgtacatcaacctgacctgtagctccatccacggctatccagagcccaagaagatgagcgtgctgctgaggacaaagaacagcaccatcgagtacgacggcatcatgcagaagtcccaggataacgtgaccgagctgtatgacgtgagcatctccctgtctgtgagctttccagatgtgacatccaacatgaccatcttctgcatcctggagacagacaagacccgcctgctgtctagcccattttctatcgagctggaggacccccagccacctccagatcacatcccttggatcacagccgtgctgccaaccgtgatcatctgcgtgatggtgttctgtctgatcctgtggaagtggaagaagaagaagcggcctcgcaattcctacaagtgtggcacaaacaccatggagcgggaggagtctgagcagaccaagaagagagagaagatccacatcccagagcggagcgatgaggcccagagagtgtttaagtcctctaagacaagctcctgcgacaagtccgatacctgtttcggctctggagagggaaggggcagcctgctgacctgcggcgacgtggaggagaatcctggaccagccctgccagtgacagccctgctgctgcctctggccctgctgctgcacgccgcccgccctcaggtgcagctgctggagtccggagcagagctggcccggccaggagcctctgtgaagatgagctgtaaggcctccggctacaccttcaccaggtataccatgcactgggtgaagcagaggccaggacagggactggagtggatcggctacatcaaccccagccgcggctacacaaactataatcagaagttcaaggataaggccacactgaccacagacaagtctagctccaccgcctacatgcagctgtctagcctgacatccgaggattctgccgtgtactattgcgccggctactatgacgatcactactgtctggactattggggccagggcacactggtgaccgtgtcctctggaggaggaggctccggcggaggaggctctggcggcggcggcagcgatatcgtgatgacccagtccccagccatcatgtccgcctctccaggagagaaggtgacaatgacctgctccgccagctccagcgtgagctacatgaattggtatcagcagaagagcggcacctcccccaagagatggatctacgacacatctaagctggccagcggagtgcctgcacacttcaggggcagcggctccggcacatcttatagcctgaccatcagcggaatggaggcagaggatgcagcaacctactattgccagcagtggagctccaaccccttcaccttcggcagcggcaccaagctggagatcaagcgcgacccctctaccacaacccccgcccctaggccacctacaccagccccaaccatcgcctcccagccactgtctctgaggcccgaggcctgtcgccctgccgcagggggggcagtgcacaccaggggactggactttgcctgcgatatctacatctgggcacctctggccggaacctgtggcgtgctgctgctgagcctggtcatcaccctgtattgcaagcggggcagaaagaagggcagcggagagggaaggggctccctgctgacctgtggcgacgtggaggagaaccctggcccaatggagtacgcctctgacgccagcctggaccccgaggccccatggccacccgccccaagggcaagggcctgccgggtgctgccttgggccctggtggccggcctgttattactgctgctgctggccgccgcctgcgccgtgttcctggcctgtccctgggccgtgtccggcgccagagcctccccaggctctgccgccagcccaaggctgagagagggacctgagctgagcccagacgatcctgccggcctgctggatctgaggcagggaatgtttgcccagctggtggcccagaatgtgctgctgatcgatggccctctgtcctggtactctgacccaggcctggccggcgtgtctctgaccggaggactgagctataaggaggacacaaaggagctggtggtggccaaggccggcgtgtactacgtgttcttccagctggagctgaggagagtggtggccggcgagggctccggctctgtgagcctggccctgcacctgcagccactgcggagcgccgccggggccgccgccctggccctgaccgtggatctgcctccagcctctagcgaggcacggaacagcgcctttggcttccagggcagactgctgcacctgtccgccggacagaggctgggagtgcacctgcacaccgaggcaagggcccgccacgcatggcagctgacacagggagcaaccgtgctgggcctgttcagagtgacaccagagatccctgccggcctgccaagccctaggtccgagggctctggcgaaggcagaggctccctgctgacttgtggcgacgtggaagaaaatccaggccccggctttacgaccaagatcatcttcctgtacaacctggtgctggtgtacgccggcttcgacgatcctagaaaggccatcgagctggtgcagaagagatacggcagaccctgcgattgctctggcggccaagtttctgagcctcctagcgacagagtgtcccaagtgacctgtagcggcaagaccgcctacctgatgcctgaccagagatggaagtgcaagagcatccccaaggacacaagccctagcggccctctgcaagagtgcccctgtaatagctaccagagcagcgtgcacagctcctgctacacaagctaccagcagtgcagaagcggcaacaagacctactacaccgccacactgctgaaaacccagaccggcggcacatccgatgttcaggtgctgggcagcaccaacaagctgattcagagcccctgcaacggcatcaagggccagagcatctgctggtccacaacagcccctatccacgtgtcagatggcggcggacctctggacaccaccagaatcaagagcgtgcagcggaagctggaagagatccacaaggctctgtaccccgaactccagtatcaccctctggctatccccaaagtgcgggacaacctgatggtggacgcccagacactgaatatcctgaacgccacctacaatctgctgctgatgagcaacaccagcctggtggacgattgctggctgtgcctgaaactgggacctcctacacctctggcaattcccaacttcctgctgagctacgtgaccagaagcagcgacaacatcagctgcctgattatcccacctctgctcgtgcagcccatgcagttcagcaactcctcctgcctgttcagccccagctacaacagcaccgaggaaatcgacctgggacacgtggccttctccaactgcacctccatcaccaacgtgacaggccctatctgcgccgtgaatggcagcgtgttcctgtgtggcaacaacatggcctacacctacctgcctaccaactggaccggactgtgcgtgctggctacactgctgcctgacatcgacatcatccctggcgacgagcccgtgcctattcctgccatcgaccacttcatctacagacccaagcgggctatccagttcatcccactgctggccggactgggaatcaccgccgcttttacaacaggcgctacaggactgggcgtgtccgtgacacagtacaccaagctgagcaaccagctgatctccgacgtgcagatcctgagcagcaccatccaggacctccaggatcaggtggactctctggccgaagtggtgctccagaacagaagaggactggacctgctgacagccgagcaaggcggaatttgtctggccctgcaagagaagtgctgcttctacgtgaacaagagcggcatcgtgcgcgacaagatcaagacactgcaagaggaactggaacggcggagaaaggacctggcctccaatcctctgtggaccggcctgcaaggactgctcccttacctgctgcctttcctgggaccactgctgactctgctgctcctgctgaccatcggaccctgcatcttcaacagactgaccgccttcatcaacgacaagctgaacatcatccacgctatgggatccactagtccagtgtggtggaattctgcagatatccagcacagttaa

SEQ ID NO: 277 - DNA, 4617 bp, synthetic construct
  source 1..4617: mol_type = other DNA
atggacccccagtgcaccatgggcctgtctaatatcctgtttgtgatggccttcctgctgagcggagcagcaccactgaagatccaggcctactttaacgagacagccgacctgccctgtcagttcgccaactcccagaatcagtctctgagcgagctggtggtgttctggcaggatcaggagaacctggtgctgaatgaggtgtacctgggcaaggagaagtttgacagcgtgcactccaagtatatgggccggaccagcttcgactccgattcttggaccctgaggctgcacaatctgcagatcaaggataagggcctgtaccagtgcatcatccaccacaagaagcctaccggcatgatcagaatccaccagatgaacagcgagctgagcgtgctggccaacttttcccagcctgagatcgtgccaatctctaacatcacagagaacgtgtacatcaacctgacctgtagctccatccacggctatccagagcccaagaagatgagcgtgctgctgaggacaaagaacagcaccatcgagtacgacggcatcatgcagaagtcccaggataacgtgaccgagctgtatgacgtgagcatctccctgtctgtgagctttccagatgtgacatccaacatgaccatcttctgcatcctggagacagacaagacccgcctgctgtctagcccattttctatcgagctggaggacccccagccacctccagatcacatcccttggatcacagccgtgctgccaaccgtgatcatctgcgtgatggtgttctgtctgatcctgtggaagtggaagaagaagaagcggcctcgcaattcctacaagtgtggcacaaacaccatggagcgggaggagtctgagcagaccaagaagagagagaagatccacatcccagagcggagcgatgaggcccagagagtgtttaagtcctctaagacaagctcctgcgacaagtccgatacctgtttcggctctggagagggaaggggcagcctgctgacctgcggcgacgtggaggagaatcctggaccagccctgccagtgacagccctgctgctgcctctggccctgctgctgcacgccgcccgccctcaggtgcagctgctggagtccggagcagagctggcccggccaggagcctctgtgaagatgagctgtaaggcctccggctacaccttcaccaggtataccatgcactgggtgaagcagaggccaggacagggactggagtggatcggctacatcaaccccagccgcggctacacaaactataatcagaagttcaaggataaggccacactgaccacagacaagtctagctccaccgcctacatgcagctgtctagcctgacatccgaggattctgccgtgtactattgcgccggctactatgacgatcactactgtctggactattggggccagggcacactggtgaccgtgtcctctggaggaggaggctccggcggaggaggctctggcggcggcggcagcgatatcgtgatgacccagtccccagccatcatgtccgcctctccaggagagaaggtgacaatgacctgctccgccagctccagcgtgagctacatgaattggtatcagcagaagagcggcacctcccccaagagatggatctacgacacatctaagctggccagcggagtgcctgcacacttcaggggcagcggctccggcacatcttatagcctgaccatcagcggaatggaggcagaggatgcagcaacctactattgccagcagtggagctccaaccccttcaccttcggcagcggcaccaagctggagatcaagcgcgacccctctaccacaacccccgcccctaggccacctacaccagccccaaccatcgcctcccagccactgtctctgaggcccgaggcctgtcgccctgccgcagggggggcagtgcacaccaggggactggactttgcctgcgatatctacatctgggcacctctggccggaacctgtggcgtgctgctgctgagcctggtcatcaccctgtattgcaagcggggcagaaagaagggcagcggagagggaaggggctccctgctgacctgtggcgacgtggaggagaaccctggcccaatggagtacgcctctgacgccagcctggaccccgaggccccatggccacccgccccaagggcaagggcctgccgggtgctgccttgggccctggtggccggcctgttattactgctgctgctggccgccgcctgcgccgtgttcctggcctgtccctgggccgtgtccggcgccagagcctccccaggctctgccgccagcccaaggctgagagagggacctgagctgagcccagacgatcctgccggcctgctggatctgaggcagggaatgtttgcccagctggtggcccagaatgtgctgctgatcgatggccctctgtcctggtactctgacccaggcctggccggcgtgtctctgaccggaggactgagctataaggaggacacaaaggagctggtggtggccaaggccggcgtgtactacgtgttcttccagctggagctgaggagagtggtggccggcgagggctccggctctgtgagcctggccctgcacctgcagccactgcggagcgccgccggggccgccgccctggccctgaccgtggatctgcctccagcctctagcgaggcacggaacagcgcctttggcttccagggcagactgctgcacctgtccgccggacagaggctgggagtgcacctgcacaccgaggcaagggcccgccacgcatggcagctgacacagggagcaaccgtgctgggcctgttcagagtgacaccagagatccctgccggcctgccaagccctaggtccgagggctctggcgaaggcagaggctccctgctgacttgtggcgacgtggaagaaaatccaggccccggctttacgaccaagatcatcttcctgtacaacctggtgctggtgtacgccggcttcgacgatcctagaaaggccatcgagctggtgcagaagagatacggcagaccctgcgattgctctggcggccaagtttctgagcctcctagcgacagagtgtcccaagtgacctgtagcggcaagaccgcctacctgatgcctgaccagagatggaagtgcaagagcatccccaaggacacaagccctagcggccctctgcaagagtgcccctgtaatagctaccagagcagcgtgcacagctcctgctacacaagctaccagcagtgcagaagcggcaacaagacctactacaccgccacactgctgaaaacccagaccggcggcacatccgatgttcaggtgctgggcagcaccaacaagctgattcagagcccctgcaacggcatcaagggccagagcatctgctggtccacaacagcccctatccacgtgtcagatggcggcggacctctggacaccaccagaatcaagagcgtgcagcggaagctggaagagatccacaaggctctgtaccccgaactccagtatcaccctctggctatccccaaagtgcgggacaacctgatggtggacgcccagacactgaatatcctgaacgccacctacaatctgctgctgatgagcaacaccagcctggtggacgattgctggctgtgcctgaaactgggacctcctacacctctggcaattcccaacttcctgctgagctacgtgaccagaagcagcgacaacatcagctgcctgattatcccacctctgctcgtgcagcccatgcagttcagcaactcctcctgcctgttcagccccagctacaacagcaccgaggaaatcgacctgggacacgtggccttctccaactgcacctccatcaccaacgtgacaggccctatctgcgccgtgaatggcagcgtgttcctgtgtggcaacaacatggcctacacctacctgcctaccaactggaccggactgtgcgtgctggctacactgctgcctgacatcgacatcatccctggcgacgagcccgtgcctattcctgccatcgaccacttcatctacagacccaagcgggctatccagttcatcccactgctggccggactgggaatcaccgccgcttttacaacaggcgctacaggactgggcgtgtccgtgacacagtacaccaagctgagcaaccagctgatctccgacgtgcagatcctgagcagcaccatccaggacctccaggatcaggtggactctctggccgaagtggtgctccagaacagaagaggactggacctgctgacagccgagcaaggcggaatttgtctggccctgcaagagaagtgctgcttctacgtgaacaagagcggcatcgtgcgcgacaagatcaagacactgcaagaggaactggaacggcggagaaaggacctggcctccaatcctctgtggaccggcctgcaaggactgctcccttacctgctgcctttcctgggaccactgctgactctgctgctcctgctgaccatcggaccctgcatcttcaacagactgaccgccttcatcaacgacaagctgaacatcatccacgctatggtgctgacacagcagtaccaggtgctg

SEQ ID NO: 278 - DNA, 4716 bp, synthetic construct
  source 1..4716: mol_type = other DNA
atggaccctagatgcacaatgggcctggccatcctgatcttcgtgaccgtgctgctgatcagcgatgccgtgtccgtggagacccaggcctactttaacggcacagcctatctgccatgtcccttcacaaaggcccagaatatctccctgtctgagctggtggtgttttggcaggaccagcagaagctggtgctgtacgagcactatctgggcaccgagaagctggactccgtgaacgccaagtacctgggccggacctcttttgatagaaacaattggacactgaggctgcacaatgtgcagatcaaggatatgggctcttatgactgcttcatccagaagaagccccctaccggcagcatcatcctgcagcagacactgaccgagctgagcgtgatcgccaacttttccgagcccgagatcaagctggcccagaacgtgaccggcaattctggcatcaacctgacatgtaccagcaagcagggccaccctaagccaaagaagatgtacttcctgatcaccaacagcacaaatgagtatggcgacaatatgcagatctcccaggataacgtgaccgagctgtttagcatctccaactctctgagcctgtccttccctgacggcgtgtggcacatgaccgtggtgtgcgtgctggagacagagagcatgaagatcagctccaagcccctgaacttcacccaggagttcccctctcctcagacatactggaaggagatcaccgccagcgtgacagtggccctgctgctggtcatgctgctgatcatcgtgtgccacaagaagccaaatcagcccagccggccttccaacacagcctctaagctggagcgggatagcaatgccgacagagagaccatcaacctgaaggagctggagcctcagatcgcctccgccaagccaaacgcagagggctccggagagggaagaggctctctgctgacatgcggcgacgtggaggagaatccaggacccgccctgccagtgaccgccctgctgctgcctctggccctgctgctgcacgccgccaggccagaggtgcagctggtggagagcggaggaggactggtgcagcctggcaagtctctgaagctgagctgtgaggcctccggctttaccttctccggctacggcatgcactgggtgaggcaggcaccaggaaggggactggagtctgtggcctacatcacatctagctccatcaacatcaagtatgccgacgccgtgaagggccggtttaccgtgagcagagataacgccaagaatctgctgttcctgcagatgaacatcctgaagtccgaggacaccgccatgtactattgcgccagattcgactgggataagaattactggggccagggcaccatggtgacagtgtctagcggaggaggaggctccggaggaggaggctctggcggcggcggcagcgatatccagatgacacagtccccttcctctctgccagcctctctgggcgacagggtgaccatcaactgtcaggcctctcaggatatcagcaactacctgaattggtatcagcagaagcccggcaaggcccctaagctgctgatctactatacaaataagctggccgacggagtgccatcccggttttctggcagcggctccggcagagacagctccttcaccatctctagcctggagtccgaggatatcggctcttactattgccagcagtactataactacccttggaccttcggcccaggcacaaagctggagatcaagcgggaccccagcaccacaacccctgccccaaggccaccaacccccgcccctacaatcgcctcccagccactgtctctgaggcctgaggcctgtcgcccagccgcagggggggcagtgcacaccaggggactggattttgcctgcgacatctacatctgggcacccctggccggaacatgtggcgtgctgctgctgagcctggtcatcaccctgtattgcaagcggggcagaaagaagggcagcggagagggaaggggctccctgctgacctgtggcgacgtggaggagaacccaggccccatggatcagcacaccctggacgtggaggatacagcagacgcaaggcaccccgccggcacatcttgccctagcgatgccgccctgctgagagacaccggactgctggccgatgccgccctgctgtccgacaccgtgcgcccaacaaatgccgccctgccaaccgacgcagcataccctgcagtgaacgtgagggatagggaggcagcatggcctccagccctgaatttttgcagccggcaccctaagctgtatggactggtggccctggtgctgctgctgctgatcgcagcatgcgtgcccatcttcacaaggaccgagcctcgcccagccctgaccatcacaacctcccctaacctgggcacacgcgagaacaatgccgaccaggtgaccccagtgtcccacatcggctgccctaacacaacccagcagggctctccagtgttcgccaagctgctggccaagaatcaggccagcctgtgcaatacaaccctgaactggcactcccaggatggagcaggctcctcttacctgtctcagggcctgcggtatgaggaggacaagaaggagctggtggtggattcccccggcctgtactacgtgttcctggagctgaagctgtctcctacattcaccaatacaggccacaaggtgcagggatgggtgagcctggtgctgcaggccaagcctcaggtggacgattttgacaacctggccctgaccgtggagctgttcccatgctccatggagaataagctggtggatcggtcttggagccagctgctgctgctgaaggcaggacacaggctgagcgtgggactgcgcgcctacctgcacggcgcccaggatgcctacagagactgggagctgtcttatcccaacacaaccagctttggcctgttcctggtgaagccagacaatccatgggaaggctccggcgagggaaggggctctctgctgacctgtggcgatgtggaggagaatcccggccctggctttacgaccaagatcatcttcctgtacaacctggtgctggtgtacgccggcttcgacgatcctagaaaggccatcgagctggtgcagaagagatacggcagaccctgcgattgctctggcggccaagtttctgagcctcctagcgacagagtgtcccaagtgacctgtagcggcaagaccgcctacctgatgcctgaccagagatggaagtgcaagagcatccccaaggacacaagccctagcggccctctgcaagagtgcccctgtaatagctaccagagcagcgtgcacagctcctgctacacaagctaccagcagtgcagaagcggcaacaagacctactacaccgccacactgctgaaaacccagaccggcggcacatccgatgttcaggtgctgggcagcaccaacaagctgattcagagcccctgcaacggcatcaagggccagagcatctgctggtccacaacagcccctatccacgtgtcagatggcggcggacctctggacaccaccagaatcaagagcgtgcagcggaagctggaagagatccacaaggctctgtaccccgaactccagtatcaccctctggctatccccaaagtgcgggacaacctgatggtggacgcccagacactgaatatcctgaacgccacctacaatctgctgctgatgagcaacaccagcctggtggacgattgctggctgtgcctgaaactgggacctcctacacctctggcaattcccaacttcctgctgagctacgtgaccagaagcagcgacaacatcagctgcctgattatcccacctctgctcgtgcagcccatgcagttcagcaactcctcctgcctgttcagccccagctacaacagcaccgaggaaatcgacctgggacacgtggccttctccaactgcacctccatcaccaacgtgacaggccctatctgcgccgtgaatggcagcgtgttcctgtgtggcaacaacatggcctacacctacctgcctaccaactggaccggactgtgcgtgctggctacactgctgcctgacatcgacatcatccctggcgacgagcccgtgcctattcctgccatcgaccacttcatctacagacccaagcgggctatccagttcatcccactgctggccggactgggaatcaccgccgcttttacaacaggcgctacaggactgggcgtgtccgtgacacagtacaccaagctgagcaaccagctgatctccgacgtgcagatcctgagcagcaccatccaggacctccaggatcaggtggactctctggccgaagtggtgctccagaacagaagaggactggacctgctgacagccgagcaaggcggaatttgtctggccctgcaagagaagtgctgcttctacgtgaacaagagcggcatcgtgcgcgacaagatcaagacactgcaagaggaactggaacggcggagaaaggacctggcctccaatcctctgtggaccggcctgcaaggactgctcccttacctgctgcctttcctgggaccactgctgactctgctgctcctgctgaccatcggaccctgcatcttcaacagactgaccgccttcatcaacgacaagctgaacatcatccacgctatggtgctgacacagcagtaccaggtgctg

SEQ ID NO: 279 - DNA, 4647 bp, synthetic construct
  source 1..4647: mol_type = other DNA
atgtacctgcgctgcaccatggagctgaacaatatcctgttcgtgatgacactgctgctgtacggcgccgcctctatgaagagccaggcctacttcaacaagaccggcgagctgccctgtcacttcacaaactcccagaatatctctctggacgagctggtggtgttttggcaggaccaggataagctggtgctgtacgagctgtatcgcggcaaggagaaccctcagaatgtgcacagaaagtacaagggcaggacctcctttgacaaggataactggacactgcggctgcacaatatccagatcaaggataagggcctgtatcagtgcttcgtgcaccacaagggcccaaagggcctggtgcccatgcaccagatgaactccgacctgtctgtgctggccaacttcagccagcccgagatcatggtgacctccaaccggacagagaacagcggcatcatcaacctgacctgtagctccatccagggctaccccgagcctaaggagatgtatttcctggtgaagacagagaacagcagcaccaagtacgatacagtgatgaagaagagccagaacaatgtgaccgagctgtataacgtgtctatcagcctgtccttttctgtgcctgaggccagcaacgtgagcatcttctgcgtgctgcagctggagtctatgaagctgcccagcctgccttacaacatcgacgcccacaccaagccaacacccgacggcgatcacatcctgtggatcgccgccctgctggtcatgctggtcatcctgtgcggcatggtgttctttctgaccctgagaaagcggaagaagaagcagcctggcccatcccacgagtgtgagacaaataaggtggagcgcaaggagtctgagcagaccaaggagcgcgtgcggtaccacgagacagagcggtccgatgaggcccagtgcgtgaacatcagcaagaccgcctccggcgacaattctaccacacagttcggcagcggagagggaagaggctccctgctgacctgtggcgatgtggaggagaacccaggacctgccctgccagtgacagccctgctgctgcctctggccctgctgctgcacgccgccaggccagaggtgcagctggtggagagcggaggaggactggtgcagcccaagggcagcctgaagctgtcctgcgccacctctggctttacattcaacatctacgccatgaattgggtgagacaggcaccaggcaagggactggagtgggtggccagaatcaggagcaagtccaagaattatgccacctactatgccggcagcgtgaaggaccgctttacaatctcccgggacgattctcagagcatgctgtacctgcagatgaacaatctgaagaccgaggatacagccatgtactattgcgtgcggagaggctatttcgacgtgtggggagcaggaaccacagtgaccgtgtcctctagcggaggaggaggctccggaggaggaggctctggcggcggcggcagcatcatcgtgatgacccagtccccaaagtccatgtctatgagcgtgggagagagggtgacactgagctgtcgggcctccgagaacgtggattcttttgtgagctggtaccagcagaagcctgaccagagcccacagctgctgatcttcggcgcctccaatagatctaccggcgtgcccgataggtttaccggctccggctctgccacagacttcacactgaccatcacaagcgtgcagtccgaggatctggcagcataccactgcggacagacctactcctatccttttaccttcggctctggcacaaacctggagatcaagcggagcgaccccaccacaaccccagccccaaggccacctacccctgccccaacaatcgcctctcagcctctgagcctgagaccagaggcctgtaggccagccgcagggggggcagtgcacacccgcggcctggacttcgcctgcgatatctacatctgggcacccctggccggaacctgtggcgtgctgctgctgagcctggtcatcaccctgtattgcaaccaccggaataggcgccgggtgtgcaagtgtccaagacctgtggtgggctctggagagggaaggggcagcctgctgacttgcggcgatgtggaagaaaacccaggaccaatgaggccacggagcgacgccgcccctgatccagaggcaccaaggccacccgcccctccaggcagagcctgcagcccactgccttgggcactgtccgccgcaatgctgctgctggtgggcacctgcgccgcctgtgccctgcgcgcctgggtggtgccaggaccaaggccccctgccctgcccgccctgcctgccccactgcccgatgccggcgccaggctgccagacagcccacaggccgtgttcgcacagctggtggccagagatgtgcagctgaaggagggaccactgaggtggtacagcgaccccggcctggccggcgtgtttctgggacccggcctgtcctatgaccagcacacaagagagctgatggtggtggagcctggcctgtactacgtgttcctgcacctgaagctgcagagagtgatgtcctctaccggcagcggctccgtgtctgccgccctgcacctgcagccactgggaaccgaggcagccgccctggacctgacactggatctgccaccccctagctccgaggccagagattctgccgcaggctttaggggcagcctgctgcacctggacgcaggacagagactgagggtgcacctgagggcagaggcaggagcacaccctgcatggcagctggcccagggagcaacaatcctgggactgttccgggtggcaaccaaggtgccaacaggactgccttctagctggccaatggataccggaccaggctccccaccactggacggagagggctccggcgagggcagaggctctctgctgacctgcggcgacgtggaggagaaccctggaccaggctttacgaccaagatcatcttcctgtacaacctggtgctggtgtacgccggcttcgacgatcctagaaaggccatcgagctggtgcagaagagatacggcagaccctgcgattgctctggcggccaagtttctgagcctcctagcgacagagtgtcccaagtgacctgtagcggcaagaccgcctacctgatgcctgaccagagatggaagtgcaagagcatccccaaggacacaagccctagcggccctctgcaagagtgcccctgtaatagctaccagagcagcgtgcacagctcctgctacacaagctaccagcagtgcagaagcggcaacaagacctactacaccgccacactgctgaaaacccagaccggcggcacatccgatgttcaggtgctgggcagcaccaacaagctgattcagagcccctgcaacggcatcaagggccagagcatctgctggtccacaacagcccctatccacgtgtcagatggcggcggacctctggacaccaccagaatcaagagcgtgcagcggaagctggaagagatccacaaggctctgtaccccgaactccagtatcaccctctggctatccccaaagtgcgggacaacctgatggtggacgcccagacactgaatatcctgaacgccacctacaatctgctgctgatgagcaacaccagcctggtggacgattgctggctgtgcctgaaactgggacctcctacacctctggcaattcccaacttcctgctgagctacgtgaccagaagcagcgacaacatcagctgcctgattatcccacctctgctcgtgcagcccatgcagttcagcaactcctcctgcctgttcagccccagctacaacagcaccgaggaaatcgacctgggacacgtggccttctccaactgcacctccatcaccaacgtgacaggccctatctgcgccgtgaatggcagcgtgttcctgtgtggcaacaacatggcctacacctacctgcctaccaactggaccggactgtgcgtgctggctacactgctgcctgacatcgacatcatccctggcgacgagcccgtgcctattcctgccatcgaccacttcatctacagacccaagcgggctatccagttcatcccactgctggccggactgggaatcaccgccgcttttacaacaggcgctacaggactgggcgtgtccgtgacacagtacaccaagctgagcaaccagctgatctccgacgtgcagatcctgagcagcaccatccaggacctccaggatcaggtggactctctggccgaagtggtgctccagaacagaagaggactggacctgctgacagccgagcaaggcggaatttgtctggccctgcaagagaagtgctgcttctacgtgaacaagagcggcatcgtgcgcgacaagatcaagacactgcaagaggaactggaacggcggagaaaggacctggcctccaatcctctgtggaccggcctgcaaggactgctcccttacctgctgcctttcctgggaccactgctgactctgctgctcctgctgaccatcggaccctgcatcttcaacagactgaccgccttcatcaacgacaagctgaacatcatccacgctatggtgctgacacagcagtaccaggtgctg

SEQ ID NO: 280 - DNA, 4410 bp, synthetic construct
  source 1..4410: mol_type = other DNA
atggacccccagtgcaccatgggcctgtctaatatcctgtttgtgatggccttcctgctgagcggagcagcaccactgaagatccaggcctactttaacgagacagccgacctgccctgtcagttcgccaactcccagaatcagtctctgagcgagctggtggtgttctggcaggatcaggagaacctggtgctgaatgaggtgtacctgggcaaggagaagtttgacagcgtgcactccaagtatatgggccggaccagcttcgactccgattcttggaccctgaggctgcacaatctgcagatcaaggataagggcctgtaccagtgcatcatccaccacaagaagcctaccggcatgatcagaatccaccagatgaacagcgagctgagcgtgctggccaacttttcccagcctgagatcgtgccaatctctaacatcacagagaacgtgtacatcaacctgacctgtagctccatccacggctatccagagcccaagaagatgagcgtgctgctgaggacaaagaacagcaccatcgagtacgacggcatcatgcagaagtcccaggataacgtgaccgagctgtatgacgtgagcatctccctgtctgtgagctttccagatgtgacatccaacatgaccatcttctgcatcctggagacagacaagacccgcctgctgtctagcccattttctatcgagctggaggacccccagccacctccagatcacatcccttggatcacagccgtgctgccaaccgtgatcatctgcgtgatggtgttctgtctgatcctgtggaagtggaagaagaagaagcggcctcgcaattcctacaagtgtggcacaaacaccatggagcgggaggagtctgagcagaccaagaagagagagaagatccacatcccagagcggagcgatgaggcccagagagtgtttaagtcctctaagacaagctcctgcgacaagtccgatacctgtttcggctctggagagggaaggggcagcctgctgacctgcggcgacgtggaggagaatcctggaccagccctgccagtgacagccctgctgctgcctctggccctgctgctgcacgccgcccgccctcaggtgcagctgctggagtccggagcagagctggcccggccaggagcctctgtgaagatgagctgtaaggcctccggctacaccttcaccaggtataccatgcactgggtgaagcagaggccaggacagggactggagtggatcggctacatcaaccccagccgcggctacacaaactataatcagaagttcaaggataaggccacactgaccacagacaagtctagctccaccgcctacatgcagctgtctagcctgacatccgaggattctgccgtgtactattgcgccggctactatgacgatcactactgtctggactattggggccagggcacactggtgaccgtgtcctctggaggaggaggctccggcggaggaggctctggcggcggcggcagcgatatcgtgatgacccagtccccagccatcatgtccgcctctccaggagagaaggtgacaatgacctgctccgccagctccagcgtgagctacatgaattggtatcagcagaagagcggcacctcccccaagagatggatctacgacacatctaagctggccagcggagtgcctgcacacttcaggggcagcggctccggcacatcttatagcctgaccatcagcggaatggaggcagaggatgcagcaacctactattgccagcagtggagctccaaccccttcaccttcggcagcggcaccaagctggagatcaagcgcgacccctctaccacaacccccgcccctaggccacctacaccagccccaaccatcgcctcccagccactgtctctgaggcccgaggcctgtcgccctgccgcagggggggcagtgcacaccaggggactggactttgcctgcgatatctacatctgggcacctctggccggaacctgtggcgtgctgctgctgagcctggtcatcaccctgtattgcaagcggggcagaaagaagggcagcggagagggaaggggctccctgctgacctgtggcgacgtggaggagaaccctggcccaatggagtacgcctctgacgccagcctggaccccgaggccccatggccacccgccccaagggcaagggcctgccgggtgctgccttgggccctggtggccggcctgttattactgctgctgctggccgccgcctgcgccgtgttcctggcctgtccctgggccgtgtccggcgccagagcctccccaggctctgccgccagcccaaggctgagagagggacctgagctgagcccagacgatcctgccggcctgctggatctgaggcagggaatgtttgcccagctggtggcccagaatgtgctgctgatcgatggccctctgtcctggtactctgacccaggcctggccggcgtgtctctgaccggaggactgagctataaggaggacacaaaggagctggtggtggccaaggccggcgtgtactacgtgttcttccagctggagctgaggagagtggtggccggcgagggctccggctctgtgagcctggccctgcacctgcagccactgcggagcgccgccggggccgccgccctggccctgaccgtggatctgcctccagcctctagcgaggcacggaacagcgcctttggcttccagggcagactgctgcacctgtccgccggacagaggctgggagtgcacctgcacaccgaggcaagggcccgccacgcatggcagctgacacagggagcaaccgtgctgggcctgttcagagtgacaccagagatccctgccggcctgccaagccctaggtccgagggctctggcgaaggcagaggctccctgctgacttgtggcgacgtggaagaaaatccaggccccgagacagacacactcctgctatgggtactgctgctctgggttccaggttccactggtgacgcaccccctccatgccgctgtatgacaagcagcagcccctaccaagagttcctgtggcgaatgcagaggcccggcaacattgacgcccctagctacagaagcctgagcaagggcacccctaccttcacagcccacacacacatgccccggaactgctaccatagcgccacactgtgtatgcacgccaacacacactactggaccggcaagatgattaaccctagctgccctggcggcctgggcgtgacagtttgttggacctactttacccagaccggcatgtccgatggtggcggagttcaagaccaggccagagaaaagcacgtgaaagaagtgatctcccagctgaccagagtgcacggcacaagcagcccttacaaaggactggacctgtccaagctgcacgagacactgagaacccacacacggctggtgtccctgttcaacaccacactgaccggactgcacgaggtgtccgctcagaatcctaccaactgctggatctgcctgcctctgaacttcagaccctacgtgtcaatccccgtgcctgagcagtggaacaacttcagcaccgagatcaataccaccagcgtgctcgtgggacccctggtgtccaatctggaaatcacccacaccagcaacctgacctgcgtgaagttctccaacaccacctacaccaccaacagccagtgcatcagatgggtcacccctccaacacagatcgtgtgtctgcccagcggcatcttcttcgtgtgtggcacaagcgcctaccgctgcctgaatggcagcagcgagtctatgtgcttcctgagcttcctggtgcctcctatgaccatctacaccgagcaggacctgtacagctacgtgatctccaagcctcggaacaagcgggtgcccatcctgccttttgtgattggagctggcgtgctgggagccctcggaactggaatcggaggcatcaccacctctactcagttctactacaaactatctcaagaactaaatggggacatggaaagagtggccgacagcctggtcacactccaggaccagctcaattctctggctgccgtggtgctccagaatcggagagcactcgatctgctgacagccgagagaggcggcacctgtctgtttctgggcgaagagtgctgctactacgtgaaccagtccggaatcgtcactgagaaagttaaagaaattcgagatcgaatccagcggagagccgaggaactgagaaacacaggaccttggggcctgctgagccagtggatgccttggattctgcccttcctgggacctctggccgccatcattctgctgctgctgttcggcccctgtatctttaacctccttgttaactttgtctcttccagaatcgaagctgtaaaataa

SEQ ID NO: 281 - DNA, 4509 bp, synthetic construct
  source 1..4509: mol_type = other DNA
atggaccctagatgcacaatgggcctggccatcctgatcttcgtgaccgtgctgctgatcagcgatgccgtgtccgtggagacccaggcctactttaacggcacagcctatctgccatgtcccttcacaaaggcccagaatatctccctgtctgagctggtggtgttttggcaggaccagcagaagctggtgctgtacgagcactatctgggcaccgagaagctggactccgtgaacgccaagtacctgggccggacctcttttgatagaaacaattggacactgaggctgcacaatgtgcagatcaaggatatgggctcttatgactgcttcatccagaagaagccccctaccggcagcatcatcctgcagcagacactgaccgagctgagcgtgatcgccaacttttccgagcccgagatcaagctggcccagaacgtgaccggcaattctggcatcaacctgacatgtaccagcaagcagggccaccctaagccaaagaagatgtacttcctgatcaccaacagcacaaatgagtatggcgacaatatgcagatctcccaggataacgtgaccgagctgtttagcatctccaactctctgagcctgtccttccctgacggcgtgtggcacatgaccgtggtgtgcgtgctggagacagagagcatgaagatcagctccaagcccctgaacttcacccaggagttcccctctcctcagacatactggaaggagatcaccgccagcgtgacagtggccctgctgctggtcatgctgctgatcatcgtgtgccacaagaagccaaatcagcccagccggccttccaacacagcctctaagctggagcgggatagcaatgccgacagagagaccatcaacctgaaggagctggagcctcagatcgcctccgccaagccaaacgcagagggctccggagagggaagaggctctctgctgacatgcggcgacgtggaggagaatccaggacccgccctgccagtgaccgccctgctgctgcctctggccctgctgctgcacgccgccaggccagaggtgcagctggtggagagcggaggaggactggtgcagcctggcaagtctctgaagctgagctgtgaggcctccggctttaccttctccggctacggcatgcactgggtgaggcaggcaccaggaaggggactggagtctgtggcctacatcacatctagctccatcaacatcaagtatgccgacgccgtgaagggccggtttaccgtgagcagagataacgccaagaatctgctgttcctgcagatgaacatcctgaagtccgaggacaccgccatgtactattgcgccagattcgactgggataagaattactggggccagggcaccatggtgacagtgtctagcggaggaggaggctccggaggaggaggctctggcggcggcggcagcgatatccagatgacacagtccccttcctctctgccagcctctctgggcgacagggtgaccatcaactgtcaggcctctcaggatatcagcaactacctgaattggtatcagcagaagcccggcaaggcccctaagctgctgatctactatacaaataagctggccgacggagtgccatcccggttttctggcagcggctccggcagagacagctccttcaccatctctagcctggagtccgaggatatcggctcttactattgccagcagtactataactacccttggaccttcggcccaggcacaaagctggagatcaagcgggaccccagcaccacaacccctgccccaaggccaccaacccccgcccctacaatcgcctcccagccactgtctctgaggcctgaggcctgtcgcccagccgcagggggggcagtgcacaccaggggactggattttgcctgcgacatctacatctgggcacccctggccggaacatgtggcgtgctgctgctgagcctggtcatcaccctgtattgcaagcggggcagaaagaagggcagcggagagggaaggggctccctgctgacctgtggcgacgtggaggagaacccaggccccatggatcagcacaccctggacgtggaggatacagcagacgcaaggcaccccgccggcacatcttgccctagcgatgccgccctgctgagagacaccggactgctggccgatgccgccctgctgtccgacaccgtgcgcccaacaaatgccgccctgccaaccgacgcagcataccctgcagtgaacgtgagggatagggaggcagcatggcctccagccctgaatttttgcagccggcaccctaagctgtatggactggtggccctggtgctgctgctgctgatcgcagcatgcgtgcccatcttcacaaggaccgagcctcgcccagccctgaccatcacaacctcccctaacctgggcacacgcgagaacaatgccgaccaggtgaccccagtgtcccacatcggctgccctaacacaacccagcagggctctccagtgttcgccaagctgctggccaagaatcaggccagcctgtgcaatacaaccctgaactggcactcccaggatggagcaggctcctcttacctgtctcagggcctgcggtatgaggaggacaagaaggagctggtggtggattcccccggcctgtactacgtgttcctggagctgaagctgtctcctacattcaccaatacaggccacaaggtgcagggatgggtgagcctggtgctgcaggccaagcctcaggtggacgattttgacaacctggccctgaccgtggagctgttcccatgctccatggagaataagctggtggatcggtcttggagccagctgctgctgctgaaggcaggacacaggctgagcgtgggactgcgcgcctacctgcacggcgcccaggatgcctacagagactgggagctgtcttatcccaacacaaccagctttggcctgttcctggtgaagccagacaatccatgggaaggctccggcgagggaaggggctctctgctgacctgtggcgatgtggaggagaatcccggccctgagacagacacactcctgctatgggtactgctgctctgggttccaggttccactggtgacgcaccccctccatgccgctgtatgacaagcagcagcccctaccaagagttcctgtggcgaatgcagaggcccggcaacattgacgcccctagctacagaagcctgagcaagggcacccctaccttcacagcccacacacacatgccccggaactgctaccatagcgccacactgtgtatgcacgccaacacacactactggaccggcaagatgattaaccctagctgccctggcggcctgggcgtgacagtttgttggacctactttacccagaccggcatgtccgatggtggcggagttcaagaccaggccagagaaaagcacgtgaaagaagtgatctcccagctgaccagagtgcacggcacaagcagcccttacaaaggactggacctgtccaagctgcacgagacactgagaacccacacacggctggtgtccctgttcaacaccacactgaccggactgcacgaggtgtccgctcagaatcctaccaactgctggatctgcctgcctctgaacttcagaccctacgtgtcaatccccgtgcctgagcagtggaacaacttcagcaccgagatcaataccaccagcgtgctcgtgggacccctggtgtccaatctggaaatcacccacaccagcaacctgacctgcgtgaagttctccaacaccacctacaccaccaacagccagtgcatcagatgggtcacccctccaacacagatcgtgtgtctgcccagcggcatcttcttcgtgtgtggcacaagcgcctaccgctgcctgaatggcagcagcgagtctatgtgcttcctgagcttcctggtgcctcctatgaccatctacaccgagcaggacctgtacagctacgtgatctccaagcctcggaacaagcgggtgcccatcctgccttttgtgattggagctggcgtgctgggagccctcggaactggaatcggaggcatcaccacctctactcagttctactacaaactatctcaagaactaaatggggacatggaaagagtggccgacagcctggtcacactccaggaccagctcaattctctggctgccgtggtgctccagaatcggagagcactcgatctgctgacagccgagagaggcggcacctgtctgtttctgggcgaagagtgctgctactacgtgaaccagtccggaatcgtcactgagaaagttaaagaaattcgagatcgaatccagcggagagccgaggaactgagaaacacaggaccttggggcctgctgagccagtggatgccttggattctgcccttcctgggacctctggccgccatcattctgctgctgctgttcggcccctgtatctttaacctccttgttaactttgtctcttccagaatcgaagctgtaaaataa

SEQ ID NO: 282 - DNA, 4440 bp, synthetic construct
  source 1..4440: mol_type = other DNA
atgtacctgcgctgcaccatggagctgaacaatatcctgttcgtgatgacactgctgctgtacggcgccgcctctatgaagagccaggcctacttcaacaagaccggcgagctgccctgtcacttcacaaactcccagaatatctctctggacgagctggtggtgttttggcaggaccaggataagctggtgctgtacgagctgtatcgcggcaaggagaaccctcagaatgtgcacagaaagtacaagggcaggacctcctttgacaaggataactggacactgcggctgcacaatatccagatcaaggataagggcctgtatcagtgcttcgtgcaccacaagggcccaaagggcctggtgcccatgcaccagatgaactccgacctgtctgtgctggccaacttcagccagcccgagatcatggtgacctccaaccggacagagaacagcggcatcatcaacctgacctgtagctccatccagggctaccccgagcctaaggagatgtatttcctggtgaagacagagaacagcagcaccaagtacgatacagtgatgaagaagagccagaacaatgtgaccgagctgtataacgtgtctatcagcctgtccttttctgtgcctgaggccagcaacgtgagcatcttctgcgtgctgcagctggagtctatgaagctgcccagcctgccttacaacatcgacgcccacaccaagccaacacccgacggcgatcacatcctgtggatcgccgccctgctggtcatgctggtcatcctgtgcggcatggtgttctttctgaccctgagaaagcggaagaagaagcagcctggcccatcccacgagtgtgagacaaataaggtggagcgcaaggagtctgagcagaccaaggagcgcgtgcggtaccacgagacagagcggtccgatgaggcccagtgcgtgaacatcagcaagaccgcctccggcgacaattctaccacacagttcggcagcggagagggaagaggctccctgctgacctgtggcgatgtggaggagaacccaggacctgccctgccagtgacagccctgctgctgcctctggccctgctgctgcacgccgccaggccagaggtgcagctggtggagagcggaggaggactggtgcagcccaagggcagcctgaagctgtcctgcgccacctctggctttacattcaacatctacgccatgaattgggtgagacaggcaccaggcaagggactggagtgggtggccagaatcaggagcaagtccaagaattatgccacctactatgccggcagcgtgaaggaccgctttacaatctcccgggacgattctcagagcatgctgtacctgcagatgaacaatctgaagaccgaggatacagccatgtactattgcgtgcggagaggctatttcgacgtgtggggagcaggaaccacagtgaccgtgtcctctagcggaggaggaggctccggaggaggaggctctggcggcggcggcagcatcatcgtgatgacccagtccccaaagtccatgtctatgagcgtgggagagagggtgacactgagctgtcgggcctccgagaacgtggattcttttgtgagctggtaccagcagaagcctgaccagagcccacagctgctgatcttcggcgcctccaatagatctaccggcgtgcccgataggtttaccggctccggctctgccacagacttcacactgaccatcacaagcgtgcagtccgaggatctggcagcataccactgcggacagacctactcctatccttttaccttcggctctggcacaaacctggagatcaagcggagcgaccccaccacaaccccagccccaaggccacctacccctgccccaacaatcgcctctcagcctctgagcctgagaccagaggcctgtaggccagccgcagggggggcagtgcacacccgcggcctggacttcgcctgcgatatctacatctgggcacccctggccggaacctgtggcgtgctgctgctgagcctggtcatcaccctgtattgcaaccaccggaataggcgccgggtgtgcaagtgtccaagacctgtggtgggctctggagagggaaggggcagcctgctgacttgcggcgatgtggaagaaaacccaggaccaatgaggccacggagcgacgccgcccctgatccagaggcaccaaggccacccgcccctccaggcagagcctgcagcccactgccttgggcactgtccgccgcaatgctgctgctggtgggcacctgcgccgcctgtgccctgcgcgcctgggtggtgccaggaccaaggccccctgccctgcccgccctgcctgccccactgcccgatgccggcgccaggctgccagacagcccacaggccgtgttcgcacagctggtggccagagatgtgcagctgaaggagggaccactgaggtggtacagcgaccccggcctggccggcgtgtttctgggacccggcctgtcctatgaccagcacacaagagagctgatggtggtggagcctggcctgtactacgtgttcctgcacctgaagctgcagagagtgatgtcctctaccggcagcggctccgtgtctgccgccctgcacctgcagccactgggaaccgaggcagccgccctggacctgacactggatctgccaccccctagctccgaggccagagattctgccgcaggctttaggggcagcctgctgcacctggacgcaggacagagactgagggtgcacctgagggcagaggcaggagcacaccctgcatggcagctggcccagggagcaacaatcctgggactgttccgggtggcaaccaaggtgccaacaggactgccttctagctggccaatggataccggaccaggctccccaccactggacggagagggctccggcgagggcagaggctctctgctgacctgcggcgacgtggaggagaaccctggaccagagacagacacactcctgctatgggtactgctgctctgggttccaggttccactggtgacgcaccccctccatgccgctgtatgacaagcagcagcccctaccaagagttcctgtggcgaatgcagaggcccggcaacattgacgcccctagctacagaagcctgagcaagggcacccctaccttcacagcccacacacacatgccccggaactgctaccatagcgccacactgtgtatgcacgccaacacacactactggaccggcaagatgattaaccctagctgccctggcggcctgggcgtgacagtttgttggacctactttacccagaccggcatgtccgatggtggcggagttcaagaccaggccagagaaaagcacgtgaaagaagtgatctcccagctgaccagagtgcacggcacaagcagcccttacaaaggactggacctgtccaagctgcacgagacactgagaacccacacacggctggtgtccctgttcaacaccacactgaccggactgcacgaggtgtccgctcagaatcctaccaactgctggatctgcctgcctctgaacttcagaccctacgtgtcaatccccgtgcctgagcagtggaacaacttcagcaccgagatcaataccaccagcgtgctcgtgggacccctggtgtccaatctggaaatcacccacaccagcaacctgacctgcgtgaagttctccaacaccacctacaccaccaacagccagtgcatcagatgggtcacccctccaacacagatcgtgtgtctgcccagcggcatcttcttcgtgtgtggcacaagcgcctaccgctgcctgaatggcagcagcgagtctatgtgcttcctgagcttcctggtgcctcctatgaccatctacaccgagcaggacctgtacagctacgtgatctccaagcctcggaacaagcgggtgcccatcctgccttttgtgattggagctggcgtgctgggagccctcggaactggaatcggaggcatcaccacctctactcagttctactacaaactatctcaagaactaaatggggacatggaaagagtggccgacagcctggtcacactccaggaccagctcaattctctggctgccgtggtgctccagaatcggagagcactcgatctgctgacagccgagagaggcggcacctgtctgtttctgggcgaagagtgctgctactacgtgaaccagtccggaatcgtcactgagaaagttaaagaaattcgagatcgaatccagcggagagccgaggaactgagaaacacaggaccttggggcctgctgagccagtggatgccttggattctgcccttcctgggacctctggccgccatcattctgctgctgctgttcggcccctgtatctttaacctccttgttaactttgtctcttccagaatcgaagctgtaaaataa

SEQ ID NO: 283 - DNA, 4527 bp, synthetic construct
  source 1..4527: mol_type = other DNA
atggacccccagtgcaccatgggcctgtctaatatcctgtttgtgatggccttcctgctgagcggagcagcaccactgaagatccaggcctactttaacgagacagccgacctgccctgtcagttcgccaactcccagaatcagtctctgagcgagctggtggtgttctggcaggatcaggagaacctggtgctgaatgaggtgtacctgggcaaggagaagtttgacagcgtgcactccaagtatatgggccggaccagcttcgactccgattcttggaccctgaggctgcacaatctgcagatcaaggataagggcctgtaccagtgcatcatccaccacaagaagcctaccggcatgatcagaatccaccagatgaacagcgagctgagcgtgctggccaacttttcccagcctgagatcgtgccaatctctaacatcacagagaacgtgtacatcaacctgacctgtagctccatccacggctatccagagcccaagaagatgagcgtgctgctgaggacaaagaacagcaccatcgagtacgacggcatcatgcagaagtcccaggataacgtgaccgagctgtatgacgtgagcatctccctgtctgtgagctttccagatgtgacatccaacatgaccatcttctgcatcctggagacagacaagacccgcctgctgtctagcccattttctatcgagctggaggacccccagccacctccagatcacatcccttggatcacagccgtgctgccaaccgtgatcatctgcgtgatggtgttctgtctgatcctgtggaagtggaagaagaagaagcggcctcgcaattcctacaagtgtggcacaaacaccatggagcgggaggagtctgagcagaccaagaagagagagaagatccacatcccagagcggagcgatgaggcccagagagtgtttaagtcctctaagacaagctcctgcgacaagtccgatacctgtttcggctctggagagggaaggggcagcctgctgacctgcggcgacgtggaggagaatcctggaccagccctgccagtgacagccctgctgctgcctctggccctgctgctgcacgccgcccgccctcaggtgcagctgctggagtccggagcagagctggcccggccaggagcctctgtgaagatgagctgtaaggcctccggctacaccttcaccaggtataccatgcactgggtgaagcagaggccaggacagggactggagtggatcggctacatcaaccccagccgcggctacacaaactataatcagaagttcaaggataaggccacactgaccacagacaagtctagctccaccgcctacatgcagctgtctagcctgacatccgaggattctgccgtgtactattgcgccggctactatgacgatcactactgtctggactattggggccagggcacactggtgaccgtgtcctctggaggaggaggctccggcggaggaggctctggcggcggcggcagcgatatcgtgatgacccagtccccagccatcatgtccgcctctccaggagagaaggtgacaatgacctgctccgccagctccagcgtgagctacatgaattggtatcagcagaagagcggcacctcccccaagagatggatctacgacacatctaagctggccagcggagtgcctgcacacttcaggggcagcggctccggcacatcttatagcctgaccatcagcggaatggaggcagaggatgcagcaacctactattgccagcagtggagctccaaccccttcaccttcggcagcggcaccaagctggagatcaagcgcgacccctctaccacaacccccgcccctaggccacctacaccagccccaaccatcgcctcccagccactgtctctgaggcccgaggcctgtcgccctgccgcagggggggcagtgcacaccaggggactggactttgcctgcgatatctacatctgggcacctctggccggaacctgtggcgtgctgctgctgagcctggtcatcaccctgtattgcaagcggggcagaaagaagggcagcggagagggaaggggctccctgctgacctgtggcgacgtggaggagaaccctggcccaatggagtacgcctctgacgccagcctggaccccgaggccccatggccacccgccccaagggcaagggcctgccgggtgctgccttgggccctggtggccggcctgttattactgctgctgctggccgccgcctgcgccgtgttcctggcctgtccctgggccgtgtccggcgccagagcctccccaggctctgccgccagcccaaggctgagagagggacctgagctgagcccagacgatcctgccggcctgctggatctgaggcagggaatgtttgcccagctggtggcccagaatgtgctgctgatcgatggccctctgtcctggtactctgacccaggcctggccggcgtgtctctgaccggaggactgagctataaggaggacacaaaggagctggtggtggccaaggccggcgtgtactacgtgttcttccagctggagctgaggagagtggtggccggcgagggctccggctctgtgagcctggccctgcacctgcagccactgcggagcgccgccggggccgccgccctggccctgaccgtggatctgcctccagcctctagcgaggcacggaacagcgcctttggcttccagggcagactgctgcacctgtccgccggacagaggctgggagtgcacctgcacaccgaggcaagggcccgccacgcatggcagctgacacagggagcaaccgtgctgggcctgttcagagtgacaccagagatccctgccggcctgccaagccctaggtccgagggctctggcgaaggcagaggctccctgctgacttgtggcgacgtggaagaaaatccaggccccgagacagacacactcctgctatgggtactgctgctctgggttccaggttccactggtgacgcaccccctccatgccgctgtatgacaagcagcagcccctaccaagagttcctgtggcgaatgcagaggcccggcaacattgacgcccctagctacagaagcctgagcaagggcacccctaccttcacagcccacacacacatgccccggaactgctaccatagcgccacactgtgtatgcacgccaacacacactactggaccggcaagatgattaaccctagctgccctggcggcctgggcgtgacagtttgttggacctactttacccagaccggcatgtccgatggtggcggagttcaagaccaggccagagaaaagcacgtgaaagaagtgatctcccagctgaccagagtgcacggcacaagcagcccttacaaaggactggacctgtccaagctgcacgagacactgagaacccacacacggctggtgtccctgttcaacaccacactgaccggactgcacgaggtgtccgctcagaatcctaccaactgctggatctgcctgcctctgaacttcagaccctacgtgtcaatccccgtgcctgagcagtggaacaacttcagcaccgagatcaataccaccagcgtgctcgtgggacccctggtgtccaatctggaaatcacccacaccagcaacctgacctgcgtgaagttctccaacaccacctacaccaccaacagccagtgcatcagatgggtcacccctccaacacagatcgtgtgtctgcccagcggcatcttcttcgtgtgtggcacaagcgcctaccgctgcctgaatggcagcagcgagtctatgtgcttcctgagcttcctggtgcctcctatgaccatctacaccgagcaggacctgtacagctacgtgatctccaagcctcggaacaagcgggtgcccatcctgccttttgtgattggagctggcgtgctgggagccctcggaactggaatcggaggcatcaccacctctactcagttctactacaaactatctcaagaactaaatggggacatggaaagagtggccgacagcctggtcacactccaggaccagctcaattctctggctgccgtggtgctccagaatcggagagcactcgatctgctgacagccgagagaggcggcacctgtctgtttctgggcgaagagtgctgctactacgtgaaccagtccggaatcgtcactgagaaagttaaagaaattcgagatcgaatccagcggagagccgaggaactgagaaacacaggaccttggggcctgctgagccagtggatgccttggattctgcccttcctgggacctctggccgccatcattctgctgctgctgttcggcccctgtatctttaacctccttgttaactttgtctcttccagaatcgaagctgtaaaactacaaatggagcccaagatgcagtccaagactaagatctaccgcagacccctggaccggcctgccagcccacgatctgatgttaatgacatcaaaggcacccctcctgaggaaatctca

SEQ ID NO: 284 - DNA, 42 bp, synthetic construct
  source 1..42: mol_type = other DNA
gggggggggggggggggggggggggggggggggggggggggg

SEQ ID NO: 285 - DNA, 42 bp, synthetic construct; identical to SEQ ID NO: 284
  source 1..42: mol_type = other DNA

SEQ ID NO: 286 - DNA, 42 bp, synthetic construct; identical to SEQ ID NO: 284
  source 1..42: mol_type = other DNA

SEQ ID NO: 287 - DNA, 42 bp, synthetic construct; identical to SEQ ID NO: 284
  source 1..42: mol_type = other DNA

SEQ ID NO: 288 - DNA, 42 bp, synthetic construct; identical to SEQ ID NO: 284
  source 1..42: mol_type = other DNA

SEQ ID NO: 289 - DNA, 42 bp, synthetic construct; identical to SEQ ID NO: 284
  source 1..42: mol_type = other DNA

SEQ ID NO: 290 - DNA, 42 bp, synthetic construct; identical to SEQ ID NO: 284
  source 1..42: mol_type = other DNA

SEQ ID NO: 291 - DNA, 42 bp, synthetic construct; identical to SEQ ID NO: 284
  source 1..42: mol_type = other DNA

SEQ ID NO: 292 - DNA, 42 bp, synthetic construct; identical to SEQ ID NO: 284
  source 1..42: mol_type = other DNA

SEQ ID NO: 293 - DNA, 42 bp, synthetic construct; identical to SEQ ID NO: 284
  source 1..42: mol_type = other DNA

SEQ ID NO: 294 - DNA, 42 bp, synthetic construct; identical to SEQ ID NO: 284
  source 1..42: mol_type = other DNA

SEQ ID NO: 295 - DNA, 42 bp, synthetic construct; identical to SEQ ID NO: 284
  source 1..42: mol_type = other DNA

SEQ ID NO: 296 - DNA, 42 bp, synthetic construct; identical to SEQ ID NO: 284
  source 1..42: mol_type = other DNA

SEQ ID NO: 297 - DNA, 42 bp, synthetic construct; identical to SEQ ID NO: 284
  source 1..42: mol_type = other DNA

SEQ ID NO: 298 - DNA, 42 bp, synthetic construct; identical to SEQ ID NO: 284
  source 1..42: mol_type = other DNA

SEQ ID NO: 299 - DNA, 42 bp, synthetic construct; identical to SEQ ID NO: 284
  source 1..42: mol_type = other DNA

SEQ ID NO: 300 - DNA, 42 bp, synthetic construct; identical to SEQ ID NO: 284
  source 1..42: mol_type = other DNA

SEQ ID NO: 301 - DNA, 63 bp, synthetic construct
  source 1..63: mol_type = other DNA
atggccttaccagtgaccgccttgctcctgccgctggccttgctgctccacgccgccaggccg

SEQ ID NO: 302 - DNA, 57 bp, synthetic construct
  source 1..57: mol_type = other DNA
atggattggatatggaggatactttttctcgtgggggcagcaaccggggctcattcc

SEQ ID NO: 303 - DNA, 60 bp, synthetic construct
  source 1..60: mol_type = other DNA
atgccacctcctcgcctcctcttcttcctcctcttcctcacccccatggaagtcaggccc

SEQ ID NO: 304 - DNA, 31 bp, synthetic construct
  source 1..31: mol_type = other DNA
ggggggggggggggggggggggggggggggg

SEQ ID NO: 305 - DNA, 342 bp, synthetic construct
  source 1..342: mol_type = other DNA
caagaagtgacacagatccctgccgctctgtctgtgcctgagggcgaaaacctggtgctgaactgctccttcaccgacagcgccatctacaacctccagtggttcaggcaggaccctggaaagggactgacaagcctgctgctgatccagagcagccagagagagcagacctccggcagactgaatgccagcctggataagagcagcggcaggtctaccctgtatatcgccgcttctcagcctggcgatagcgccacatatctgtgtgctgtgcggcctacaagcggcggcagctacatccctacatttggcagaggcaccagcctgatcgtgcacccttat

SEQ ID NO: 306 - DNA, 327 bp, synthetic construct
  source 1..327: mol_type = other DNA
caacaaggcgaagaagatccccaggctctgagcatccaagagggcgagaatgccaccatgaactgctcctacaagaccagcatcaacaacctccagtggtacaggcagaacagcggcagaggactggtgcacctgatcctgatccggtccaacgagagagagaagcactccggcagactgagagtgaccctggacaccagcaagaagtccagcagcctgctgattaccgccagcagagccgccgatacagccagctacttttgtgccaccgacggcgatacccctctggtgtttggcaagggcacaagactgagcgtgatcgccaat

SEQ ID NO: 307 - DNA, 351 bp, synthetic construct
  source 1..351: mol_type = other DNA
gctcagaaagtgacacaggcccagaccgagatcagcgtggtggaaaaagaagatgtgaccctggactgcgtgtacgagacaagggacaccgcctactacctgttctggtacaagcagcctcctagcggcgagctggtgttcctgattagacagccttggtggggcagcagcagaggcatcagcggcagatacagctggaacttccagaagtccaccagcagcttcaacttcaccatcaccgccagccaggtggtggatagcgccgtgtacttttgtgccatgagcgtgcccgatagcagaggccactaccagttcaccttcggcaagggcacaaagctgagcgtgatccct

SEQ ID NO: 308 - DNA, 330 bp, synthetic construct
  source 1..330: mol_type = other DNA
gaaaatgtggaacagcaccccagcacactgagcgtgcaagagggcgatagcgccgtgattaagtgcacctacagcgacagcgccagcaactacttcccctggtacaagcaagagctgggcaaaagaccccagctcatcatcgacatccggtccaacgtgggcgagaagaaggaccagagaatcgccgtgacactgaacaagaccgccaagcacttcagcctgcacatcaccgagacacagcctgaggattccgccgtgtacttttgtgccgccaccgaggactaccagctgatttggggagccggcaccaagctgattatcaagcctgac

SEQ ID NO: 309 - DNA, 345 bp, synthetic construct
  source 1..345: mol_type = other DNA
cagagaaaagaggtggaacaggaccctggacctttcaacgttccagagggcgctaccgtggccttcaactgcacctacagcaatagcgccagccagagcttcttctggtatcggcaggactgccggaaagaacccaagctgctgatgagcgtgtacagcagcggcaacgaggacggcagattcacagcccagctgaacagagccagccagtacatctctctgctgatccgggacagcaagctgagcgatagcgccacctatctgtgcgtggtcaagcctgatcctggcgctggaagctaccagctgacatttggcaagggcaccaagctgtctgtgatccccaat

SEQ ID NO: 310 - DNA, 345 bp, synthetic construct
  source 1..345: mol_type = other DNA
aagaaccaggtggaacagagccctcagagcctgattatcctggaaggcaagaactgcaccctccagtgcaactacaccgtgtctcccttcagcaacctgcggtggtacaagcaggatacaggcagaggccctgtgtctctgaccatcctgaccttcagcgagaacaccaagagcaacggcagatacaccgccacactggacgccgatacaaagcagagcagcctgcacatcacagccagccagctgagcgatagcgccagctacatctgtgtggtgtctggcggcacagacagctggggcaaactccagtttggagctggcacacaggtggtggtcacccctgat

SEQ ID NO: 311 - DNA, 342 bp, synthetic construct
  source 1..342: mol_type = other DNA
gaggatcaagtgacccagtctcctgaggctctgaggctgcaagagggcgagagcagctctctgaactgctcctacacagtgtctggcctgaggggcctgttttggtataggcaagaccctggcaagggacccgagttcctgttcacactgtactctgccggcgaggaaaaagagaaagaacgcctgaaggccacgctgaccaagaaagagagcttcctgcacatcacagcccctaagcctgaggacagcgccacctatctgtgtgccgtgcaggccaatagaggcagcacactggggagactgtacttcggcagaggcacccagctgaccgtttggcctgat

SEQ ID NO: 312 - DNA, 339 bp, synthetic construct
  source 1..339: mol_type = other DNA
aagcaagaagtgacccagattcctgccgctctgtctgtgcctgagggcgagaatctggtgctgaactgctccttcaccgacagcgccatctacaacctccagtggttcaggcaggaccctggcaagggactgacaagcctgctgctgattcagagcagccagagagagcagaccagcggcagactgaatgccagcctggataagtccagcggaagaagcaccctgtatatcgccgcttctcagcctggcgatagcgccacatatctgtgtgccgtgcgggaaacaagcggctccaggctgacttttggcgagggcacacagctgaccgtgaatcccgat

SEQ ID NO: 313 - DNA, 327 bp, synthetic construct
  source 1..327: mol_type = other DNA
cagaatatcgaccagcctacagagatgaccgccaccgaaggcgctatcgtgcagatcaactgcacctaccagaccagcggcttcaacggcctgttctggtatcaacagcacgccggcgaggcccctaccttcctgtcttacaatgtgctggacggcctggaagagaagggcagattcagcagcttcctgagcagaagcaagggctacagctacctgctgctgaaagaactccagatgaaggacagcgcctcctacctgtgcgcttccgtggacggcaacaacagactggccttcggcaagggcaatcaggtggtcgtgatccccaac

SEQ ID NO: 314 - DNA, 31 bp, synthetic construct; identical to SEQ ID NO: 304
  source 1..31: mol_type = other DNA

SEQ ID NO: 315 - DNA, 31 bp, synthetic construct; identical to SEQ ID NO: 304
  source 1..31: mol_type = other DNA

SEQ ID NO: 316 - DNA, 31 bp, synthetic construct; identical to SEQ ID NO: 304
  source 1..31: mol_type = other DNA

SEQ ID NO: 317 - DNA, 31 bp, synthetic construct; identical to SEQ ID NO: 304
  source 1..31: mol_type = other DNA

SEQ ID NO: 318 - DNA, 31 bp, synthetic construct; identical to SEQ ID NO: 304
  source 1..31: mol_type = other DNA

SEQ ID NO: 319 - DNA, 31 bp, synthetic construct; identical to SEQ ID NO: 304
  source 1..31: mol_type = other DNA

SEQ ID NO: 320 - DNA, 31 bp, synthetic construct; identical to SEQ ID NO: 304
  source 1..31: mol_type = other DNA

SEQ ID NO: 321 - DNA, 31 bp, synthetic construct; identical to SEQ ID NO: 304
  source 1..31: mol_type = other DNA

SEQ ID NO: 322 - DNA, 336 bp, synthetic construct
  source 1..336: mol_type = other DNA
aatgctggcgtgacccagacacctaagttccaggtgctgaaaaccggccagagcatgaccctgcaatgcgcccaggacatgaaccatgagtacatgagctggtacagacaggaccccggcatgggcctgagactgatccactactctgtggctatccagaccaccgaccagggcgaagtgcccaatggctacaacgtgtccagaagcaccatcgaggacttcccactgagactgctgtctgccgctcctagccagaccagcgtgtacttttgtgccagcagctacctgggcaacaccggcgagctgttttttggcgagggcagcagactgaccgtg

SEQ ID NO: 323 - DNA, 333 bp, synthetic construct
  source 1..333: mol_type = other DNA
gatggcggcattacacagagccccaagtacctgttcagaaaagagggccagaacgtcaccctgagctgcgagcagaacctgaaccacgacgccatgtactggtacagacaggacccaggccagggcctgagactgatctactactcttgggctcagggcgacttccagaagggcgatattgccgagggctacagcgtgtccagagagaagaaagagtcctttccactgaccgtgacaagcgcccagaagaaccctaccgccttctacctgtgtgccagctcttggggagccccttacgagcagtatttcggccctggcaccagactgacagtt

SEQ ID NO: 324 - DNA, 345 bp, synthetic construct
  source 1..345: mol_type = other DNA
aatgctggcgtgacccagacacctaagttccgggtgctgaaaaccggccagagcatgacactgctgtgcgcccaggacatgaaccatgagtacatgtattggtacagacaggaccccggcatgggcctgagactgatccactattctggctggggcaaagacaccgccaagggcgaagttcccgatggctacaacgtgtcccggctgaagaagcagaacttcctgctgggcctcgaaagcgccgctccatctcagaccagcgtgtacttctgcgccagcaaagttggcccaggccagcacaatagccctctgcactttggcaacggcaccagactgacagtgaca

SEQ ID NO: 325 - DNA, 330 bp, synthetic construct
  source 1..330: mol_type = other DNA
ggcattacacagagccccaagtacctgttcagaaaagagggccagaacgtcaccctgagctgcgagcagaacctgaaccacgacgccatgtactggtacagacaggacccaggccagggcctgagactgatctactacagccagatcgtgaacgacttccagaagggcgacattgccgagggctacagcgtgtccagagagaagaaagagtcctttccactgaccgtgacaagcgcccagaagaaccctaccgccttctacctgtgtgccagctctcctggcgctctgtacgagcagtatttcggccctggcaccagactgacagttaca

SEQ ID NO: 326 - DNA, 333 bp, synthetic construct
  source 1..333: mol_type = other DNA
ggcgttacccagacacctaagttccgggtgctgaaaaccggccagagcatgacactgctgtgcgcccaggacatgaaccacgagtacatgtattggtacagacaggaccccggcatgggcctgagactgatccactattctgtcggcgagggcaccacagccaaaggcgaagttcctgacggctacaacgtgtcccggctgaagaagcagaacttcctgctgggcctcgaaagcgccgctccatctcagaccagcgtgtacttctgtgccagccggggctaccacagactgaacaacgagcagttcttcggccctggcaccagactgacagtt

SEQ ID NO: 327 - DNA, 330 bp, synthetic construct
  source 1..330: mol_type = other DNA
gacgtgacccagacacctcggaacagaatcaccaagaccggcaagcggatcatgctggaatgcagccagaccaagggccacgaccggatgtactggtacagacaggaccctggcctgggcctgagactgatctactacagcttcgacgtgaaggacatcaacaagggcgagatcagcgacggctacagcgtgtcaagacaggctcaggccaagttcagcctgtctctggaaagcgccattcctaaccagacagccctgtacttctgtgccacaagcggccagggcgcttacgaggaacagttctttggccctggcaccagactgacagtt

SEQ ID NO: 328 - DNA, 327 bp, synthetic construct
  source 1..327: mol_type = other DNA
agcagatacctggtcaagcggaccggcgagaaggtgttcctggaatgcgtgcaggacatggaccacgaaaacatgttctggtacagacaggaccccggcctgggcctgagactgatctacttcagctacgacgtgaagatgaaggaaaagggcgacatccccgagggctacagcgtgtccagagagaagaaagagcggttcagcctgatcctggaaagcgccagcaccaaccagaccagcatgtacctgtgtgccagcagcctgtggggcagactggctaagaacatccagtatttcggagccggcaccagactgtctgttctcgag

SEQ ID NO: 329 - DNA, 318 bp, synthetic construct
  source 1..318: mol_type = other DNA
agcagatacctggtcaagcggaccggcgagaaggtgttcctggaatgcgtgcaggacatggaccacgaaaacatgttctggtacagacaggaccccggcctgggcctgagactgatctacttcagctacgacgtgaagatgaaggaaaagggcgacatccccgagggctacagcgtgtccagagagaagaaagagcggttcagcctgatcctggaaagcgccagcaccaaccagaccagcatgtacctgtgcgccagcagcttttggggcagaagcaccgacacacagtatttcggccctggcaccagactgacagtt

SEQ ID NO: 330 - DNA, 339 bp, synthetic construct
  source 1..339: mol_type = other DNA
ggcgtgacacagtctcccacacacctgattaagaccagaggccagcaagtgaccctgcggtgtagccctaagagcggccacgataccgtgtcctggtatcagcaggctctcggacagggaccccagttcatcttccagtattacgaggaagaggaacggcagcggggcaacttccccgatagattttccggccatcagttccccaactacagctccgagctgaacgtgaacgctctgctgctgggagatagcgccctgtacctgtgtgcctctagccttggctggcgcggaggcagatacaacgagcagttctttggccctggcaccagactgacagtg

SEQ ID NO: 331 - DNA, 31 bp, synthetic construct; identical to SEQ ID NO: 304
  source 1..31: mol_type = other DNA

SEQ ID NO: 332 - DNA, 31 bp, synthetic construct; identical to SEQ ID NO: 304
  source 1..31: mol_type = other DNA

SEQ ID NO: 333 - DNA, 31 bp, synthetic construct; identical to SEQ ID NO: 304
  source 1..31: mol_type = other DNA

SEQ ID NO: 334 - DNA, 31 bp, synthetic construct; identical to SEQ ID NO: 304
  source 1..31: mol_type = other DNA

SEQ ID NO: 335 - DNA, 31 bp, synthetic construct; identical to SEQ ID NO: 304
  source 1..31: mol_type = other DNA

SEQ ID NO: 336 - DNA, 31 bp, synthetic construct; identical to SEQ ID NO: 304
  source 1..31: mol_type = other DNA

SEQ ID NO: 337 - DNA, 31 bp, synthetic construct; identical to SEQ ID NO: 304
  source 1..31: mol_type = other DNA

SEQ ID NO: 338 - DNA, 31 bp, synthetic construct; identical to SEQ ID NO: 304
  source 1..31: mol_type = other DNA

SEQ ID NO: 339 - DNA, 324 bp, synthetic construct
  source 1..324: mol_type = other DNA
gacatccagatgacacagagccctagcagcctgtctgccagcgtgggagacagagtgaccatcacatgcaaggccagcgaccacatcaacaactggctggcctggtatcagcagaagcctggacaggcccctaagctgctgatctacggcgctaccacactggaaacaggcgtgcccagcagattttctggcagcggctctggcaccgactacaccctgacaatatccagcctccagcctgaggacttcgccacctactactgtcagcagagctggaacaccccttggacattcggccagggcaccaagctggaaatcaagaga

SEQ ID NO: 340 - DNA, 333 bp, synthetic construct
  source 1..333: mol_type = other DNA
gacattgtgctgacacagtctcccgccagcctggccgtttctctgggacagagagccaccatcagctgtagagccagcaagagcgtgtccaccagcggctactcttacctgcactggtatcagcagaagcccggccagcctcctaagctgctgatctacctggcctccaacctggaaagcggagtgcctgccagattttctggctctggcagcggcaccgacttcaccctgaatatccatcctgtggaagaagaggacgccgccacctactactgccagcacagtagagagctgcccttcacatttggctccggcaccaagctggaaatcaag

SEQ ID NO: 341 - DNA, 321 bp, synthetic construct
  source 1..321: mol_type = other DNA
gatattcagatgacacagagccccagcagcctgtctgcctctgtgggagacagagtgaccatcacctgtcgggcctctcagaatgtgggaacagccgtggcttggtttcagcagaagcctggcaaggcccctaagatcctgatctacagcgccagcaacagatacaccggcgtgccaagtagaagcacaggctctggcagcggcaccgatttcaccctgacaatatccagcctccagcctgaggacttcgccacctactactgccagcagtacagcacataccctctgaccttcggccaggggaccaagctggaaatcaag

SEQ ID NO: 342 - DNA, 321 bp, synthetic construct
  source 1..321: mol_type = other DNA
gacatcgtgctgacccagagccagaaattcatgagcaccagcgtgggcgacagagtgtccatcatctgtagagccagccagtctgtgggaacagccgtggcttggtatcagctgaaggccggacagagccccaagctgctgatctacagcgccagcaacagattcaccggcgtgcccgatagattcacaggcagcggctctggcaccgacttcaccctgacaatcagcaacgtgcagagcgaggacctggccgactacttctgtcagcagtacagcacataccctctggcctttggcgctggcaccaagctggaacttaaa

SEQ ID NO: 343 - DNA, 339 bp, synthetic construct
  source 1..339: mol_type = other DNA
cagcctgttctgacacagcctccatctgcctctggcacacctggacagagagtgaccatcagctgtagcggcagcagcagcaacatcggcaacaacttcgtgtcctggtatcagcagctgcccggcacagctcccaaactgctgatctaccggaacaaccagaggccaagcggcgtgcccgatagattttctggcagcaagacaggcaccagcgccagcctggctatctctggactgagaagcgaggacgaggccgactactattgtgccgcctgggacgattctgtgcggggacctgtttttggcggcggaacagaactgacagtgctggcagcagct

SEQ ID NO: 344 - DNA, 333 bp, synthetic construct
  source 1..333: mol_type = other DNA
cagcctgtgctgacacagtctagtagcgcctctgcctctctgggcagcagcgtgaagctgacctgtacactgtctagcggccacagcagctacatcattgcctggcatcagcagcagcctggcaaggcccctagatacctgatgaaggtggaaggcagcggcagctacaacaaaggctctggcatccccgagagattcagcggcagttctagcggagccgaccgctacctgaccatcagcaatctccagagcgaggacgaggccgactactactgcgagacatgggacagcaacacccacgtgttcggcaccggcaccaaagtgacagttctt

SEQ ID NO: 345 - DNA, 333 bp, synthetic construct; identical to SEQ ID NO: 344
  source 1..333: mol_type = other DNA

SEQ ID NO: 346 - DNA, 339 bp, synthetic construct
  source 1..339: mol_type = other DNA
gacatcgtgatgacacagagccctagcagcctgacagtgacagccggcgagaaagtgaccatgagctgcaagagcagccagagcctgctgaacagcggcaaccagaagaactacctgacctggtatcagcagaagcccggccagcctcctaagctgctgatctactgggccagcaccagagaaagcggcgtgcccgatagattcacaggcagcggcagcggaaccgacttcaccctgacaatcagctctgtgcaggccgaggatctggccgtgtactactgccagaacgactacagctaccctctgacctttggagccggcaccaagctggaacttaaa

SEQ ID NO: 347 - DNA, 342 bp, synthetic construct
  source 1..342: mol_type = other DNA
gacatcgtgatgacacagagccctgatagcctggccgtgtctctgggagagagagccacaatcaactgcgagagcagccagagcctgctgaacagcggcaaccagaagaactacctgacctggtatcagcagaagcccggccagcctcctaagcctctgatctactgggccagcaccagagaaagcggcgtgcccgatagattttctggctctggcagcggcaccgacttcaccctgacaatttctagcctgcaagccgaggacgtggccgtgtactactgccagaacgactacagctacccctacctgttcggccagggcaccaagctggaaatcaaaaga

SEQ ID NO: 348 - DNA, 324 bp, synthetic construct
  source 1..324: mol_type = other DNA
gacatcgtgatgacccagagccctgccaccctgtccgtgtctccaggcgaaagagccaccctgagctgcagagcttcccagagcgtgtccaacgacgtcgtgtggtatcagcagaagcccggccaggcccccagactgctgatctactacgccagcaacagatacaccggcatccccgccagattcagcggctctggcagcggcaccgagttcaccctgacaatcagcagcctccagagcgaggacttcgccgtgtactactgtcagcaggactacaccagcccctggaccttcggccagggcaccaagctggaaatcaagaga

SEQ ID NO: 349 - DNA, 324 bp, synthetic construct
  source 1..324: mol_type = other DNA
gacatccagatgacacagagccctagcagcctgtctgccagcgtgggagacagagtgaccatcacctgtagagccagccaggatgtgtctacagccgtggcctggtatcagcagaagcctggaaaggcccctaagctgctgatctacagcgccagctttctgtactccggcgtgcccagcagattcagcggaagcagaagcggcaccgacttcaccctgacaatatccagcctccagcctgaggacttcgccacctactactgccagcagtacctgtaccagccttggacattcggccagggcaccaaggtggaaatcaagaga

SEQ ID NO: 350 - DNA, 339 bp, synthetic construct
  source 1..339: mol_type = other DNA
gatattgtgatgacacagagccccgacagcctggccgtgtctcttggagaaagagccaccatcaactgcaagagcagccagagcctgctgtactccagcaacagcaagaactacctggcctggtatcagcagaagcccggccagcctcctaagctgctgatctactgggccagcaccagagaaagcggcgtgcccgatagattttctggctctggcagcggcaccgacttcaccctgacaatttctagcctgcaagccgaggacgtggccgtgtattactgccagcagccttacagctaccctctgagctttggagccggcaccaagctggaactgaaa

SEQ ID NO: 351 - DNA, 324 bp, synthetic construct
  source 1..324: mol_type = other DNA
gacatccagatgacacagagccctagcagcctgtctgccagcgtgggagacagagtgaccatcacctgtagagccagccaggacatcagcaactacctgaactggtatcagcagaagcccggcaaggcccctaagctgctgatctactacaccagcagactgcacagcggcgtgcccagcagattttctggctctggcagcggcaccgacttcaccctgacaatatctagcctccagcctgaggacttcgccacctactattgccagcagggcaacaccctgccttacacatttggacagggcaccaaggtggaaatcaagaga

SEQ ID NO: 352 - DNA, 324 bp, synthetic construct
  source 1..324: mol_type = other DNA
gacatccagatgacacagagccctagcagcctgtctgccagcgtgggagacagagtgaccatcacatgcaaggccagccaggatgtgggcacagccgtggattggtatcagcagaagcctggcaaggcccctaagctgctgatctactgggccagcacaagacacacaggcgtgcccagcagattttctggcagcggctctggcaccgacttcaccctgacaatatccagcctccagcctgaggacttcgccacctactactgccagcagtacaacagctaccctctgaccttcggccagggcaccaaggtggaaatcaaaaga

SEQ ID NO: 353 - DNA, 327 bp, synthetic construct
  source 1..327: mol_type = other DNA
gacatccagatgacacagagccctagcagcctgtctgccagcgtgggagacagagtgaccatcacctgtagagccagccaggacgtgaacacagccgtggcttggtatcagcagaagcctggcaaggcccctaagctgctgatctacagcgccagctttctgtacagcggcgtgcccagcagattcagcggaagcagaagcggcaccgacttcaccctgacaatatccagcctccagcctgaggacttcgccacctactactgccagcaggcttacaccacacctccaacattcggccagggcaccaaggtggaaatcaagagaaca

SEQ ID NO: 354 - DNA, 324 bp, synthetic construct
  source 1..324: mol_type = other DNA
agctacgtgctgacacagcctccatccgtgtctgtggctccaggacagaccgccagaatcacatgcggcggcaacaacatcggcggcaagagcgtgcactggtatcagcagccacctggacaggctccagtggtggtggtgtacgacgacagcgatagacctagcggcatccccgagagattcagcggcagcaattccggcaataccgccacactgaccatcagcagagtggaagctggcgacgaggccgtgtactactgccaagtgtgggacagcagcagcgatcacgtggtgtttggcggcggaacaaagctgacagtgctt

SEQ ID NO: 355 - DNA, 31 bp, synthetic construct; identical to SEQ ID NO: 304
  source 1..31: mol_type = other DNA

SEQ ID NO: 356 - DNA, 31 bp, synthetic construct; identical to SEQ ID NO: 304
  source 1..31: mol_type = other DNA

SEQ ID NO: 357 - DNA, 31 bp, synthetic construct; identical to SEQ ID NO: 304
  source 1..31: mol_type = other DNA

SEQ ID NO: 358 - DNA, 31 bp, synthetic construct; identical to SEQ ID NO: 304
  source 1..31: mol_type = other DNA

SEQ ID NO: 359 - DNA, 31 bp, synthetic construct; identical to SEQ ID NO: 304
  source 1..31: mol_type = other DNA

SEQ ID NO: 360 - DNA, 31 bp, synthetic construct; identical to SEQ ID NO: 304
  source 1..31: mol_type = other DNA

SEQ ID NO: 361 - DNA, 31 bp, synthetic construct; identical to SEQ ID NO: 304
  source 1..31: mol_type = other DNA

SEQ ID NO: 362 - DNA, 31 bp, synthetic construct; identical to SEQ ID NO: 304
  source 1..31: mol_type = other DNA

SEQ ID NO: 363 - DNA, 363 bp, synthetic construct
  source 1..363: mol_type = other DNA
caagttcagcttcaacagcctggcgctgagctggtcaaacctggcgcttctgtgaagatgagctgcaaagccagcggctacgccttcagcagctactggatcaactggatgaagcagaaacccggccagggactcgaatggatcggccaaatctatcccggcgacggcgacaccaactacaacggcaagttcaagggcagagccacactgaccgccgatacctctagcagcacagcctacatgcagctgagcagcctgaccagcgaagatagcgccgtgtacttctgtgcccggtccatcacaacagtcgtgggctgcgctatggactattggggccagggaacaagcgtgaccgtgtctagt

SEQ ID NO: 364 - DNA, 363 bp, synthetic construct
  source 1..363: mol_type = other DNA
caggtgcagctggttgaatctggcggaggactggttcagcctggcggatctctgaagctgtcttgtgccgccagcggcttcgacttcagcagatactggatgagctgggtccgacaggcccctggcaaaggactggaatggatcggcgagatcaaccccaccagcagcaccatcaacttcacccctagcctgaaggacaaggtgttcatcagccgggacaacgccaagaacaccctgtacctccagatgagcaaagtgcggagcgaggacacagccctgtactactgtgccagaggcaactactacagatacggcgacgctatggactactggggccagggaacaagcgtgacagtctcttct

SEQ ID NO: 365 - DNA, 342 bp, synthetic construct
  source 1..342: mol_type = other DNA
gaggtgcagctggttgaatctggcggaggactggttcagcctggcggatctctgagactgtcttgtgccgccagcggcttcacctttagcacatacggaatggcctgggtccgacagacccctgatagaaggctggaactggtggctaccatcaacagcaacggcggcaagacctaccatcctgacagcgtgaagggcagattcaccatcagccgggacaacagcaagaacaccctgtacctccagatgaacagcctgagagccgaggacaccgccgtgtactactgcaccagagaaggactggactactggggccagggcacactggttacagtttctagc

SEQ ID NO: 366 - DNA, 342 bp, synthetic construct
  source 1..342: mol_type = other DNA
gaagtgcagctggttgaatctggcggcggaattgtgcagcctggcggatctctgaagctgagctgtgccgccagcggcttcaccttcaacgatttcggcatgagctggatcagacagacccctgacaagcggctggaactggtggctaccatcaacaccaatggcggcaccacacactaccccgactctgtgaagggcagattcagcatcagccgggacaacgccaagaaattcgtgtacctccagatgagcagcctgaagtccgacgacaccgccatctactactgccccagagaaggactggactactggggccagggaaccacactgacagtgtctagt

SEQ ID NO: 367 - DNA, 339 bp, synthetic construct
  source 1..339: mol_type = other DNA
caagttcagctgcaacagagcggagccgaagtgaagaagcctggcgagagcctgaagattagctgcaaaggcagcggctacaccttcaccggctactacatgcactgggtccgacaggcccctggacaaagacctgaatggctgggcagaatgaacgccaagtctggcgaagctgacagcgcccagagattccagggcagagtgacaatgaccagagacaccagcatcaacaccgcctacatggaactgcgggacctgagatccgatgacaccgccgtgtactactgcaccagaggacctctgctttggggccagggaacactggtcacagtgtctagt

SEQ ID NO: 368 - DNA, 366 bp, synthetic construct
  source 1..366: mol_type = other DNA
gaagttcagctggttcagagcggcgctgaagtgaagaaacctggggcctctgtgaaggtgtcctgcaaggcttccggctacacctttaccagctactacatgcactgggtccgacaggcccctggacaaggacttgagtggatgggcatcatcaaccccagcggcggcagaacaagctacgcccagaaattccagggcagagtgaccatgaccagagacacctctaccggcaccgtgtacatggaactgagcagcctgagaagcgaggacaccgccgtgtactactgtgccagaagccactgttctggcggcagctgctacagcatcgactattggggccagggcaccctggtcacagtctcttct

SEQ ID NO: 369 - DNA, 366 bp, synthetic construct; identical to SEQ ID NO: 368
  source 1..366: mol_type = other DNA

SEQ ID NO: 370 - DNA, 354 bp, synthetic construct
  source 1..354: mol_type = other DNA
caaattcagctggtgcagtctggccccgagctgaagaaacctggcgagacagtgaagatttcctgcaaggccagcggctacaccttcaccaactacggcatgaactgggtcaagcaggcccctggcaagggcctgaaatggatgggctggatcaacaccaacaccggcgagcctacctacgccgaagagttcaagggcagattcgccttcagcctggaaaccagcgccagcacagcctacctccagatcaacaacctgaagaacgaggacaccgccacctacttttgcgccagactcggcttcggcaacgctatggattattggggccagggcaccagcgtgaccgtttcttct

SEQ ID NO: 371 - DNA, 354 bp, synthetic construct
  source 1..354: mol_type = other DNA
caagttcagctggtgcagagcggcagcgagctgaagaaacctggcgcttccgtgaagatcagctgcaaggccagcggctacaccttcaccaactacggcatgaactgggtcaagcaggcccctggacagggcctgaaatggatgggctggatcaacacctacaccggcgagcctacctacgccgaagagttcaagggcagattcgccttcagcctggaaaccagcgccagcacagcctacctccagatcaccagcctgaagaacgaggacaccgccacctacttttgcgccagactcggcttcggcaacgctatggattattggggccagggaaccagcgtgaccgtgtcatct

SEQ ID NO: 372 - DNA, 354 bp, synthetic construct
  source 1..354: mol_type = other DNA
gaggtgcaactggtgcagagcggagccgaagtgaagaaacctggggccagcgtgcgggtgtcctgcaaggccagcggctacacctttaccaactacggcatgaactgggtgcgccaggctcctggacagggcctggaatggatgggctggatcaacacctacaccggcgagcccacctacgccgacgacttcaagggcagagtgaccatgaccaccgacaccagcacctccaccgcctacatggaactgcggagcctgagaagcgacgacaccgccgtgtattattgcgcccggatcggcgacagcagccccagcgattattggggccagggaaccctcgtgaccgtgtcctct

SEQ ID NO: 373 - DNA, 351 bp, synthetic construct
  source 1..351: mol_type = other DNA
gaagttcagctggttgagtctggcggaggactggttcaacctggcggaagcctgagactgtcttgtgccgccagcggcttcaacatcgactactacggaatgcactgggtccgacaggcccctggcaaaggacttgaatgggtcgcctctctgtacggcggcagcgatagcacagattacgccgactctgtgaagggcagattcaccatcagcgccgacaccagcaagaacaccgcctacctccagatgaactccctgagagccgaagataccgccgtgtactactgctccagacagtacagcgcctacttcgactattggggccagggaaccctggtcaccgttagctct

SEQ ID NO: 374 - DNA, 357 bp, synthetic construct
  source 1..357: mol_type = other DNA
caggttcagctggttcagtctggggccgaagtgaagaaacctggggcctctgtgaaggtgtcctgcaaggcttccggctacacctttaccgaccacgccatccactgggtccgacaggctccaggacaacggcttgagtggatgggctacttcagccccggcaacgacgacttcaagtacagccagaaattccagggcagagtgaccatcaccgccgatacaagcgccagcaccgcctacatggaactgagcagtctgagaagcgaggataccgccgtgtacttctgcacacggtccctgaacatggcctattggggccagggaaccctggtcacagtgtctagcggaagcacatct

SEQ ID NO: 375 - DNA, 351 bp, synthetic construct
  source 1..351: mol_type = other DNA
gaagtgcagctggttgaatcaggtggcggcctggttcaacctggcggatctctgagactgagctgtgccgccagcggctacaccttcagcgactactttatgagctgggtccgacaggcccctggcaaaggacttgaatgggtcgccaccatcagcaatggcggcacctacacttactaccccgacagcgtgaagggcagattcaccatctccagagacaacagcaagaacaccctgtacctccagatgaactccctgagagccgaggacaccgccgtgtactactgcgccagattcgacggctacatcttcgactattggggccagggcaccctggtcacagtctcttct

SEQ ID NO: 376 - DNA, 345 bp, synthetic construct
  source 1..345: mol_type = other DNA
gaagtgcagctggttgaatcaggtggcggcctggttcaacctggcggatctctgagactgagctgtgccgccagcggctacacctttaccgagtacacaatccactgggtccgacaggcccctggcaaaggacttgagtgggtcgccaacatcaaccccaacaatggcggcaccacctacaaccagaagttcgaggacagattcaccatcagccgggacaacagcaagaacaccctgtacctccagatgaactccctgagagccgaggacaccgccgtgtactattgtgccagaggctggaacttcgactactggggccagggaacactggtcaccgttagctct

SEQ ID NO: 377 - DNA, 360 bp, synthetic construct
  source 1..360: mol_type = other DNA
gaagtgcagctggttgaatcaggtggcggcctggttcaacctggcggatctctgagactgagctgtgccgccagcggcttcaacatcaaggacacctacatccactgggtccgacaggcccctggcaaaggacttgaatgggtcgccagaatctaccccaccaacggctacaccagatacgccgactctgtgaagggcagattcaccatcagcgccgacaccagcaagaacaccgcctacctccagatgaactccctgagagccgaggacaccgccgtgtactactgtagcagatggggcggagccggagcctacgctatggatgtttggggccagggaaccctggtcaccgtgtcatct

SEQ ID NO: 378 - DNA, 366 bp, synthetic construct
  source 1..366: mol_type = other DNA
caactccagctgcaagagtctggccctggcctggtcaagcctagcgaaacactgagcctgacctgtaccgtgtctggcggctctatcagctccagcagctatttctggggctggatcagacaacctcctggcaaaggactggaatggatcggctccatctactacagcggcatcacctactacaaccccagcctgaagtccagagtgaccatctccgtggacaccagcaagaaccagttctccctgaagctgagcagcgtgacagccgccgataccgccgtgtattattgtgccagacatgacggcgctgtggccggcctgtttgattattggggacagggcaccctggtcaccgtgtcatctgct

SEQ ID NO: 379 - DNA, 31 bp, synthetic construct; identical to SEQ ID NO: 304
  source 1..31: mol_type = other DNA

SEQ ID NO: 380 - DNA, 31 bp, synthetic construct; identical to SEQ ID NO: 304
  source 1..31: mol_type = other DNA

SEQ ID NO: 381 - DNA, 31 bp, synthetic construct; identical to SEQ ID NO: 304
  source 1..31: mol_type = other DNA

SEQ ID NO: 382 - DNA, 31 bp, synthetic construct; identical to SEQ ID NO: 304
  source 1..31: mol_type = other DNA

SEQ ID NO: 383 - DNA, 31 bp, synthetic construct; identical to SEQ ID NO: 304
  source 1..31: mol_type = other DNA

SEQ ID NO: 384 - DNA, 31 bp, synthetic construct; identical to SEQ ID NO: 304
  source 1..31: mol_type = other DNA

SEQ ID NO: 385 - DNA, 31 bp, synthetic construct; identical to SEQ ID NO: 304
  source 1..31: mol_type = other DNA

SEQ ID NO: 386 - DNA, 31 bp, synthetic construct; identical to SEQ ID NO: 304
  source 1..31: mol_type = other DNA

SEQ ID NO: 387 - DNA, 732 bp, synthetic construct
  source 1..732: mol_type = other DNA
gacatccagatgacacagagccctagcagcctgtctgccagcgtgggagacagagtgaccatcacatgcaaggccagcgaccacatcaacaactggctggcctggtatcagcagaagcctggacaggcccctaagctgctgatctacggcgctaccacactggaaacaggcgtgcccagcagattttctggcagcggctctggcaccgactacaccctgacaatatccagcctccagcctgaggacttcgccacctactactgtcagcagagctggaacaccccttggacattcggccagggcaccaagctggaaatcaagagaggcggaggcggaagtggaggcggaggatctggcggcggaggctctcaagttcagcttcaacagcctggcgctgagctggtcaaacctggcgcttctgtgaagatgagctgcaaagccagcggctacgccttcagcagctactggatcaactggatgaagcagaaacccggccagggactcgaatggatcggccaaatctatcccggcgacggcgacaccaactacaacggcaagttcaagggcagagccacactgaccgccgatacctctagcagcacagcctacatgcagctgagcagcctgaccagcgaagatagcgccgtgtacttctgtgcccggtccatcacaacagtcgtgggctgcgctatggactattggggccagggaacaagcgtgaccgtgtctagt

SEQ ID NO: 388 - DNA, 741 bp, synthetic construct
  source 1..741: mol_type = other DNA
caggtgcagctggttgaatctggcggaggactggttcagcctggcggatctctgaagctgtcttgtgccgccagcggcttcgacttcagcagatactggatgagctgggtccgacaggcccctggcaaaggactggaatggatcggcgagatcaaccccaccagcagcaccatcaacttcacccctagcctgaaggacaaggtgttcatcagccgggacaacgccaagaacaccctgtacctccagatgagcaaagtgcggagcgaggacacagccctgtactactgtgccagaggcaactactacagatacggcgacgctatggactactggggccagggaacaagcgtgacagtctcttctggcggaggcggaagtggaggcggaggatctggcggcggaggctctgacattgtgctgacacagtctcccgccagcctggccgtttctctgggacagagagccaccatcagctgtagagccagcaagagcgtgtccaccagcggctactcttacctgcactggtatcagcagaagcccggccagcctcctaagctgctgatctacctggcctccaacctggaaagcggagtgcctgccagattttctggctctggcagcggcaccgacttcaccctgaatatccatcctgtggaagaagaggacgccgccacctactactgccagcacagtagagagctgcccttcacatttggctccggcaccaagctggaaatcaag

SEQ ID NO: 389 - DNA, 708 bp, synthetic construct
  source 1..708: mol_type = other DNA
gatattcagatgacacagagccccagcagcctgtctgcctctgtgggagacagagtgaccatcacctgtcgggcctctcagaatgtgggaacagccgtggcttggtttcagcagaagcctggcaaggcccctaagatcctgatctacagcgccagcaacagatacaccggcgtgccaagtagaagcacaggctctggcagcggcaccgatttcaccctgacaatatccagcctccagcctgaggacttcgccacctactactgccagcagtacagcacataccctctgaccttcggccaggggaccaagctggaaatcaagggcggaggcggatctggcggcggaggtagcggtggcggaggatctgaggtgcagctggttgaatctggcggaggactggttcagcctggcggatctctgagactgtcttgtgccgccagcggcttcacctttagcacatacggaatggcctgggtccgacagacccctgatagaaggctggaactggtggctaccatcaacagcaacggcggcaagacctaccatcctgacagcgtgaagggcagattcaccatcagccgggacaacagcaagaacaccctgtacctccagatgaacagcctgagagccgaggacaccgccgtgtactactgcaccagagaaggactggactactggggccagggcacactggttacagtttctagc

SEQ ID NO: 390 - DNA, 708 bp, synthetic construct
  source 1..708: mol_type = other DNA
gacatcgtgctgacccagagccagaaattcatgagcaccagcgtgggcgacagagtgtccatcatctgtagagccagccagtctgtgggaacagccgtggcttggtatcagctgaaggccggacagagccccaagctgctgatctacagcgccagcaacagattcaccggcgtgcccgatagattcacaggcagcggctctggcaccgacttcaccctgacaatcagcaacgtgcagagcgaggacctggccgactacttctgtcagcagtacagcacataccctctggcctttggcgctggcaccaagctggaacttaaaggcggaggcggatctggcggcggaggtagcggtggcggaggatctgaagtgcagctggttgaatctggcggcggaattgtgcagcctggcggatctctgaagctgagctgtgccgccagcggcttcaccttcaacgatttcggcatgagctggatcagacagacccctgacaagcggctggaactggtggctaccatcaacaccaatggcggcaccacacactaccccgactctgtgaagggcagattcagcatcagccgggacaacgccaagaaattcgtgtacctccagatgagcagcctgaagtccgacgacaccgccatctactactgccccagagaaggactggactactggggccagggaaccacactgacagtgtctagt

SEQ ID NO: 391 - DNA, 723 bp, synthetic construct
  source 1..723: mol_type = other DNA
cagcctgttctgacacagcctccatctgcctctggcacacctggacagagagtgaccatcagctgtagcggcagcagcagcaacatcggcaacaacttcgtgtcctggtatcagcagctgcccggcacagctcccaaactgctgatctaccggaacaaccagaggccaagcggcgtgcccgatagattttctggcagcaagacaggcaccagcgccagcctggctatctctggactgagaagcgaggacgaggccgactactattgtgccgcctgggacgattctgtgcggggacctgtttttggcggcggaacagaactgacagtgctggcagcagctggcggaggcggatctggcggcggaggtagcggtggcggaggatctcaagttcagctgcaacagagcggagccgaagtgaagaagcctggcgagagcctgaagattagctgcaaaggcagcggctacaccttcaccggctactacatgcactgggtccgacaggcccctggacaaagacctgaatggctgggcagaatgaacgccaagtctggcgaagctgacagcgcccagagattccagggcagagtgacaatgaccagagacaccagcatcaacaccgcctacatggaactgcgggacctgagatccgatgacaccgccgtgtactactgcaccagaggacctctgctttggggccagggaacactggtcacagtgtctagt

SEQ ID NO: 392 - DNA, 744 bp, synthetic construct
  source 1..744: mol_type = other DNA
cagcctgtgctgacacagtctagtagcgcctctgcctctctgggcagcagcgtgaagctgacctgtacactgtctagcggccacagcagctacatcattgcctggcatcagcagcagcctggcaaggcccctagatacctgatgaaggtggaaggcagcggcagctacaacaaaggctctggcatccccgagagattcagcggcagttctagcggagccgaccgctacctgaccatcagcaatctccagagcgaggacgaggccgactactactgcgagacatgggacagcaacacccacgtgttcggcaccggcaccaaagtgacagttcttggcggaggcggatctggcggcggaggtagcggtggcggaggatctgaagttcagctggttcagagcggcgctgaagtgaagaaacctggggcctctgtgaaggtgtcctgcaaggcttccggctacacctttaccagctactacatgcactgggtccgacaggcccctggacaaggacttgagtggatgggcatcatcaaccccagcggcggcagaacaagctacgcccagaaattccagggcagagtgaccatgaccagagacacctctaccggcaccgtgtacatggaactgagcagcctgagaagcgaggacaccgccgtgtactactgtgccagaagccactgttctggcggcagctgctacagcatcgactattggggccagggcaccctggtcacagtctcttct

SEQ ID NO: 393 - DNA, 744 bp, synthetic construct; identical to SEQ ID NO: 392
  source 1..744: mol_type = other DNA

SEQ ID NO: 394 - DNA, 738 bp, synthetic construct
  source 1..738: mol_type = other DNA
gacatcgtgatgacacagagccctagcagcctgacagtgacagccggcgagaaagtgaccatgagctgcaagagcagccagagcctgctgaacagcggcaaccagaagaactacctgacctggtatcagcagaagcccggccagcctcctaagctgctgatctactgggccagcaccagagaaagcggcgtgcccgatagattcacaggcagcggcagcggaaccgacttcaccctgacaatcagctctgtgcaggccgaggatctggccgtgtactactgccagaacgactacagctaccctctgacctttggagccggcaccaagctggaacttaaaggcggaggcggatctggcggcggaggtagcggtggcggaggatctcaaattcagctggtgcagtctggccccgagctgaagaaacctggcgagacagtgaagatttcctgcaaggccagcggctacaccttcaccaactacggcatgaactgggtcaagcaggcccctggcaagggcctgaaatggatgggctggatcaacaccaacaccggcgagcctacctacgccgaagagttcaagggcagattcgccttcagcctggaaaccagcgccagcacagcctacctccagatcaacaacctgaagaacgaggacaccgccacctacttttgcgccagactcggcttcggcaacgctatggattattggggccagggcaccagcgtgaccgtttcttct

SEQ ID NO: 395 - DNA, 741 bp, synthetic construct
  source 1..741: mol_type = other DNA
gacatcgtgatgacacagagccctgatagcctggccgtgtctctgggagagagagccacaatcaactgcgagagcagccagagcctgctgaacagcggcaaccagaagaactacctgacctggtatcagcagaagcccggccagcctcctaagcctctgatctactgggccagcaccagagaaagcggcgtgcccgatagattttctggctctggcagcggcaccgacttcaccctgacaatttctagcctgcaagccgaggacgtggccgtgtactactgccagaacgactacagctacccctacctgttcggccagggcaccaagctggaaatcaaaagaggcggaggcggatctggcggcggaggtagcggtggcggaggatctcaagttcagctggtgcagagcggcagcgagctgaagaaacctggcgcttccgtgaagatcagctgcaaggccagcggctacaccttcaccaactacggcatgaactgggtcaagcaggcccctggacagggcctgaaatggatgggctggatcaacacctacaccggcgagcctacctacgccgaagagttcaagggcagattcgccttcagcctggaaaccagcgccagcacagcctacctccagatcaccagcctgaagaacgaggacaccgccacctacttttgcgccagactcggcttcggcaacgctatggattattggggccagggaaccagcgtgaccgtgtcatct

SEQ ID NO: 396 - DNA, 723 bp, synthetic construct
  source 1..723: mol_type = other DNA
gacatcgtgatgacccagagccctgccaccctgtccgtgtctccaggcgaaagagccaccctgagctgcagagcttcccagagcgtgtccaacgacgtcgtgtggtatcagcagaagcccggccaggcccccagactgctgatctactacgccagcaacagatacaccggcatccccgccagattcagcggctctggcagcggcaccgagttcaccctgacaatcagcagcctccagagcgaggacttcgccgtgtactactgtcagcaggactacaccagcccctggaccttcggccagggcaccaagctggaaatcaagagaggcggaggcggaagtggaggcggaggatctggcggcggaggctctgaggtgcaactggtgcagagcggagccgaagtgaagaaacctggggccagcgtgcgggtgtcctgcaaggccagcggctacacctttaccaactacggcatgaactgggtgcgccaggctcctggacagggcctggaatggatgggctggatcaacacctacaccggcgagcccacctacgccgacgacttcaagggcagagtgaccatgaccaccgacaccagcacctccaccgcctacatggaactgcggagcctgagaagcgacgacaccgccgtgtattattgcgcccggatcggcgacagcagccccagcgattattggggccagggaaccctcgtgaccgtgtcctct

SEQ ID NO: 397 - DNA, 720 bp, synthetic construct
  source 1..720: mol_type = other DNA
gacatccagatgacacagagccctagcagcctgtctgccagcgtgggagacagagtgaccatcacctgtagagccagccaggatgtgtctacagccgtggcctggtatcagcagaagcctggaaaggcccctaagctgctgatctacagcgccagctttctgtactccggcgtgcccagcagattcagcggaagcagaagcggcaccgacttcaccctgacaatatccagcctccagcctgaggacttcgccacctactactgccagcagtacctgtaccagccttggacattcggccagggcaccaaggtggaaatcaagagaggcggaggcggaagtggaggcggaggatctggcggcggaggctctgaagttcagctggttgagtctggcggaggactggttcaacctggcggaagcctgagactgtcttgtgccgccagcggcttcaacatcgactactacggaatgcactgggtccgacaggcccctggcaaaggacttgaatgggtcgcctctctgtacggcggcagcgatagcacagattacgccgactctgtgaagggcagattcaccatcagcgccgacaccagcaagaacaccgcctacctccagatgaactccctgagagccgaagataccgccgtgtactactgctccagacagtacagcgcctacttcgactattggggccagggaaccctggtcaccgttagctct

SEQ ID NO: 398 - DNA, 741 bp, synthetic construct
  source 1..741: mol_type = other DNA
caggttcagctggttcagtctggggccgaagtgaagaaacctggggcctctgtgaaggtgtcctgcaaggcttccggctacacctttaccgaccacgccatccactgggtccgacaggctccaggacaacggcttgagtggatgggctacttcagccccggcaacgacgacttcaagtacagccagaaattccagggcagagtgaccatcaccgccgatacaagcgccagcaccgcctacatggaactgagcagtctgagaagcgaggataccgccgtgtacttctgcacacggtccctgaacatggcctattggggccagggaaccctggtcacagtgtctagcggaagcacatctggcggaggcggaagtggaggcggaggatctggcggcggaggctctgatattgtgatgacacagagccccgacagcctggccgtgtctcttggagaaagagccaccatcaactgcaagagcagccagagcctgctgtactccagcaacagcaagaactacctggcctggtatcagcagaagcccggccagcctcctaagctgctgatctactgggccagcaccagagaaagcggcgtgcccgatagattttctggctctggcagcggcaccgacttcaccctgacaatttctagcctgcaagccgaggacgtggccgtgtattactgccagcagccttacagctaccctctgagctttggagccggcaccaagctggaactgaaa

SEQ ID NO: 399 - DNA, 729 bp, synthetic construct
  source 1..729: mol_type = other DNA
gatattgtgatgacacagagccccgacagcctggccgtgtctcttggagaaagagccaccatcaactgcaagagcagccagagcctgctgtactccagcaacagcaagaactacctggcctggtatcagcagaagcccggccagcctcctaagctgctgatctactgggccagcaccagagaaagcggcgtgcccgatagattttctggctctggcagcggcaccgacttcaccctgacaatttctagcctgcaagccgaggacgtggccgtgtattactgccagcagccttacagctaccctctgagctttggagccggcaccaagctggaactgaaaggcggaggcggaagtggaggcggaggatctggcggcggaggctctcaggttcagctggttcagtctggggccgaagtgaagaaacctggggcctctgtgaaggtgtcctgcaaggcttccggctacacctttaccgaccacgccatccactgggtccgacaggctccaggacaacggcttgagtggatgggctacttcagccccggcaacgacgacttcaagtacagccagaaattccagggcagagtgaccatcaccgccgatacaagcgccagcaccgcctacatggaactgagcagtctgagaagcgaggataccgccgtgtacttctgcacacggtccctgaacatggcctattggggccagggaaccctggtcacagtgtctagc

SEQ ID NO: 400 - DNA, 720 bp, synthetic construct
  source 1..720: mol_type = other DNA
gacatccagatgacacagagccctagcagcctgtctgccagcgtgggagacagagtgaccatcacctgtagagccagccaggacatcagcaactacctgaactggtatcagcagaagcccggcaaggcccctaagctgctgatctactacaccagcagactgcacagcggcgtgcccagcagattttctggctctggcagcggcaccgacttcaccctgacaatatctagcctccagcctgaggacttcgccacctactattgccagcagggcaacaccctgccttacacatttggacagggcaccaaggtggaaatcaagagaggcggaggcggaagtggaggcggaggatctggcggcggaggctctgaagtgcagctggttgaatcaggtggcggcctggttcaacctggcggatctctgagactgagctgtgccgccagcggctacaccttcagcgactactttatgagctgggtccgacaggcccctggcaaaggacttgaatgggtcgccaccatcagcaatggcggcacctacacttactaccccgacagcgtgaagggcagattcaccatctccagagacaacagcaagaacaccctgtacctccagatgaactccctgagagccgaggacaccgccgtgtactactgcgccagattcgacggctacatcttcgactattggggccagggcaccctggtcacagtctcttct

SEQ ID NO: 401 - DNA, 714 bp, synthetic construct
  source 1..714: mol_type = other DNA
gacatccagatgacacagagccctagcagcctgtctgccagcgtgggagacagagtgaccatcacatgcaaggccagccaggatgtgggcacagccgtggattggtatcagcagaagcctggcaaggcccctaagctgctgatctactgggccagcacaagacacacaggcgtgcccagcagattttctggcagcggctctggcaccgacttcaccctgacaatatccagcctccagcctgaggacttcgccacctactactgccagcagtacaacagctaccctctgaccttcggccagggcaccaaggtggaaatcaaaagaggcggaggcggaagtggaggcggaggatctggcggcggaggctctgaagtgcagctggttgaatcaggtggcggcctggttcaacctggcggatctctgagactgagctgtgccgccagcggctacacctttaccgagtacacaatccactgggtccgacaggcccctggcaaaggacttgagtgggtcgccaacatcaaccccaacaatggcggcaccacctacaaccagaagttcgaggacagattcaccatcagccgggacaacagcaagaacaccctgtacctccagatgaactccctgagagccgaggacaccgccgtgtactattgtgccagaggctggaacttcgactactggggccagggaacactggtcaccgttagctct

SEQ ID NO: 402 - DNA, 732 bp, synthetic construct
  source 1..732: mol_type = other DNA
gacatccagatgacacagagccctagcagcctgtctgccagcgtgggagacagagtgaccatcacctgtagagccagccaggacgtgaacacagccgtggcttggtatcagcagaagcctggcaaggcccctaagctgctgatctacagcgccagctttctgtacagcggcgtgcccagcagattcagcggaagcagaagcggcaccgacttcaccctgacaatatccagcctccagcctgaggacttcgccacctactactgccagcaggcttacaccacacctccaacattcggccagggcaccaaggtggaaatcaagagaacaggcggaggcggaagtggaggcggaggatctggcggcggaggctctgaagtgcagctggttgaatcaggtggcggcctggttcaacctggcggatctctgagactgagctgtgccgccagcggcttcaacatcaaggacacctacatccactgggtccgacaggcccctggcaaaggacttgaatgggtcgccagaatctaccccaccaacggctacaccagatacgccgactctgtgaagggcagattcaccatcagcgccgacaccagcaagaacaccgcctacctccagatgaactccctgagagccgaggacaccgccgtgtactactgtagcagatggggcggagccggagcctacgctatggatgtttggggccagggaaccctggtcaccgtgtcatct

SEQ ID NO: 403 - DNA, 735 bp, synthetic construct
  source 1..735: mol_type = other DNA
agctacgtgctgacacagcctccatccgtgtctgtggctccaggacagaccgccagaatcacatgcggcggcaacaacatcggcggcaagagcgtgcactggtatcagcagccacctggacaggctccagtggtggtggtgtacgacgacagcgatagacctagcggcatccccgagagattcagcggcagcaattccggcaataccgccacactgaccatcagcagagtggaagctggcgacgaggccgtgtactactgccaagtgtgggacagcagcagcgatcacgtggtgtttggcggcggaacaaagctgacagtgcttggcggaggcggaagtggaggcggaggatctggcggcggaggctctcaactccagctgcaagagtctggccctggcctggtcaagcctagcgaaacactgagcctgacctgtaccgtgtctggcggctctatcagctccagcagctatttctggggctggatcagacaacctcctggcaaaggactggaatggatcggctccatctactacagcggcatcacctactacaaccccagcctgaagtccagagtgaccatctccgtggacaccagcaagaaccagttctccctgaagctgagcagcgtgacagccgccgataccgccgtgtattattgtgccagacatgacggcgctgtggccggcctgtttgattattggggacagggcaccctggtcaccgtgtcatctgct

SEQ ID NO: 404 - DNA, 31 bp, synthetic construct; identical to SEQ ID NO: 304
  source 1..31: mol_type = other DNA

SEQ ID NO: 405 - DNA, 31 bp, synthetic construct; identical to SEQ ID NO: 304
  source 1..31: mol_type = other DNA

SEQ ID NO: 406 - DNA, 31 bp, synthetic construct; identical to SEQ ID NO: 304
  source 1..31: mol_type = other DNA

SEQ ID NO: 407 - DNA, 31 bp, synthetic construct; identical to SEQ ID NO: 304
  source 1..31: mol_type = other DNA

SEQ ID NO: 408 - DNA, 31 bp, synthetic construct; identical to SEQ ID NO: 304
  source 1..31: mol_type = other DNA

SEQ ID NO: 409 - DNA, 31 bp, synthetic construct; identical to SEQ ID NO: 304
  source 1..31: mol_type = other DNA

SEQ ID NO: 410 - DNA, 31 bp, synthetic construct; identical to SEQ ID NO: 304
  source 1..31: mol_type = other DNA

SEQ ID NO: 411 - DNA, 31 bp, synthetic construct; identical to SEQ ID NO: 304
  source 1..31: mol_type = other DNA

SEQ ID NO: 412 - DNA, 372 bp, synthetic construct
  source 1..372: mol_type = other DNA
caggttcagctggttcagtctggcggaggactggttcaaccaggcggaagcctgagactgtcttgtgccgcttccagaagaagcagccggtcttgggctatggcctggtttagacaggcccctggcaaagagagagagttcgtcgccaagatcagcggcgacggcagactgacaacatacggcgatagcgtgaagggcagattcaccatcagccgggacaacgccgagtacctggtgtacctccagatggacagcctgaagcctgacgacaccgccgtgtattactgtgccgccgacgacaattacgtgaccgcctcttggagaagcggccctgattattggggcagaggcacccaagtgaccgtgtctagt

SEQ ID NO: 413 - DNA, 354 bp, synthetic construct
  source 1..354: mol_type = other DNA
caggtgcagctggttgaatctggtggcggagttgtgcagcctggcagaagcctgagactgtcttgtgccgccagcggctatagaagcagcgtgtgcatgggctggttcagacaggcccctggcaaaggactggaaagagtggccctgatcggcagagatggcagcaccacctacatcgacagcgtgaagggcagattcaccatcagccgggacaacagcaagaacaccctgtacctccagatgaacagcctgagagccgaggacaccgccgtgtactattgtgccagaggactcggctattgggcctgcgagtacaactattggggccagggcacactggtcaccgtttctagc

SEQ ID NO: 414 - DNA, 354 bp, synthetic construct
  source 1..354: mol_type = other DNA
caagttcagctggtggaaagtggcggaggcgttgtgcaacccggaagatcactgagactgagctgtgccgcttccggctacagatcctctgtgtgtatgggatggtttcggcaggctcccggcaagggacttgagagggttgccgtgattggaagagatggctctaccacatatatcgactccgtgaaaggccggttcacaatctccagagacaactccaagaacacgctctatctgcaaatgaactctctgcgggccgaagatacagccgtgtattactgcgctcgcggccttggatactgggcctgtgactataattactggggacagggaacccttgtgaccgtgtctagt

SEQ ID NO: 415 - DNA, 354 bp, synthetic construct
  source 1..354: mol_type = other DNA
caggtgcagctggttgaatctggtggcggagttgtgcagcctggcagaagcctgagactgtcttgtgccgccagcggctatagaagcagcgtgtgcatgggctggttcagacaggcccctggcaaaggactggaacgagtggccgtgatcggcagagatggcagcacaacctacatcgacagcgtgaagggcagattcaccatcagccgggacaacagcaagaacaccctgtacctccagatgaacagcctgagagccgaggacaccgccgtgtactattgtgccagaggactcggctattgggcctgcgagtacgattattggggccagggcacactggtcaccgtgtcatct

SEQ ID NO: 416 - DNA, 366 bp, synthetic construct
  source 1..366: mol_type = other DNA
caggttcagctgcaagagtctggccctggcctggtcaagcctagccaaacactgagcctgacctgtaccgtgtctggcggctctatcaccaccggcgagttctactggaactggttcagacagcctcctggcaaaggactggaatggatgggagccattgccgccagcggcagcacaacatacagccctagcttcgagagccggaccagcatcagcagagacaccagcaagaatcagttcagcctgaagctgagcagcgtgacagccgccgatacagccgtgtattactgcggcagatcctttggagtggccgccgtgacaaccggccagaatagaggacagggcaccctggtcacagtgtctagc

SEQ ID NO: 417 - DNA, 366 bp, synthetic construct
  source 1..366: mol_type = other DNA
caggtgcagctccaagaaagcggacccggactggttaagccctctcagaccctgtctctgacctgcacagttagcggagccagcattaccacaggcgagtattattggaattggtttcggcagccaccaggcaaggggcttgagtggatgggtgctattgctgcctctggcagcaccacctactctcccagctttgagagcagaacctccatcagccgggacacctccaaaaaccagttctctctgaagctgtcctccgtgaccgctgctgacaccgccgtctattattgtggccggtctttcggcgtggcagctgtgaccacaggacagaacagaggccagggaacacttgtgaccgtgtcctct

SEQ ID NO: 418 - DNA, 375 bp, synthetic construct
  source 1..375: mol_type = other DNA
gaggtgcagctggttgaatctggcggaggactggttcagcctggcggatctctgagactgtcttgtgccgccagcggcaacacctacagcaccaattacatggcctggttcagacaggcccctggcaaaggactggaagaggtggccgtgatctacaccagaggcggccacacctattacgtggactctgtgcggggcagattcaccatcagccaggacaacgccaagaacagcctgtacctccagatgaactccctgagagccgaggacaccgccgtgtactattgtgctgccagcagcaggcacagactgggcctgaacaaccccagagactacgactattggggccagggcacactggtcacagtttctagc

SEQ ID NO: 419 - DNA, 375 bp, synthetic construct
  source 1..375: mol_type = other DNA
caagttcagctggtggaaagcggtggtggcgttgtgcaacctggtggaagtctgaggcttagctgcgccgccagcttttctggatacggcgtgtcaacaatggcatggtttaggcaggctccaggcaagggccttgaaggcgtggccgctatcacagtcggctccggcaatacctactacgccgatagcgtgaccggcaggttcacaatctccagagacaacagcaagaatacggtgtacctgcaaatgaacagcctccgcgccgaggatacagccatgtattactgtgccgtgggctacctgtctggcggctcttgggatgtgcccggcagatacaattactggggacagggaaccctggttaccgtgtctagt

SEQ ID NO: 420 - DNA, 375 bp, synthetic construct
  source 1..375: mol_type = other DNA
caggtgcagctggttgaatctggtggcggagttgttcagcctggcggctctctgagactgtcttgtgccgccagctttagcggctacggcgtgtcaacaatggcctggtttagacaggcccctggcaaaggactggaaggcgtggccgctatcacagtcggcagcggcaatacctactacgccgactctgtgaagggcagattcaccatcagccgggacaacagcaagaacaccgtgtacctccagatgaacagcctgagagccgaggacaccgccatgtactattgtgccgttggctggctgagcggcggatcttggcatgtgcctggcagatacaactactggggccagggcacactggtcacagtttctagc

SEQ ID NO: 421 - DNA, 375 bp, synthetic construct
  source 1..375: mol_type = other DNA
gaagttcagctggtggaaagtggcggtggccttgtgcaacctggtggatcactgagactgagctgtgctgcctccggcaacacctacagctctaactggatgggctggttcaggcaggctccaggcaagggtcttgaagaggtggccgtgatctacaccagaggcggccacacctactatgtggactctgtgcgcggcaggttcacaatctcccaggacaacgccaagaactctctgtatctgcaaatgaactccctgcgggccgaagatacagccgtgtattactgtgccgcctccagcaggcatagactgggcctgaacaaccccagagactacgattattggggacagggaaccctcgtgaccgtgtctagt

SEQ ID NO: 422 - DNA, 369 bp, synthetic construct
  source 1..369: mol_type = other DNA
gaggtgcagctggttgaatctggcggaggactggttcagcctggcggatctctgagactgtcttgtgccgccagcggctacatctacagcagcaactgcatgggctggttcagacaggcccctggcaagggaagagagtgggttgccagaatccacacaggcagcggcagcacctactacaccgatagcgtgaagggcagattcaccatcagccaggacaacagcaagaacaccctgtacctccagatgaacagcctgagagccgaggacaccgccgtgtatgattgtgccgctggaagagtggtgctgggagccgtcgtgtgcaccaatgagtattggggccagggcaccctggtcaccgtttcttca

SEQ ID NO: 423 - DNA, 366 bp, synthetic construct
  source 1..366: mol_type = other DNA
gaagttcagctggtggaatctggaggcggccttgtgcaacctggtggcagtctgagactcagctgtgccacaagcggcttcaccttcgacggacctgacatggcctggtataggcaggctcctggaaagggctgtgaactggtgtccatcatcagcgccgacggaagaacctactatgccgactccgtgaaaggccggtttaccatcagcagagataactccaagaatacggtgtacctgcaaatgaactctctgcgggccgaagatacagccgtgtactactgtgccctggatcctcggaagaattgcagaggcggctactgctgtgccaactggggacagggaacccttgtgacagtgtcctct

SEQ ID NO: 424 - DNA, 366 bp, synthetic construct
  source 1..366: mol_type = other DNA
gaggtgcagctggttgaatctggcggaggactggttcagcctggcggatctctgagactgtcttgtgccgccagcgccttcaccttcgatggacctgatatggcctggtacagacaggcccctggcaagggctgtgaactggtgtctatcatcagcgccgacggcagaacctactacaccgactctgtgaagggcagattcaccatcagccgggacaacagcaagaacaccgtgtacctccagatgaacagcctgagagccgaggacaccgccgtgtactactgtgctctggaccccagaaagaattgcagaggcggctactgctgtgccaactggggacagggaacactggtcaccgttagctct

SEQ ID NO: 425 - DNA, 357 bp, synthetic construct
  source 1..357: mol_type = other DNA
gccgtgcaactggttgaatctggcggaggactggtgcaggctggcgattctctgagactgacctgtacagccagcggcagagccttcagcacctacttcatggcctggttcagacaggcccctggcaaagagagagagttcgtcgccggaatcgcttggagcggaggctctacagcctacgccgattctgtgaagggcagattcaccatcagccgggacaacgccaagaacaccgtgtacctccagatgaacagcctgaagtccgaggacaccgccgtgtactactgtgccagcagaggcatcgaggtggaagagtttggagcctggggccagggaacccaagtgacagtttcttct

SEQ ID NO: 426 - DNA, 360 bp, synthetic construct
  source 1..360: mol_type = other DNA
caggttcaactggtggaaagtggcggtggcttggtgcaagcaggcggctctcttagactgtcttgtgctgcctctggcggcaccctgagcaagaataccgtggcatggtttaggcaggctcccggaaaagagcggggctttgtcgccagcatcacctgggatggcagaaccacctactacgccgacagcgtgaaaggccggttcaccatctccagagataatgccaagaatacggtctacttgcaaatgaactccctgaagcctgaagatacagccgtgtacgtgtgcgccgatctcggcaaatggcctgctggacctgccgattattggggacagggcacacaagtcaccgtgtcctct

SEQ ID NO: 427 - DNA, 357 bp, synthetic construct
  source 1..357: mol_type = other DNA
ggcgtgacacagagccccacacacctgattaagaccagaggccagcaggccacactgagatgcagccctatcagcggccacaccagcgtgtactggtatcagcaggctctcggactgggcctccagttcctgctttggtacgacgagggcgaagagagaaaccggggcaacttccctcctcggttttccggcagacagttccccaactacagcagcgagctgaacgtgaacgccctggaactggaagatagcgccctgtacctgtgtgcctcttctcttggtggacctcgcggactggctggactgagaggggatgagcagtttttcggccctggcaccagactgaccgtgctggaa

SEQ ID NO: 428 - DNA, 420 bp, synthetic construct
  source 1..420: mol_type = other DNA
atgggacccagactgctgttttgggctctgctgtgtctgctcggcacaggacctgttgaagctggcgtgacacagagccccacacacctgattaagaccagaggccagcaggccacactgagatgcagccctatcagcggccacaccagcgtgtactggtatcagcaggctctcggactgggcctccagttcctgctttggtacgacgagggcgaagagagaaaccggggcaacttccctcctcggttttccggcagacagttccccaactacagcagcgagctgaacgtgaacgccctggaactggaagatagcgccctgtacctgtgtgcctcttctcttggtggacctcgcggactggctggactgagaggggatgagcagtttttcggccctggcaccagactgaccgtgctggaa

SEQ ID NO: 429 - DNA, 351 bp, synthetic construct
  source 1..351: mol_type = other DNA
ggcgtgacacagagccccacacacctgattaagaccagaggccagcaggccacactgagatgcagccctatcagcggccacaccagcgtgtactggtatcagcaggctctcggactgggcctccagttcctgctttggtacgacgagggcgaagagagaaaccggggcaacttccctcctcggttttccggcagacagttccccaactacagcagcgagctgaacgtgaacgccctggaactggaagatagcgccctgtacctgtgtgccagctctctcggcggagatgaactgggagccgatggcaacgagcagttctttggccctggcaccagactgaccgtgctggaa

SEQ ID NO: 430 - DNA, 414 bp, synthetic construct
  source 1..414: mol_type = other DNA
atgggacccagactgctgttttgggctctgctgtgtctgctcggcacaggacctgttgaagctggcgtgacacagagccccacacacctgattaagaccagaggccagcaggccacactgagatgcagccctatcagcggccacaccagcgtgtactggtatcagcaggctctcggactgggcctccagttcctgctttggtacgacgagggcgaagagagaaaccggggcaacttccctcctcggttttccggcagacagttccccaactacagcagcgagctgaacgtgaacgccctggaactggaagatagcgccctgtacctgtgtgccagctctctcggcggagatgaactgggagccgatggcaacgagcagttctttggccctggcaccagactgaccgtgctggaa

SEQ ID NO: 431 - DNA, 31 bp, synthetic construct; identical to SEQ ID NO: 304
  source 1..31: mol_type = other DNA

SEQ ID NO: 432 - DNA, 31 bp, synthetic construct; identical to SEQ ID NO: 304
  source 1..31: mol_type = other DNA

SEQ ID NO: 433 - DNA, 31 bp, synthetic construct; identical to SEQ ID NO: 304
  source 1..31: mol_type = other DNA

SEQ ID NO: 434 - DNA, 31 bp, synthetic construct; identical to SEQ ID NO: 304
  source 1..31: mol_type = other DNA

SEQ ID NO: 435 - DNA, 372 bp, synthetic construct
  source 1..372: mol_type = other DNA
ggctctgacctgggcatcaagctgctgttcgccgctgccaagggccaggacgacgaagtgcggattctgctggctgctggggccgacgtgaacgccaaggatttcgagggctacacccccctgcacgtggccgcctatgatggacacctggaaatcgtggaagtgctgctgaaggctggcgctgatgtgaatgccaaagacagccagggccggacccctctgcatgaagccgcctacagcggccatctggaaattgtggaagtgctgctgaaagccggggcagacgtgaacgctcaggacgacgctggcgagacaccagccgatctggctgcagcttggggccacgaagatatcgccgaggtgctgcagaag

SEQ ID NO: 436 - DNA, 270 bp, synthetic construct
  source 1..270: mol_type = other DNA
atgctgcccgctcctaagaatctggtggtgtccagaatcaccgaggacagcgccagactgtcttggacagctcctgatgccgccttcgacagcttccccatccggtacatcgagacactgatctggggcgaagccatctggctggatgtgcctggaagcgagagaagctacgacctgaccggactgaagcctggcacagagtatgccgtggtcatcaccggcgtgaaaggcggcagattctctagccctctggtggcctctttcaccacc

SEQ ID NO: 437 - DNA, 576 bp, synthetic construct
  source 1..576: mol_type = other DNA
ggcatgcggactgaagacctcccaaaggctgtggtgttcctggagcctcaatggtacagggtgctggagaaggacagtgtgactctgaagtgccagggagcctactcccctgaggacaattccacacagtggtttcacaatgagagcctcatctcaagccaggcctccagctacttcattgacgctgccacagtggacgacagtggagagtacaggtgccagacaaacctctccaccctcagtgacccggtgcagctagaagtccatatcggctggctgttgctccaggcccctcggtgggtgttcaaggaggaagaccctattcacctgaggtgtcacagctggaagaacactgctctgcataaggtcacatatttacagaatggcaaaggcaggaagtattttcatcataattctgacttctacattccaaaagccacactcaaagacagcggctcctacttctgcagggggcttgttgggagtaaaaatgtgtcttcagagactgtgaacatcaccatcactcaaggtttggcagtgtcaaccatctcatcattctttccacctggctaccaa

SEQ ID NO: 438 - DNA, 921 bp, synthetic construct
  source 1..921: mol_type = other DNA
atggccttaccagtgaccgccttgctcctgccgctggccttgctgctccacgccgccaggccgctgttcaatcaagaggtgcagatccctctgaccgagagctactgtggcccctgtcctaagaactggatctgctacaagaacaactgctaccagttcttcgacgagagcaagaattggtacgagagccaggccagctgcatgagccagaatgccagcctgctgaaggtgtacagcaaagaggaccaggacctgctgaaactggtcaagagctaccactggatgggccttgtgcacatccccaccaatggctcttggcagtgggaggacggcagcattctgagccctaacctgctgaccatcatcgagatgcagaagggcgactgcgccctgtacgccagcagctttaagggctacatcgagaattgcagcaccccgaacacctacatctgtatgcagagaaccgttggcggaggcggaagtggaggcggaggatctggcggcggaggctctgacctctttaatcaagaagtccagattccactcaccgaatcctactgcggaccttgtccaaaaaattggatttgttataagaacaactgttatcaattctttgatgagtctaaaaattggtatgagtcccaggcttcctgcatgtctcagaacgcttctctgctgaaagtctactctaaagaagatcaggatctcctgaagctcgtcaagtcttatcattggatggggctcgtccacattcctaccaacggaagctggcaatgggaagatggctccatcctgtctccaaatctgctcacgattattgaaatgcagaaaggggattgtgctctctacgccagctccttcaagggatatattgagaactgtagcacgcccaatacttatatctgtatgcaacggaccgtg

SEQ ID NO: 439 - DNA, 561 bp, synthetic construct
  source 1..561: mol_type = other DNA
atggagctgactgatttgctcctggcggccatgcttcttgcagtggcaagactaactctgtccagccccgtagctcctgcctgtgaccccagactcctaaataaactgctgcgtgactcccacctccttcacagccgactgagtcagtgtcccgacgtggaccctttgtctatccctgttctgctgcctgctgtggactttagcctgggagaatggaaaacccagacggaacagagcaaggcacaggacattctaggggcagtgtcccttctactggagggagtgatggcagcacgaggacagttggaaccctcctgcctctcatccctcctgggacagctttctgggcaggttcgcctcctcttgggggccctgcagggcctcctaggaacccagcttcctctacagggcaggaccacagctcacaaggaccccaatgccctcttcttgagcttgcaacaactgcttcggggaaaggtgcgcttcctgcttctggtagaaggtcccaccctctgtgtcagacggaccctgccaaccacagctgtcccaagcagtacttct

SEQ ID NO: 440 - DNA, 981 bp, synthetic construct
  source 1..981: mol_type = other DNA
atggccttaccagtgaccgccttgctcctgccgctggccttgctgctccacgccgccaggccggaagtgcagctgcttgaaagtggcggcggactgattcagcctggcggatctctgagactgagctgtgccgccagcggcttcaccttttctagccacgccatgacctgggtccgacaggcacctggaaaagggcttgaatgggtgtccgccatcagcggctctggcgattacacacactacgccgacagcgtgaagggcagattcaccatcagcagagacaacagcaagaacaccgtgtacctccagatgaacagcctgagagccgaggacagcgccgtgtattattgcgccaaggatgaggatggcggcagcctgcttggacacagaggacaaggcaccctggtcaccgtttcttccacgcgtggaggtggtggctccgagcctcacagcctgagctacgacatcacagtgatccccaagttcagacccggaccacgttggtgcgctgtgcagggacaagtggacgagaaaaccttcctgcactacgactgcggcaacaagaccgtgacacccgtgtctccactgggcaagaaactgaacgtgaccaccgcctggaaggcccagaatcctgtgctgagagaagtggtggacatcctgaccgagcagctgtgggacattcagctggaaaactacacccctaaagagcccctgacactccaggccagaatgagctgtgaacagaaggccgagggccacagctctggctcttggcagttcagcttcgacggccagattttcctgctgttcgacagcgagaagcggatgtggaccacagtgcatcccggcgctcgcaagatgaaggaaaagtgggagaacgacaaggtggtggctaccctgctgtggggctggtctatgggagattgcatcggctggctggaagatttcctgatgggcatggacagcaccctggaaccttct

SEQ ID NO: 441 - DNA, 153 bp, synthetic construct
  source 1..153: mol_type = other DNA
atggaccccgacctggaaatcagagccgccttcctgcggcagagaaacacagccctgagaacagaggtggccgagctggaacaagaggtgcagcggctggaaaacgaggtgtcccagtacgagacaagatacggccctctcggaggcggaaaa

SEQ ID NO: 442 - DNA, 153 bp, synthetic construct
  source 1..153: mol_type = other DNA
atggaccctgatctcgaaattgaggccgcctttctggaacgcgagaacactgccctggaaaccagggtcgcagagctgagacagagagtgcagagactgcggaacagagtgtctcagtaccgcaccagatatggcccactcggcggaggtaaa

SEQ ID NO: 443 - DNA, 84 bp, synthetic construct
  source 1..84: mol_type = other DNA
gaagttgctgccctcgagaaggaggtagcagctttggaaaaagaagtcgcagcccttgagaaagaagttgcggctctggagaag

SEQ ID NO: 444 - DNA, 84 bp, synthetic construct
  source 1..84: mol_type = other DNA
aaagttgctgctcttaaagaaaaggtcgcggctctgaaagaaaaagtggcggcgctcaaggagaaagttgcagctctcaaagaa

SEQ ID NO: 445 - DNA, 405 bp, synthetic construct
  source 1..405: mol_type = other DNA
ctgttcaatcaagaggtgcagatccctctgaccgagagctactgtggcccctgtcctaagaactggatctgctacaagaacaactgctaccagttcttcgacgagagcaagaattggtacgagagccaggccagctgcatgagccagaatgccagcctgctgaaggtgtacagcaaagaggaccaggacctgctgaaactggtcaagagcgcccactggatgggccttgtgcacatccccaccaatggctcttggcagtgggaggacggcagcattctgagccctaacctgctgaccatcatcgagatgcagaagggcgactgcgccctgtacgccagcagctttaagggcttcatcgagaattgcagcaccccgaacacctacatctgtatgcagagaaccgtt

SEQ ID NO: 446 - DNA, 405 bp, synthetic construct
  source 1..405: mol_type = other DNA
ctgttcaatcaagaggtgcagatccctctgaccgagagctactgtggcccctgtcctaagaactggatctgctacaagaacaactgctaccagttcttcgacgagagcaagaattggtacgagagccaggccagctgcatgagccagaatgccagcctgctgaaggtgtacagcaaagaggaccaggacctgctgaaactggtcaagagcgcccactggatgggccttgtgcacatccccaccaatggctcttggcagtgggaggacggcagcattctgagccctaacctgctgaccatcatcgagatgcagaagggcgactgcgccctgtacgccagcagctttaagggctacatcgagaattgcagcaccccgaacacctacatctgtatgcagagaaccgtt

SEQ ID NO: 447 - DNA, 858 bp, synthetic construct
  source 1..858: mol_type = other DNA
ctgttcaatcaagaggtgcagatccctctgaccgagagctactgtggcccctgtcctaagaactggatctgctacaagaacaactgctaccagttcttcgacgagagcaagaattggtacgagagccaggccagctgcatgagccagaatgccagcctgctgaaggtgtacagcaaagaggaccaggacctgctgaaactggtcaagagcgcccactggatgggccttgtgcacatccccaccaatggctcttggcagtgggaggacggcagcattctgagccctaacctgctgaccatcatcgagatgcagaagggcgactgcgccctgtacgccagcagctttaagggcttcatcgagaattgcagcaccccgaacacctacatctgtatgcagagaaccgttggcggaggcggaagtggaggcggaggatctggcggcggaggctctgacctctttaatcaagaagtccagattccactcaccgaatcctactgcggaccttgtccaaaaaattggatttgttataagaacaactgttatcaattctttgatgagtctaaaaattggtatgagtcccaggcttcctgcatgtctcagaacgcttctctgctgaaagtctactctaaagaagatcaggatctcctgaagctcgtcaagtctgcccattggatggggctcgtccacattcctaccaacggaagctggcaatgggaagatggctccatcctgtctccaaatctgctcacgattattgaaatgcagaaaggggattgtgctctctacgccagctccttcaagggatttattgagaactgtagcacgcccaatacttatatctgtatgcaacggaccgtg

SEQ ID NO: 448 - DNA, 858 bp, synthetic construct
  source 1..858: mol_type = other DNA
ctgttcaatcaagaggtgcagatccctctgaccgagagctactgtggcccctgtcctaagaactggatctgctacaagaacaactgctaccagttcttcgacgagagcaagaattggtacgagagccaggccagctgcatgagccagaatgccagcctgctgaaggtgtacagcaaagaggaccaggacctgctgaaactggtcaagagcgcccactggatgggccttgtgcacatccccaccaatggctcttggcagtgggaggacggcagcattctgagccctaacctgctgaccatcatcgagatgcagaagggcgactgcgccctgtacgccagcagctttaagggctacatcgagaattgcagcaccccgaacacctacatctgtatgcagagaaccgtttctggcggaggcggctctggaggaggcggaagtggcggcggaggcgacctctttaatcaagaagtccagattccactcaccgaatcctactgcggaccttgtccaaaaaattggatttgttataagaacaactgttatcaattctttgatgagtctaaaaattggtatgagtcccaggcttcctgcatgtctcagaacgcttctctgctgaaagtctactctaaagaagatcaggatctcctgaagctcgtcaagtctgcccattggatggggctcgtccacattcctaccaacggaagctggcaatgggaagatggctccatcctgtctccaaatctgctcacgattattgaaatgcagaaaggggattgtgctctctacgccagctccttcaagggatatattgagaactgtagcacgcccaatacttatatctgtatgcaacggaccgtg

SEQ ID NO: 449 - DNA, 540 bp, synthetic construct
  source 1..540: mol_type = other DNA
gagcctcacagcctgagctacgacatcacagtgatccccaagttcagacccggaccacgttggtgcgctgtgcagggacaagtggacgagaaaaccttcctgcactacgactgcggcaacaagaccgtgacacccgtgtctccactgggcaagaaactgaacgtgaccaccgcctggaaggcccagaatcctgtgctgagagaagtggtggacatcctgaccgagcagctgtgggacattcagctggaaaactacacccctaaagagcccctgacactccaggccagaatgagctgtgaacagaaggccgagggccacagctctggctcttggcagttcagcttcgacggccagattttcctgctgttcgacagcgagaagcggatgtggaccacagtgcatcccggcgctcgcaagatgaaggaaaagtgggagaacgacaaggtggtggctaccctgctgtggggctggtctatgggagattgcatcggctggctggaagatttcctgatgggcatggacagcaccctggaaccttct

SEQ ID NO: 450 - DNA, 540 bp, synthetic construct
  source 1..540: mol_type = other DNA
gagcctcacagcctgagctacgacatcacagtgatccccaagttcagacccggaccacgttggtgcgctgtgcagggacaagtggacgagaaaaccttcctgcactacgactgcggcaacaagaccgtgacacccgtgtctccactgggcaagaaactgaacgtgaccaccgcctggaaggcccagaatcctgtgctgagagaagtggtggacatcctgaccgagcagctgtgggacattcagctggaaaactacacccctaaagagcccctgacactccaggccagaatgagctgtgaacagaaggccgagggccacagctctggctcttggcagttcagcttcgacggccagattttcctgctgttcgacagcgagaagcggatgtggaccacagtgcatcccggcgctcgcaagatgaaggaaaagtgggagaacgacaaggtggtggctaccaagctgtacctgtggtctatgggcgactgcatcggctggctggaagatttcctgatgggcatggacagcaccctggaaccttct

SEQ ID NO: 451 - DNA, 45 bp, synthetic construct
  source 1..45: mol_type = other DNA
ggcggaggcggatctggcggcggaggtagcggtggcggaggatct

SEQ ID NO: 452 - DNA, 18 bp, synthetic construct
  source 1..18: mol_type = other DNA
agcggcggaggcggatct

SEQ ID NO: 453 - DNA, 423 bp, synthetic construct
  source 1..423: mol_type = other DNA
gatatccagaaccctgaccctgccgtgtaccagctgagagactctaaatccagtgacaagtctgtctgcctattcaccgattttgattctcaaacaaatgtgtcacaaagtaaggattctgatgtgtatatcacagacaaaactgtgctagacatgaggtctatggacttcaagagcaacagtgctgtggcctggagcaacaaatctgactttgcatgtgcaaacgccttcaacaacagcattattccagaagacaccttcttccccagcccagaaagttcctgtgatgtcaagctggtcgagaaaagctttgaaacagatacgaacctaaactttcaaaacctgtcagtgattgggttccgaatcctcctcctgaaagtggccgggtttaatctgctcatgacgctgcggctgtggtccagc

SEQ ID NO: 454 - DNA, 420 bp, synthetic construct
  source 1..420: mol_type = other DNA
atccagaaccctgaccctgccgtgtaccagctgagagactctaaatccagtgacaagtctgtctgcctattcaccgattttgattctcaaacaaatgtgtcacaaagtaaggattctgatgtgtatatcacagacaaaactgtgctagacatgaggtctatggacttcaagagcaacagtgctgtggcctggagcaacaaatctgactttgcatgtgcaaacgccttcaacaacagcattattccagaagacaccttcttccccagcccagaaagttcctgtgatgtcaagctggtcgagaaaagctttgaaacagatacgaacctaaactttcaaaacctgtcagtgattgggttccgaatcctcctcctgaaagtggccgggtttaatctgctcatgacgctgcggctgtggtccagc

SEQ ID NO: 455 - DNA, 420 bp, synthetic construct
  source 1..420: mol_type = other DNA
atccagaaccctgatcctgccgtgtaccagctgcgggatagcaagagcagcgacaagagcgtgtgtctgttcaccgacttcgacagccagaccaacgtgtcccagagcaaggactccgacgtgtacatcaccgataagtgcgtgctggacatgcggagcatggacttcaagagcaactccgccgtggcctggtccaacaagtccgatttcgcctgcgccaacgccttcaacaacagcattatccccgaggacacattcttcccaagcagcgacgtgccctgcgacgtgaagctggtggaaaagagcttcgagacagacaccaacctgaacttccagaacctgagcgtgatcggcttcagaatcctgctgctgaaagtggccggctttaacctgctgatgaccctgcggctgtggtccagc

SEQ ID NO: 456 - DNA, 420 bp, synthetic construct
  source 1..420: mol_type = other DNA
atccagaaccctgatcctgccgtgtaccagctgcgggatagcaagagcagcgacaagagcgtgtgtctgttcaccgacttcgacagccagaccaacgtgtcccagagcaaggactccgacgtgtacatcaccgataagaccgtgctggacatgcggagcatggacttcaagagcaactccgccgtggcctggtccaacaagtccgatttcgcctgcgccaacgccttcaacaacagcattatccccgaggacacattcttcccaagccccgagagcagctgcgacgtgaagctggtggaaaagagcttcgagacagacaccaacctgaacttccagaacctgagcgtgatcggcttcagaatcctgctgctgaaagtggccggctttaacctgctgatgaccctgcggctgtggtccagc

SEQ ID NO: 457 - DNA, 411 bp, synthetic construct
  source 1..411: mol_type = other DNA
cctgatcctgccgtgtaccagctgcgggatagcaagagcagcgacaagagcgtgtgcctgttcaccgacttcgacagccagaccaacgtgtctcagtctaaggatagtgatgtgtatatcaccgacaagaccgtgctggacatgcggagcatggacttcaagagcaacagcgccgtggcctggtccaacaagagcgacttcgcctgcgccaacgccttcaacaacagcatcatccccgaggacaccttcttccccagccccgagagcagctgcgacgtgaaactggtggagaagagcttcgagacagacaccaacctgaacttccagaacctgagcgtgatcggcttcagaatcctgctgctgaaggtggccggcttcaacctgctgatgaccctgcggctgtggagcagc

SEQ ID NO: 458 - DNA, 420 bp, synthetic construct
  source 1..420: mol_type = other DNA
atccagaaccctgatcctgccgtgtaccagctgcgggatagcaagagcagcgacaagagcgtgtgtctgttcaccgacttcgacagccagaccaacgtgtcccagagcaaggactccgacgtgtacatcaccgataagtgcgtgctggacatgcggagcatggacttcaagagcaactccgccgtggcctggtccaacaagtccgatttcgcctgcgccaacgccttcaacaacagcattatccccgaggacacattcttcccaagccccgagagcagctgcgacgtgaagctggtggaaaagagcttcgagacagacaccaacctgaacttccagaacctgagcgtgatcggcttcagaatcctgctgctgaaagtggccggctttaacctgctgatgaccctgcggctgtggtccagc

SEQ ID NO: 459 - DNA, 411 bp, synthetic construct
  source 1..411: mol_type = other DNA
cctgatcctgccgtgtaccagctgcgggatagcaagagcagcgacaagagcgtgtgtctgttcaccgacttcgacagccagaccaacgtgtcccagagcaaggactccgacgtgtacatcaccgataagtgcgtgctggacatgcggagcatggacttcaagagcaactccgccgtggcctggtccaacaagtccgatttcgcctgcgccaacgccttcaacaacagcattatccccgaggacacattcttcccaagccccgagagcagctgcgacgtgaagctggtggaaaagagcttcgagacagacaccaacctgaacttccagaacctgagcgtgatcggcttcagaatcctgctgctgaaagtggccggctttaacctgctgatgaccctgcggctgtggtccagc

SEQ ID NO: 460 - DNA, 420 bp, synthetic construct
  source 1..420: mol_type = other DNA
atccagaaccctgatcctgccgtgtaccagctgcgggatagcaagagcagcgacaagagcgtgtgtctgttcaccgacttcgacagccagaccaacgtgtcccagagcaaggactccgacgtgtacatcaccgataagaccgtgctggacatgcggagcatggacttcaagagcaactccgccgtggcctggtccaacaagtccgatttcgcctgcgccaacgccttcaacaacagcattatccccgaggacacattcttcccaagcagcgacgtgccctgcgacgtgaagctggtggaaaagagcttcgagacagacaccaacctgaacttccagaacctgagcgtgatcggcttcagaatcctgctgctgaaagtggccggctttaacctgctgatgaccctgcggctgtggtccagc

SEQ ID NO: 461 - DNA, 420 bp, synthetic construct
  source 1..420: mol_type = other DNA
atccagaaccctgatcctgccgtgtaccagctgcgggatagcaagagcagcgacaagagcgtgtgtctgttcaccgacttcgacagccagaccaacgtgtcccagagcaaggactccgacgtgtacatcaccgataagaccgtgctggacatgcggagcatggacttcaagagcaaccgcgccgtggcctggtccaacaagtccgatttcgcctgcgccaacgccttcaacaacagcattatccccgaggacacattcttcccaagccccgagagcagctgcgacgtgaagctggtggaaaagagcttcgagacagacaccaacctgaacttccagaacctgagcgtgatcggcttcagaatcctgctgctgaaagtggccggctttaacctgctgatgaccctgcggctgtggtccagc

SEQ ID NO: 462 - DNA, 420 bp, synthetic construct
  source 1..420: mol_type = other DNA
atccagaaccctgatcctgccgtgtaccagctgcgggatagcaagagcagcgacaagagcgtgtgtctgttcaccgacttcgacagccagaccaacgtgtcccagagcaaggactccgacgtgtacatcaccgataagaccgtgctggacatgcggagcatggacttcaagagcaaccgcgccgtggcctggtccaacaagtccgatttcgcctgcgccaacgccttcaacaacagcattatccccgaggacacattcttcccaagcagcgacgtgccctgcgacgtgaagctggtggaaaagagcttcgagacagacaccaacctgaacttccagaacctgagcgtgatcggcttcagaatcctgctgctgaaagtggccggctttaacctgctgatgaccctgcggctgtggtccagc

SEQ ID NO: 463 - DNA, 420 bp, synthetic construct
  source 1..420: mol_type = other DNA
atccagaaccctgatcctgccgtgtaccagctgcgggatagcaagagcagcgacaagagcgtgtgtctgttcaccgacttcgacagccagaccaacgtgtcccagagcaaggactccgacgtgtacatcaccgataagaccgtgctggacatgcggagcatggacttcaagagcaactccgccgtggcctggtccaacaagtccgatttcgcctgcgccaacgccttcaacaacagcattatccccgaggacacattcttcccaagcagcgacagcagctgcgacgtgaagctggtggaaaagagcttcgagacagacaccaacctgaacttccagaacctgagcgtgatcggcttcagaatcctgctgctgaaagtggccggctttaacctgctgatgaccctgcggctgtggtccagc

SEQ ID NO: 464 - DNA, 717 bp, synthetic construct
  source 1..717: mol_type = other DNA
atccagaaccctgatcctgccgtgtaccagctgcgggatagcaagagcagcgacaagagcgtgtgtctgttcaccgacttcgacagccagaccaacgtgtcccagagcaaggactccgacgtgtacatcaccgataagaccgtgctggacatgcggagcatggacttcaagagcaactccgccgtggcctggtccaacaagtccgatttcgcctgcgccaacgccttcaacaacagcattatccccgaggacacattcttcccaagccccgagagcagctgcggtacccagagttttgggttgttggaccctaaattgtgctatctgttggacggaatcctgttcatttacggagtgatcctgaccgcattgttcctgcgggttaagttttccagatccgcagacgcacccgcttaccaacaagggcagaaccaactctacaatgaacttaatttggggcggagggaagagtacgacgttctggacaaaaggaggggacgagatcccgagatgggcggaaagcctcagcgaaggaagaatccgcaagaggggctttataacgaactccagaaagataaaatggcagaagcctatagtgagattgggatgaagggagaaaggaggaggggtaaaggtcacgatgggttgtaccaaggattgagcacagccactaaagatacctatgatgcgctccacatgcaggccctgccgccaaga

SEQ ID NO: 465 - DNA, 408 bp, synthetic construct
  source 1..408: mol_type = other DNA
atccagaaccctgaacctgccgtgtaccagctgaaggaccccagaagccaggacagcaccctgtgcctgttcaccgacttcgacagccagatcaacgtgcccaagacaatggaaagcggcaccttcatcaccgacaagaccgtgctggacatgaaggctatggacagcaagagcaacggcgccattgcctggtccaaccagaccagcttcacatgccaggacatcttcaaagagacaaacgccacctacccctccagcgacgtgccctgtgacgccaccctgaccgagaagtccttcgagacagacatgaacctcaacttccagaacctgagcgtgatgggcctgcgaatcctgctgctgaaagtggccggcttcaacctgctgatgaccctgcggctgtggtccagc

SEQ ID NO: 466 - DNA, 399 bp, synthetic construct
  source 1..399: mol_type = other DNA
gtgcaggaccctgaccctagcgtgtaccagatgagaagccccaagaccggcaggaccgtgtgcctgttcaccgacttcgacagccaggccgacttccagaagcctgagggggccaccgtgatctccctgaacagcaccgtgctggacatgaaagtgatggacagcaagagcaacggcgctctgacctggaacagcgagacaaacatcgagtgcaaagagaacttccagcagcccttctaccccagcagcaactactcctgcgacgccaagctgatcgagaagtccttcgagacagacatggacctgaacttctacaacctgctggtcatcggcctgagaatcctgctgctgaaagtgatcggcttcaacctgttcatgaccctgaggctgtggtcctgc

SEQ ID NO: 467 - DNA, 531 bp, synthetic construct
  source 1..531: mol_type = other DNA
gaggacctgaacaaggtgttcccacccgaggtcgctgtgtttgagccatcagaagcagagatctcccacacccaaaaggccacactggtgtgcctggccacaggcttcttccccgaccacgtggagctgagctggtgggtgaatgggaaggaggtgcacagtggggtcagcacagacccgcagcccctcaaggagcagcccgccctcaatgactccagatactgcctgagcagccgcctgagggtctcggccaccttctggcagaacccccgcaaccacttccgctgtcaagtccagttctacgggctctcggagaatgacgagtggacccaggatagggccaaacccgtcacccagatcgtcagcgccgaggcctggggtagagcagactgtggctttacctcggtgtcctaccagcaaggggtcctgtctgccaccatcctctatgagatcctgctagggaaggccaccctgtatgctgtgctggtcagcgcccttgtgttgatggccatggtcaagagaaaggatttc

SEQ ID NO: 468 - DNA, 537 bp, synthetic construct
  source 1..537: mol_type = other DNA
gaggacctgaaaaacgtgttcccacccgaggtcgctgtgtttgagccatcagaagcagagatctcccacacccaaaaggccacactggtatgcctggccacaggcttctaccccgaccacgtggagctgagctggtgggtgaatgggaaggaggtgcacagtggggtcagcacagacccgcagcccctcaaggagcagcccgccctcaatgactccagatactgcctgagcagccgcctgagggtctcggccaccttctggcagaacccccgcaaccacttccgctgtcaagtccagttctacgggctctcggagaatgacgagtggacccaggatagggccaaacccgtcacccagatcgtcagcgccgaggcctggggtagagcagactgtggcttcacctccgagtcttaccagcaaggggtcctgtctgccaccatcctctatgagatcttgctagggaaggccaccttgtatgccgtgctggtcagtgccctcgtgctgatggccatggtcaagagaaaggattccagaggc

SEQ ID NO: 469 - DNA, 537 bp, synthetic construct; identical to SEQ ID NO: 468
  source 1..537: mol_type = other DNA

SEQ ID NO: 470 - DNA, 537 bp, synthetic construct
  source 1..537: mol_type = other DNA
gaggacctgaagaacgtgttcccacctgaggtggccgtgttcgagcctagcgaggccgagatcagccacacccagaaagccaccctcgtgtgcctggctaccggcttctaccccgaccatgtggaactgtcttggtgggtcaacggcaaagaggtgcacagcggcgtgtgtaccgacccccagccactgaaagaacagcccgccctgaacgacagccggtactgcctgagcagcagactgagagtgtccgccaccttctggcagaacccccggaaccacttcagatgccaggtgcagttctacggcctgagcgagaacgacgagtggacccaggacagagccaagcccgtgacccagatcgtgtctgccgaagcctggggcagagccgattgcggctttaccagcgagagctaccagcagggcgtgctgagcgccaccatcctgtacgagatcctgctgggcaaggccaccctgtacgccgtgctggtgtctgccctggtgctgatggctatggtcaagcggaaggacagccgggga

SEQ ID NO: 471 - DNA, 537 bp, synthetic construct
  source 1..537: mol_type = other DNA
gaggacctgaagaacgtgttcccacctgaggtggccgtgttcgagcctagcaaggccgagatcgcccacacccagaaagccaccctcgtgtgcctggctaccggcttctaccccgaccatgtggaactgtcttggtgggtcaacggcaaagaggtgcacagcggcgtgtgtaccgacccccagccactgaaagaacagcccgccctgaacgacagccggtactgcctgagcagcagactgagagtgtccgccaccttctggcagaacccccggaaccacttcagatgccaggtgcagttctacggcctgagcgagaacgacgagtggacccaggacagagccaagcccgtgacccagatcgtgtctgccgaagcctggggcagagccgattgcggcatcaccagcgccagctaccaccagggcgtgctgagcgccaccatcctgtacgagatcctgctgggcaaggccaccctgtacgccgtgctggtgtctgccctggtgctgatggctatggtcaagcggaaggacagccgggga

SEQ ID NO: 472 - DNA, 537 bp, synthetic construct
  source 1..537: mol_type = other DNA
gaggacctgaagaacgtgttcccacctgaggtggccgtgttcgagcctagcgaggccgagatcagccacacccagaaagccaccctcgtgtgcctggctaccggcttctaccccgaccatgtggaactgtcttggtgggtcaacggcaaagaggtgcacagcggcgtgtctaccgacccccagccactgaaagaacagcccgccctgaacgacagccggtactgcctgagcagcagactgagagtgtccgccaccttctggcagaacccccggaaccacttcagatgccaggtgcagttctacggcctgagcgagaacgacgagtggacccaggacagagccaagcccgtgacccagatcgtgtctgccgaagcctggggcagagccgattgcggctttaccagcgagagctaccagcagggcgtgctgagcgccaccatcctgtacgagatcctgctgggcaaggccaccctgtacgccgtgctggtgtctgccctggtgctgatggctatggtcaagcggaaggacagccgggga

SEQ ID NO: 473 - DNA, 534 bp, synthetic construct
  source 1..534: mol_type = other DNA
gacctgaagaacgtgttcccacctgaggtggccgtgttcgagcctagcgaggccgagatcagccacacccagaaagccaccctcgtgtgcctggctaccggcttctaccccgaccatgtggaactgtcttggtgggtcaacggcaaagaggtgcacagcggcgtgtctaccgacccccagccactgaaagaacagcccgccctgaacgacagccggtactgcctgagcagcagactgagagtgtccgccaccttctggcagaacccccggaaccacttcagatgccaggtgcagttctacggcctgagcgagaacgacgagtggacccaggacagagccaagcccgtgacccagatcgtgtctgccgaagcctggggcagagccgattgcggctttaccagcgagagctaccagcagggcgtgctgagcgccaccatcctgtacgagatcctgctgggcaaggccaccctgtacgccgtgctggtgtctgccctggtgctgatggctatggtcaagcggaaggacagccgggga

SEQ ID NO: 474 - DNA, 531 bp, synthetic construct
  source 1..531: mol_type = other DNA
gaggacctgaagaacgtgttcccacctgaggtggccgtgttcgagcccagcgaggccgagatttcacacactcagaaagccacactcgtatgtctggcgactggtttctttcccgaccacgtggagctgtcttggtgggtgaacggcaaagaggtgcacagcggggtctctaccgacccccagccactgaaagagcagcccgccctgaacgacagccggtactgcctctcttctcggctgagagtgtccgccaccttctggcagaacccccggaaccacttcagatgccaggtgcagttctacggcctgagcgagaacgacgagtggacccaggacagagccaagcctgtgacccagatcgtgagtgctgaagcgtggggacgcgccgattgcggctttaccagcgagagctaccagcagggcgtgctgtctgccaccatcctgtacgagatcctgctgggcaaggccaccctgtacgccgtgctggtgtccgccctggtgctgatggctatggtgaagcggaaggacttc

SEQ ID NO: 475 - DNA, 531 bp, synthetic construct
  source 1..531: mol_type = other DNA
gaggacctgaacaaggtgttcccacctgaggtggccgtgttcgagcccagcgaggccgagatttcacacactcagaaagccacactcgtatgtctggcgactggtttctttcccgaccacgtggagctgtcttggtgggtgaacggcaaagaggtgcacagcggggtctctaccgacccccagccactgaaagagcagcccgccctgaacgacagccggtactgcctctcttctcggctgagagtgtccgccaccttctggcagaacccccggaaccacttcagatgccaggtgcagttctacggcctgagcgagaacgacgagtggacccaggacagagccaagcctgtgacccagatcgtgagtgctgaagcgtggggacgcgccgattgcggctttaccagcgtgagctaccagcagggcgtgctgtctgccaccatcctgtacgagatcctgctgggcaaggccaccctgtacgccgtgctggtgtccgccctggtgctgatggctatggtgaagcggaaggacttc

SEQ ID NO: 476 - DNA, 537 bp, synthetic construct
  source 1..537: mol_type = other DNA
gaggacctgaagaacgtgttcccacctgaggtggccgtgttcgagcctagcaaggccgagatcgcccacacccagaaagccaccctcgtgtgcctggctaccggcttctaccccgaccatgtggaactgtcttggtgggtcaacggcaaagaggtgcacagcggcgtgtctaccgacccccagccactgaaagaacagcccgccctgaacgacagccggtactgcctgagcagcagactgagagtgtccgccaccttctggcagaacccccggaaccacttcagatgccaggtgcagttctacggcctgagcgagaacgacgagtggacccaggacagagccaagcccgtgacccagatcgtgtctgccgaagcctggggcagagccgattgcggcatcaccagcgccagctaccaccagggcgtgctgagcgccaccatcctgtacgagatcctgctgggcaaggccaccctgtacgccgtgctggtgtctgccctggtgctgatggctatggtcaagcggaaggacagccgggga

SEQ ID NO: 477 - DNA, 537 bp, synthetic construct
  source 1..537: mol_type = other DNA
gaggacctgaagaacgtgttcccacctgaggtggccgtgttcgagcctagcaaggccgagatcgcccacacccagaaagccaccctcgtgtgcctggctaccggcttctaccccgaccatgtggaactgtcttggtgggtcaacggcaaagaggtgcacagcggcgtgtctaccgacccccagccactgaaagaacagcccgccctgaacgacagccggtactgcctgagcagcagactgagagtgtccgccaccttctggcagaacccccggaaccacttcagatgccaggtgcagttctacggcctgagcgagaacgacgagtggacccaggacagagccaagcccgtgacccagatcgtgtctgccgaagcctggggcagagccgattgcggctttaccagcgagagctaccagcagggcgtgctgagcgccaccatcctgtacgagatcctgctgggcaaggccaccctgtacgccgtgctggtgtctgccctggtgctgatggctatggtcaagcggaaggacagccgggga

SEQ ID NO: 478 - DNA, 537 bp, synthetic construct
  source 1..537: mol_type = other DNA
gaggacctgaagaacgtgttcccacctgaggtggccgtgttcgagcctagcaaggccgagatcagccacacccagaaagccaccctcgtgtgcctggctaccggcttctaccccgaccatgtggaactgtcttggtgggtcaacggcaaagaggtgcacagcggcgtgtctaccgacccccagccactgaaagaacagcccgccctgaacgacagccggtactgcctgagcagcagactgagagtgtccgccaccttctggcagaacccccggaaccacttcagatgccaggtgcagttctacggcctgagcgagaacgacgagtggacccaggacagagccaagcccgtgacccagatcgtgtctgccgaagcctggggcagagccgattgcggcatcaccagcgagagctaccagcagggcgtgctgagcgccaccatcctgtacgagatcctgctgggcaaggccaccctgtacgccgtgctggtgtctgccctggtgctgatggctatggtcaagcggaaggacagccgggga

SEQ ID NO: 479 - DNA, 537 bp, synthetic construct
  source 1..537: mol_type = other DNA
gaggacctgaagaacgtgttcccacctgaggtggccgtgttcgagcctagcaaggccgagatcagccacacccagaaagccaccctcgtgtgcctggctaccggcttctaccccgaccatgtggaactgtcttggtgggtcaacggcaaagaggtgcacagcggcgtgtctaccgacccccagccactgaaagaacagcccgccctgaacgacagccggtactgcctgagcagcagactgagagtgtccgccaccttctggcagaacccccggaaccacttcagatgccaggtgcagttctacggcctgagcgagaacgacgagtggacccaggacagagccaagcccgtgacccagatcgtgtctgccgaagcctggggcagagccgattgcggctttaccagcgccagctaccagcagggcgtgctgagcgccaccatcctgtacgagatcctgctgggcaaggccaccctgtacgccgtgctggtgtctgccctggtgctgatggctatggtcaagcggaaggacagccgggga

SEQ ID NO: 480 - DNA, 537 bp, synthetic construct
  source 1..537: mol_type = other DNA
gaggacctgaagaacgtgttcccacctgaggtggccgtgttcgagcctagcaaggccgagatcagccacacccagaaagccaccctcgtgtgcctggctaccggcttctaccccgaccatgtggaactgtcttggtgggtcaacggcaaagaggtgcacagcggcgtgtctaccgacccccagccactgaaagaacagcccgccctgaacgacagccggtactgcctgagcagcagactgagagtgtccgccaccttctggcagaacccccggaaccacttcagatgccaggtgcagttctacggcctgagcgagaacgacgagtggacccaggacagagccaagcccgtgacccagatcgtgtctgccgaagcctggggcagagccgattgcggctttaccagcgagagctaccaccagggcgtgctgagcgccaccatcctgtacgagatcctgctgggcaaggccaccctgtacgccgtgctggtgtctgccctggtgctgatggctatggtcaagcggaaggacagccgggga

SEQ ID NO: 481 - DNA, 537 bp, synthetic construct
  source 1..537: mol_type = other DNA
gaggacctgaagaacgtgttcccacctgaggtggccgtgttcgagcctagcagggccgagatcgcccacacccagaaagccaccctcgtgtgcctggctaccggcttctaccccgaccatgtggaactgtcttggtgggtcaacggcaaagaggtgcacagcggcgtgtctaccgacccccagccactgaaagaacagcccgccctgaacgacagccggtactgcctgagcagcagactgagagtgtccgccaccttctggcagaacccccggaaccacttcagatgccaggtgcagttctacggcctgagcgagaacgacgagtggacccaggacagagccaagcccgtgacccagatcgtgtctgccgaagcctggggcagagccgattgcggctttaccagcgagagctaccagcagggcgtgctgagcgccaccatcctgtacgagatcctgctgggcaaggccaccctgtacgccgtgctggtgtctgccctggtgctgatggctatggtcaagcggaaggacagccgggga

SEQ ID NO: 482 - DNA, 537 bp, synthetic construct
  source 1..537: mol_type = other DNA
gaggacctgaagaacgtgttcccacctgaggtggccgtgttcgagcctagcagggccgagatcagccacacccagaaagccaccctcgtgtgcctggctaccggcttctaccccgaccatgtggaactgtcttggtgggtcaacggcaaagaggtgcacagcggcgtgtctaccgacccccagccactgaaagaacagcccgccctgaacgacagccggtactgcctgagcagcagactgagagtgtccgccaccttctggcagaacccccggaaccacttcagatgccaggtgcagttctacggcctgagcgagaacgacgagtggacccaggacagagccaagcccgtgacccagatcgtgtctgccgaagcctggggcagagccgattgcggctttaccagcgagagctaccagcagggcgtgctgagcgccaccatcctgtacgagatcctgctgggcaaggccaccctgtacgccgtgctggtgtctgccctggtgctgatggctatggtcaagcggaaggacagccgggga

SEQ ID NO: 483 - DNA, 537 bp, synthetic construct
  source 1..537: mol_type = other DNA
gaggacctgaagaacgtgttcccacctgaggtggccgtgttcgagcctagcaaggccgagatcgcccacacccagaaagccaccctcgtgtgcctggctaccggcttctaccccgaccatgtggaactgtcttggtgggtcaacggcaaagaggtgcacagcggcgtgtctaccgacccccagccactgaaagaacagcccgccctgaacgacagccggtactgcctgagcagcggactgagagtgtccgccaccttctggcagaacccccggaaccacttcagatgccaggtgcagttctacggcctgagcgagaacgacgagtggacccaggacagagccaagcccgtgacccagatcgtgtctgccgaagcctggggcagagccgattgcggcatcaccagcgccagctaccaccagggcgtgctgagcgccaccatcctgtacgagatcctgctgggcaaggccaccctgtacgccgtgctggtgtctgccctggtgctgatggctatggtcaagcggaaggacagccgggga

SEQ ID NO: 484 - DNA, 537 bp, synthetic construct
  source 1..537: mol_type = other DNA
gaggacctgaagaacgtgttcccacctgaggtggccgtgttcgagcctagcaaggccgagatcgcccacacccagaaagccaccctcgtgtgcctggctaccggcttctaccccgaccatgtggaactgtcttggtgggtcaacggcaaagaggtgcacagcggcgtgtctaccgacccccagccactgaaagaacagcccgccctgaacgacagccggtactgcctgagcagcggactgagagtgtccgccaccttctggcagaacccccggaaccacttcagatgccaggtgcagttctacggcctgagcgagaacgacgagtggacccaggacagagccaagcccgtgacccagatcgtgtctgccgaagcctggggcagagccgattgcggctttaccagcgagagctaccagcagggcgtgctgagcgccaccatcctgtacgagatcctgctgggcaaggccaccctgtacgccgtgctggtgtctgccctggtgctgatggctatggtcaagcggaaggacagccgggga

SEQ ID NO: 485 - DNA, 537 bp, synthetic construct
  source 1..537: mol_type = other DNA
gaggacctgaagaacgtgttcccacctgaggtggccgtgttcgagcctagcgaggccgagatcagccacacccagaaagccaccctcgtgtgcctggctaccggcttctaccccgaccatgtggaactgtcttggtgggtcaacggcaaagaggtgcacagcggcgtgtctaccgacccccagccactgaaagaacagcccgccctgaacgacagccggtactgcctgagcagcggactgagagtgtccgccaccttctggcagaacccccggaaccacttcagatgccaggtgcagttctacggcctgagcgagaacgacgagtggacccaggacagagccaagcccgtgacccagatcgtgtctgccgaagcctggggcagagccgattgcggctttaccagcgagagctaccagcagggcgtgctgagcgccaccatcctgtacgagatcctgctgggcaaggccaccctgtacgccgtgctggtgtctgccctggtgctgatggctatggtcaagcggaaggacagccgggga

SEQ ID NO: 486 - DNA, 513 bp, synthetic construct
  source 1..513: mol_type = other DNA
gaggatctgcggaacgtgaccccacccaaggtgtccctgttcgagcccagcaaggccgagatcgccaataaacagaaggccaccctcgtgtgcctggccagaggcttcttccccgaccacgtggaactgtcttggtgggtcaacggcaaagaggtgcacagcggcgtcagcaccgaccctcaggcctacaaagagagcaactacagctactgcctgagcagtcggctgcgggtgtccgccaccttctggcacaacccccggaaccacttcagatgccaggtgcagttccacggcctgagcgaagaggacaagtggcccgagggcagccccaagcctgtcacccagaacatcagcgccgaggcctggggcagagcctgtggcatcaccagcagctaccagcagggcgtgctgagcgccaccatcctgtacgagatcctgctgggcaaggccaccctgtacgccgtgctggtgtccaccctggtggtcatggctatggtcaagcggaagaacagc

SEQ ID NO: 487 - DNA, 531 bp, synthetic construct
  source 1..531: mol_type = other DNA
gaggacctccagaaagtgaccccccctaccgtgaccgtgttcgagccttctgaggccgagatcagccggacccagaaagccacactcgtgtgcctggctcggggcttctaccccgatcacgtggaactgtcttggtgggtcaacggcaaagaagtgaccagcggcttcagcaccgacccccagcctgacaaagagcggcccagcgagaacgacagcagctactgcctgagcagcagactgagagtgtccgccagcttctggcacaacccccggaaccacttcagatgccaggtgcagttctacggcctgggcgacgacgacgagtggaagtacgacagagtgaagcccatcacccagaacatcagcgccgaagcctggggcagagccgattgcggctttacctccgtcagctaccaccagggcgtgctgagcgccaccatcctgtacgagatcctgctgggcaaggccaccctgtacgccgtgctggtgtctatcctggtgctgatggctaaagtgaagcggaagggcagc

SEQ ID NO: 488 - DNA, 828 bp, synthetic construct
  source 1..828: mol_type = other DNA
gaggacctgaagaacgtgttcccacctgaggtggccgtgttcgagcctagcgaggccgagatcagccacacccagaaagccaccctcgtgtgcctggctaccggcttctaccccgaccatgtggaactgtcttggtgggtcaacggcaaagaggtgcacagcggcgtgtctaccgacccccagccactgaaagaacagcccgccctgaacgacagccggtactgcctgagcagcagactgagagtgtccgccaccttctggcagaacccccggaaccacttcagatgccaggtgcagttctacggcctgagcgagaacgacgagtggacccaggacagagccaagcccgtgacccagatcgtgtctgccgaagcctggggcagagccgattgcggatcccagagcttcggcctgctggaccccaagctgtgctacctgctggatggcatcctgttcatctacggcgtgatcctgaccgccctgttcctgagagtgaagttcagcagaagcgccgacgcccctgcctaccagcagggacagaaccaactgtacaacgagctgaacctgggcagacgggaagagtacgacgtgctggacaagcggagaggcagggaccctgagatgggcggaaagccccagcggagaaagaacccccaggaaggactgtataacgaactccagaaagacaagatggccgaagcctacagcgagatcggcatgaagggcgagcggagaagaggcaagggccacgatggcctgtaccagggcctgagcaccgccaccaaggacacctatgacgccctgcacatgcaggccctgcctccaaga

SEQ ID NO: 489 - DNA, 807 bp, synthetic construct
  misc_feature 540: note = n is a, c, g, or t
  source 1..807: mol_type = other DNA
gggtgtccagccctacccacaggtgtgggcggcacaccctttccttctctggccccaccaatcatgctgctggtggatggaaagcagcagatggtggtggtctgcctggtccttgatgttgcaccccctggccttgacagccccatctggttctcagccggcaatggcagtgcactggatgccttcacctatggcccttccccagcaacggatggcacctggaccaacttggcccatctctccctgccttctgaggagctggcatcctgggagcctttggtctgccacactgggcctggggctgagggtcacagcaggagtacacagcccatgcatctgtcaggagaggcttctacagccaggacctgcccccaggagcctctcagggggacaccgggtggggcgctgtggctgggggtcctgcggctgctgctcttcaagctgctgctgtttgacctgctcctgacctgcagctgcctgtgcgaccccgcgggcccgctgccttcccccgcaaccaccacccgcctgcgagccctcgggtcccatcgactgcacccggccacggagactgggggacgagaggccaccagctcacccagaccccagcctcgggaccgccgctggggtgacacccctccgggtcggaagcccgggagcccagtatggggggaagggtcttacctcagcagttaccccacttgcccagcacaggcctggtgctcaagatctcgcctcagggctccttcctccagtcttggagcattttttgcaggtgacctgcctcctcctctgcaggctggagctgcc

SEQ ID NO: 490 - DNA, 774 bp, synthetic construct
  source 1..774: mol_type = other DNA
accccattcccttctctggcccctcccatcatgctgctggtggacggcaagcagcagatggtggtcgtgtgcctggtgctggatgtggccccacctggactggacagccccatctggtttagcgccggcaatggctctgccctggacgcctttacctacggcccaagccctgccaccgatggcacctggacaaatctggcccacctgagcctgcccagcgaggaactggcttcttgggagcctctcgtgtgccacacaggacctggcgctgagggacacagcagatccacccagcctatgcacctgtctggcgaggccagcaccgccagaacctgtcctcaggaacctctgagaggcacccctggcggagcactgtggctgggagtgctgagactgctgctgttcaagctgctgctgtttgacctgctgctgacctgctcctgtctgtgcgatcctgccggccctctgccttctcctgccaccaccacaagactgagagccctgggcagccacagactgcaccctgccacagagacaggcggcagagaggccacaagcagccctagaccccagcccagagacagaagatggggcgataccccccctggcagaaagcctggatctccagtgtggggcgagggcagctacctgagcagctaccctacatgccctgcccaggcttggtgcagcagaagcgcactgagagcacccagctctagcctgggagccttctttgccggcgatctgcctccaccactccaggctggcgctgct

SEQ ID NO: 491 - DNA, 630 bp, synthetic construct
  source 1..630: mol_type = other DNA
accccattcccttctctggcccctcccatcatgctgctggtggacggcaagcagcagatggtggtcgtgtgcctggtgctggatgtggccccacctggactggacagccccatctggtttagcgccggcaatggctctgccctggacgcctttacctacggcccaagccctgccaccgatggcacctggacaaatctggcccacctgagcctgcccagcgaggaactggcttcttgggagcctctcgtgtgccacacaggacctggcgctgagggacacagcagatccacccagcctatgcacctgtctggcgaggccagcaccgccagaacctgtcctcaggaacctctgagaggcacccctggcggagcactgtggctgggagtgctgagactgctgctgttcaagctgctgctgtttgacctgctgctgacctgctcctgtctgtgcgatcctgccggccctctgccttctcctgccaccaccacaagactgagagccctgggcagccacagactgcaccctgccacagagacaggcggcagagaggccacaagcagccctagaccccagcccagagacagaagatggggcgataccccccctggcagaaagcctggatctccagtc

SEQ ID NO: 492 - DNA, 567 bp, synthetic construct
  source 1..567: mol_type = other DNA
gataaacaacttgatgcagatgtttcccccaagcccactatttttcttccttcaattgctgaaacaaaactccagaaggctggaacatacctttgtcttcttgagaaatttttcccagatattattaagatacattggcaagaaaagaagagcaacacgattctgggatcccaggaggggaacaccatgaagactaacgacacatacatgaaatttagctggttaacggtgccagaagagtcactggacaaagaacacagatgtatcgtcagacatgagaataataaaaacggaattgatcaagaaattatctttcctccaataaagacagatgtcaccacagtggatcccaaatacaattattcaaaggatgcaaatgatgtcatcacaatggatcccaaagacaattggtcaaaagatgcaaatgatacactactgctgcagctcacaaacacctctgcatattacatgtacctcctcctgctcctcaagagtgtggtctattttgccatcatcacctgctgtctgcttggaagaacggctttctgctgcaatggagagaaatca

SEQ ID NO: 493 - DNA, 519 bp, synthetic construct
  source 1..519: mol_type = other DNA
gacaagcagctggacgccgacgtgtcccccaagcctaccatcttcctgccctctatcgccgagacaaagctccagaaggccggcacctacctgtgcctgctggaaaagttcttcccagatgtgattaagatccactggcaggaaaagaagtccaacaccatcctgggcagccaggaaggcaacaccatgaagaccaacgacacctacatgaagttcagctggctgaccgtgcccgagaagtccctggacaaagaacacagatgcatcgtgcggcacgaaaacaacaagaacggcgtggaccaggaaatcatcttcccacccatcaagaccgatgtgattacaatggaccccaaggacaactgctccaaggacgccaacgataccctgctgctccagctgaccaacaccagcgcctactacatgtacttgttgctgctgctgaagtccgtggtgtacttcgccatcatcacatgctgcctgctgcggagaaccgccttctgctgcaacggcgagaagtct

SEQ ID NO: 494 - DNA, 459 bp, synthetic construct
  source 1..459: mol_type = other DNA
agtcagcctcataccaaaccatccgtttttgtcatgaaaaatggaacaaatgtcgcttgtctggtgaaggaattctaccccaaggatataagaataaatctcgtgtcatccaagaagataacagagtttgatcctgctattgtcatctctcccagtgggaagtacaatgctgtcaagcttggtaaatatgaagattcaaattcagtgacatgttcagttcaacacgacaataaaactgtgcactccactgactttgaagtgaagacagattctacagatcacgtaaaaccaaaggaaactgaaaacacaaagcaaccttcaaagagctgccataaacccaaagccatagttcataccgagaaggtgaacatgatgtccctcacagtgcttgggctacgaatgctgtttgcaaagactgttgccgtcaattttctcttgactgccaagttatttttcttg

SEQ ID NO: 495 - DNA, 459 bp, synthetic construct
  source 1..459: mol_type = other DNA
agccagcctcacaccaagcccagcgtgttcgtgatgaagaacggcaccaacgtggcctgcctcgtgaaagagttctaccccaaggacatcaggatcaacctggtgtccagcaagaagatcaccgagttcgaccccgccatcgtgatctcccccagcggcaagtacaacgccgtgaagctggggaagtacgaggacagcaacagcgtgacctgctccgtgcagcacgacaacaagaccgtgcacagcaccgactttgaagtgaaaaccgactccaccgaccacgtgaagcccaaagagacagagaacaccaagcagcccagcaagagctgccacaagcccaaggccatcgtgcacaccgagaaagtgaacatgatgagcctgaccgtgctgggcctgcggatgctgttcgccaaaaccgtggccgtgaacttcctgctgaccgccaagctgttcttcctc

SEQ ID NO: 496 - DNA, 321 bp, synthetic construct
  source 1..321: mol_type = other DNA
atccagaaccctgatcctgccgtgtacatcaccgataagaccgtgctggacatgcggagcatggacttcaagagcaactccgccgtggcctggtccaacaagtccgatttcgcctgcgccaacgccttcaacaacagcattatccccgaggacacattcttcccaagccccgagagcagctgcgacgtgaagctggtggaaaagagcttcgagacagacaccaacctgaacttccagaacctgagcgtgatcggcttcagaatcctgctgctgaaagtggccggctttaacctgctgatgaccctgcggctgtggtccagc

SEQ ID NO: 497 - DNA, 537 bp, synthetic construct
  source 1..537: mol_type = other DNA
gaggacctgaagaacgtgttcccacctgaggtggccgtgttcgagcctagcagggccgagatcagccacacccagaaagccaccctcgtgtgcctggctaccggcttctaccccgaccatgtggaactgtcttggtgggtcaacggcaaagaggtgcacagcggcgtgtgtaccgacccccagccactgaaagaacagcccgccctgaacgacagccggtactgcctgagcagcagactgagagtgtccgccaccttctggcagaacccccggaaccacttcagatgccaggtgcagttctacggcctgagcgagaacgacgagtggacccaggacagagccaagcccgtgacccagatcgtgtctgccgaagcctggggcagagccgattgcggctttaccagcgagagctaccagcagggcgtgctgagcgccaccatcctgtacgagatcctgctgggcaaggccaccctgtacgccgtgctggtgtctgccctggtgctgatggctatggtcaagcggaaggacagccgggga

SEQ ID NO: 498 - DNA, 537 bp, synthetic construct
  source 1..537: mol_type = other DNA
gaggacctgaagaacgtgttcccacctgaggtggccgtgttcgagcctagcagggccgagatcgcccacacccagaaagccaccctcgtgtgcctggctaccggcttctaccccgaccatgtggaactgtcttggtgggtcaacggcaaagaggtgcacagcggcgtgtgtaccgacccccagccactgaaagaacagcccgccctgaacgacagccggtactgcctgagcagcagactgagagtgtccgccaccttctggcagaacccccggaaccacttcagatgccaggtgcagttctacggcctgagcgagaacgacgagtggacccaggacagagccaagcccgtgacccagatcgtgtctgccgaagcctggggcagagccgattgcggctttaccagcgagagctaccagcagggcgtgctgagcgccaccatcctgtacgagatcctgctgggcaaggccaccctgtacgccgtgctggtgtctgccctggtgctgatggctatggtcaagcggaaggacagccgggga

SEQ ID NO: 499 - DNA, 90 bp, synthetic construct
  source 1..90: mol_type = other DNA
cagagcttcggcctgctggaccccaagctgtgctacctgctggatggcatcctgttcatctacggcgtgatcctgaccgccctgttcctg

SEQ ID NO: 500 - DNA, 429 bp, synthetic construct
  source 1..429: mol_type = other DNA
cagagcttcggcctgctggaccccaagctgtgctacctgctggatggcatcctgttcatctacggcgtgatcctgaccgccctgttcctgagagtgaagttcagcagaagcgccgacgcccctgcctaccagcagggacagaaccaactgtacaacgagctgaacctgggcagacgggaagagtacgacgtgctggacaagcggagaggcagggaccctgagatgggcggaaagccccagcggagaaagaacccccaggaaggactgtataacgaactccagaaagacaagatggccgaagcctacagcgagatcggcatgaagggcgagcggagaagaggcaagggccacgatggcctgtaccagggcctgagcaccgccaccaaggacacctatgacgccctgcacatgcaggccctgcctccaaga

SEQ ID NO: 501 - DNA, 429 bp, synthetic construct; identical to SEQ ID NO: 500
  source 1..429: mol_type = other DNA

SEQ ID NO: 502 - DNA, 123 bp, synthetic construct
  source 1..123: mol_type = other DNA
aggagtaagaggagcaggctcctgcacagtgactacatgaacatgactccacgccgccccggacccacccgcaagcattaccagccctatgccccaccacgcgacttcgcagcctatcgctcc

SEQ ID NO: 503 - DNA, 126 bp, synthetic construct
  source 1..126: mol_type = other DNA
aaacggggcagaaagaaactcctgtatatattcaaacaaccatttatgagaccagtacaaactactcaagaggaagatggctgtagctgccgatttccagaagaagaagaaggaggatgtgaactg

SEQ ID NO: 504 - DNA, 165 bp, synthetic construct
  source 1..165: mol_type = other DNA
aagaaccggaaggccaaggccaagcctgtgacaagaggtgctggtgctggcggcagacagagaggccagaacaaagaaagacctcctcctgtgcctaatcctgactacgagcccatcagaaaaggccagcgggatctgtacagcggcctgaaccagcggcggatc

SEQ ID NO: 505 - DNA, 90 bp, synthetic construct
  source 1..90: mol_type = other DNA
cagagttttgggttgttggaccctaaattgtgctatctgttggacggaatcctgttcatttacggagtgatcctgaccgcattgttcctg

SEQ ID NO: 506 - DNA, 339 bp, synthetic construct
  source 1..339: mol_type = other DNA
cgggttaagttttccagatccgcagacgcacccgcttaccaacaagggcagaaccaactctacaatgaacttaatttggggcggagggaagagtacgacgttctggacaaaaggaggggacgagatcccgagatgggcggaaagcctcagcgaaggaagaatccgcaagaggggctttataacgaactccagaaagataaaatggcagaagcctatagtgagattgggatgaagggagaaaggaggaggggtaaaggtcacgatgggttgtaccaaggattgagcacagccactaaagatacctatgatgcgctccacatgcaggccctgccgccaaga

SEQ ID NO: 507 - DNA, 429 bp, synthetic construct
  source 1..429: mol_type = other DNA
cagagttttgggttgttggaccctaaattgtgctatctgttggacggaatcctgttcatttacggagtgatcctgaccgcattgttcctgcgggttaagttttccagatccgcagacgcacccgcttaccaacaagggcagaaccaactctacaatgaacttaatttggggcggagggaagagtacgacgttctggacaaaaggaggggacgagatcccgagatgggcggaaagcctcagcgaaggaagaatccgcaagaggggctttataacgaactccagaaagataaaatggcagaagcctatagtgagattgggatgaagggagaaaggaggaggggtaaaggtcacgatgggttgtaccaaggattgagcacagccactaaagatacctatgatgcgctccacatgcaggccctgccgccaaga

SEQ ID NO: 508 - DNA, 123 bp, synthetic construct
  source 1..123: mol_type = other DNA
aggagcaagcggtcacggctgctccacagcgattacatgaatatgacaccacgaagaccgggtcctactcgcaaacactaccaaccctacgcacctccccgcgactttgcagcgtaccgatct

SEQ ID NO: 509 - DNA, 126 bp, synthetic construct
  source 1..126: mol_type = other DNA
aagagaggccggaagaagctgctgtacatcttcaagcagcctttcatgcggcccgtgcagaccacccaggaagaggacggctgctcctgccggttccccgaggaagaagaaggcggctgcgagctg

SEQ ID NO: 510 - DNA, 552 bp, synthetic construct
  source 1..552: mol_type = other DNA
cagagcttcggcctgctggaccccaagctgtgctacctgctggatggcatcctgttcatctacggcgtgatcctgaccgccctgttcctgaggagtaagaggagcaggctcctgcacagtgactacatgaacatgactccacgccgccccggacccacccgcaagcattaccagccctatgccccaccacgcgacttcgcagcctatcgctccagagtgaagttcagcagaagcgccgacgcccctgcctaccagcagggacagaaccaactgtacaacgagctgaacctgggcagacgggaagagtacgacgtgctggacaagcggagaggcagggaccctgagatgggcggaaagccccagcggagaaagaacccccaggaaggactgtataacgaactccagaaagacaagatggccgaagcctacagcgagatcggcatgaagggcgagcggagaagaggcaagggccacgatggcctgtaccagggcctgagcaccgccaccaaggacacctatgacgccctgcacatgcaggccctgcctccaaga

SEQ ID NO: 511 - DNA, 555 bp, synthetic construct
  source 1..555: mol_type = other DNA
cagagcttcggcctgctggaccccaagctgtgctacctgctggatggcatcctgttcatctacggcgtgatcctgaccgccctgttcctgaaacggggcagaaagaaactcctgtatatattcaaacaaccatttatgagaccagtacaaactactcaagaggaagatggctgtagctgccgatttccagaagaagaagaaggaggatgtgaactgagagtgaagttcagcagaagcgccgacgcccctgcctaccagcagggacagaaccaactgtacaacgagctgaacctgggcagacgggaagagtacgacgtgctggacaagcggagaggcagggaccctgagatgggcggaaagccccagcggagaaagaacccccaggaaggactgtataacgaactccagaaagacaagatggccgaagcctacagcgagatcggcatgaagggcgagcggagaagaggcaagggccacgatggcctgtaccagggcctgagcaccgccaccaaggacacctatgacgccctgcacatgcaggccctgcctccaaga

SEQ ID NO: 512 - DNA, 552 bp, synthetic construct
  source 1..552: mol_type = other DNA
cagagttttgggttgttggaccctaaattgtgctatctgttggacggaatcctgttcatttacggagtgatcctgaccgcattgttcctgaggagcaagcggtcacggctgctccacagcgattacatgaatatgacaccacgaagaccgggtcctactcgcaaacactaccaaccctacgcacctccccgcgactttgcagcgtaccgatctcgggttaagttttccagatccgcagacgcacccgcttaccaacaagggcagaaccaactctacaatgaacttaatttggggcggagggaagagtacgacgttctggacaaaaggaggggacgagatcccgagatgggcggaaagcctcagcgaaggaagaatccgcaagaggggctttataacgaactccagaaagataaaatggcagaagcctatagtgagattgggatgaagggagaaaggaggaggggtaaaggtcacgatgggttgtaccaaggattgagcacagccactaaagatacctatgatgcgctccacatgcaggccctgccgccaaga

SEQ ID NO: 513 - DNA, 555 bp, synthetic construct
  source 1..555: mol_type = other DNA
cagagttttgggttgttggaccctaaattgtgctatctgttggacggaatcctgttcatttacggagtgatcctgaccgcattgttcctgaagagaggccggaagaagctgctgtacatcttcaagcagcctttcatgcggcccgtgcagaccacccaggaagaggacggctgctcctgccggttccccgaggaagaagaaggcggctgcgagctgcgggttaagttttccagatccgcagacgcacccgcttaccaacaagggcagaaccaactctacaatgaacttaatttggggcggagggaagagtacgacgttctggacaaaaggaggggacgagatcccgagatgggcggaaagcctcagcgaaggaagaatccgcaagaggggctttataacgaactccagaaagataaaatggcagaagcctatagtgagattgggatgaagggagaaaggaggaggggtaaaggtcacgatgggttgtaccaaggattgagcacagccactaaagatacctatgatgcgctccacatgcaggccctgccgccaaga

SEQ ID NO: 514 - DNA, 180 bp, synthetic construct
  source 1..180: mol_type = other DNA
atccccgaggacacattcttcccaagccccgagagcagctgcgacgtgaagctggtggaaaagagcttcgagacagacaccaacctgaacttccagaacctgagcgtgatcggcttcagaatcctgctgctgaaagtggccggctttaacctgctgatgaccctgcggctgtggtccagc

SEQ ID NO: 515 - DNA, 150 bp, synthetic construct
  source 1..150: mol_type = other DNA
gagagcagctgcgacgtgaagctggtggaaaagagcttcgagacagacaccaacctgaacttccagaacctgagcgtgatcggcttcagaatcctgctgctgaaagtggccggctttaacctgctgatgaccctgcggctgtggtccagc

SEQ ID NO: 516 - DNA, 537 bp, synthetic construct; identical to SEQ ID NO: 470
  source 1..537: mol_type = other DNA

SEQ ID NO: 517 - DNA, 345 bp, synthetic construct
  source 1..345: mol_type = other DNA
gaacagcccgccctgaacgacagccggtactgcctgagcagcagactgagagtgtccgccaccttctggcagaacccccggaaccacttcagatgccaggtgcagttctacggcctgagcgagaacgacgagtggacccaggacagagccaagcccgtgacccagatcgtgtctgccgaagcctggggcagagccgattgcggctttaccagcgagagctaccagcagggcgtgctgagcgccaccatcctgtacgagatcctgctgggcaaggccaccctgtacgccgtgctggtgtctgccctggtgctgatggctatggtcaagcggaaggacagccgggga

SEQ ID NO: 518 - DNA, 159 bp, synthetic construct
  source 1..159: mol_type = other DNA
ggcagagccgattgcggctttaccagcgagagctaccagcagggcgtgctgagcgccaccatcctgtacgagatcctgctgggcaaggccaccctgtacgccgtgctggtgtctgccctggtgctgatggctatggtcaagcggaaggacagccgggga

SEQ ID NO: 519 - DNA, 153 bp, synthetic construct
  source 1..153: mol_type = other DNA
gccgattgcggctttaccagcgagagctaccagcagggcgtgctgagcgccaccatcctgtacgagatcctgctgggcaaggccaccctgtacgccgtgctggtgtctgccctggtgctgatggctatggtcaagcggaaggacagccgggga

SEQ ID NO: 520 - DNA, 519 bp, synthetic construct; identical to SEQ ID NO: 493
  source 1..519: mol_type = other DNA

SEQ ID NO: 521 - DNA, 504 bp, synthetic construct
  source 1..504: mol_type = other DNA
gccgacgtgtcccccaagcctaccatcttcctgccctctatcgccgagacaaagctccagaaggccggcacctacctgtgcctgctggaaaagttcttcccagatgtgattaagatccactggcaggaaaagaagtccaacaccatcctgggcagccaggaaggcaacaccatgaagaccaacgacacctacatgaagttcagctggctgaccgtgcccgagaagtccctggacaaagaacacagatgcatcgtgcggcacgaaaacaacaagaacggcgtggaccaggaaatcatcttcccacccatcaagaccgatgtgattacaatggaccccaaggacaactgctccaaggacgccaacgataccctgctgctccagctgaccaacaccagcgcctactacatgtacttgttgctgctgctgaagtccgtggtgtacttcgccatcatcacatgctgcctgctgcggagaaccgccttctgctgcaacggcgagaagtct

SEQ ID NO: 522 - DNA, 498 bp, synthetic construct
  source 1..498: mol_type = other DNA
gtgtcccccaagcctaccatcttcctgccctctatcgccgagacaaagctccagaaggccggcacctacctgtgcctgctggaaaagttcttcccagatgtgattaagatccactggcaggaaaagaagtccaacaccatcctgggcagccaggaaggcaacaccatgaagaccaacgacacctacatgaagttcagctggctgaccgtgcccgagaagtccctggacaaagaacacagatgcatcgtgcggcacgaaaacaacaagaacggcgtggaccaggaaatcatcttcccacccatcaagaccgatgtgattacaatggaccccaaggacaactgctccaaggacgccaacgataccctgctgctccagctgaccaacaccagcgcctactacatgtacttgttgctgctgctgaagtccgtggtgtacttcgccatcatcacatgctgcctgctgcggagaaccgccttctgctgcaacggcgagaagtct

SEQ ID NO: 523 - DNA, 483 bp, synthetic construct
  source 1..483: mol_type = other DNA
accatcttcctgccctctatcgccgagacaaagctccagaaggccggcacctacctgtgcctgctggaaaagttcttcccagatgtgattaagatccactggcaggaaaagaagtccaacaccatcctgggcagccaggaaggcaacaccatgaagaccaacgacacctacatgaagttcagctggctgaccgtgcccgagaagtccctggacaaagaacacagatgcatcgtgcggcacgaaaacaacaagaacggcgtggaccaggaaatcatcttcccacccatcaagaccgatgtgattacaatggaccccaaggacaactgctccaaggacgccaacgataccctgctgctccagctgaccaacaccagcgcctactacatgtacttgttgctgctgctgaagtccgtggtgtacttcgccatcatcacatgctgcctgctgcggagaaccgccttctgctgcaacggcgagaagtct

SEQ ID NO: 524 - DNA, 201 bp, synthetic construct
  source 1..201: mol_type = other DNA
cccatcaagaccgatgtgattacaatggaccccaaggacaactgctccaaggacgccaacgataccctgctgctccagctgaccaacaccagcgcctactacatgtacttgttgctgctgctgaagtccgtggtgtacttcgccatcatcacatgctgcctgctgcggagaaccgccttctgctgcaacggcgagaagtct

SEQ ID NO: 525 - DNA, 177 bp, synthetic construct
  source 1..177: mol_type = other DNA
atggaccccaaggacaactgctccaaggacgccaacgataccctgctgctccagctgaccaacaccagcgcctactacatgtacttgttgctgctgctgaagtccgtggtgtacttcgccatcatcacatgctgcctgctgcggagaaccgccttctgctgcaacggcgagaagtct

SEQ ID NO: 526 - DNA, 459 bp, synthetic construct; identical to SEQ ID NO: 495
  source 1..459: mol_type = other DNA

SEQ ID NO: 527 - DNA, 204 bp, synthetic construct
  source 1..204: mol_type = other DNA
gaagtgaaaaccgactccaccgaccacgtgaagcccaaagagacagagaacaccaagcagcccagcaagagctgccacaagcccaaggccatcgtgcacaccgagaaagtgaacatgatgagcctgaccgtgctgggcctgcggatgctgttcgccaaaaccgtggccgtgaacttcctgctgaccgccaagctgttcttcctc

SEQ ID NO: 528 - DNA, 183 bp, synthetic construct
  source 1..183: mol_type = other DNA
gaccacgtgaagcccaaagagacagagaacaccaagcagcccagcaagagctgccacaagcccaaggccatcgtgcacaccgagaaagtgaacatgatgagcctgaccgtgctgggcctgcggatgctgttcgccaaaaccgtggccgtgaacttcctgctgaccgccaagctgttcttcctc

SEQ ID NO: 529 - DNA, 531 bp, synthetic construct
  source 1..531: mol_type = other DNA
gaggacctgaagaacgtgttcccacctgaggtggccgtgttcgagcctagcgaggccgagatcagccacacccagaaagccaccctcgtgtgcctggctaccggcttctaccccgaccatgtggaactgtcttggtgggtcaacggcaaagaggtgcacagcggcgtgtgtaccgacccccagccactgaaagaacagcccgccctgaacgacagccggtactgcctgagcagcagactgagagtgtccgccaccttctggcagaacccccggaaccacttcagatgccaggtgcagttctacggcctgagcgagaacgacgagtggacccaggacagagccaagcccgtgacccagatcgtgtctgccgaagcctggggcagagccgattgcgacgtgaagctggtggaaaagagcttcgagacagacaccaacctgaacttccagaacctgagcgtgatcggcttcagaatcctgctgctgaaagtggccggctttaacctgctgatgaccctgcggctgtggtccagc

SEQ ID NO: 530 - DNA, 426 bp, synthetic construct
  source 1..426: mol_type = other DNA
atccagaaccctgatcctgccgtgtaccagctgcgggatagcaagagcagcgacaagagcgtgtgtctgttcaccgacttcgacagccagaccaacgtgtcccagagcaaggactccgacgtgtacatcaccgataagtgcgtgctggacatgcggagcatggacttcaagagcaactccgccgtggcctggtccaacaagtccgatttcgcctgcgccaacgccttcaacaacagcattatccccgaggacacattcttcccaagccccgagagcagctgcggctttaccagcgagagctaccagcagggcgtgctgagcgccaccatcctgtacgagatcctgctgggcaaggccaccctgtacgccgtgctggtgtctgccctggtgctgatggctatggtcaagcggaaggacagccgggga

SEQ ID NO: 531 - DNA, 522 bp, synthetic construct
  source 1..522: mol_type = other DNA
gaggacctgaagaacgtgttcccacctgaggtggccgtgttcgagcctagcgaggccgagatcagccacacccagaaagccaccctcgtgtgcctggctaccggcttctaccccgaccatgtggaactgtcttggtgggtcaacggcaaagaggtgcacagcggcgtgtgtaccgacccccagccactgaaagaacagcccgccctgaacgacagccggtactgcctgagcagcagactgagagtgtccgccaccttctggcagaacccccggaaccacttcagatgccaggtgcagttctacggcctgagcgagaacgacgagtggacccaggacagagccaagcccgtgacccagatcgtgtctgccgaagcctggggcagagccgattgcggctttaccagcgagagctaccagcagggcgtgctgagcgccaccaacctgagcgtgatcggcttcagaatcctgctgctgaaagtggccggctttaacctgctgatgaccctgcggctgtggtccagc

SEQ ID NO: 532 - DNA, 435 bp, synthetic construct
  source 1..435: mol_type = other DNA
atccagaaccctgatcctgccgtgtaccagctgcgggatagcaagagcagcgacaagagcgtgtgtctgttcaccgacttcgacagccagaccaacgtgtcccagagcaaggactccgacgtgtacatcaccgataagtgcgtgctggacatgcggagcatggacttcaagagcaactccgccgtggcctggtccaacaagtccgatttcgcctgcgccaacgccttcaacaacagcattatccccgaggacacattcttcccaagccccgagagcagctgcgacgtgaagctggtggaaaagagcttcgagacagacaccaacctgaacttccagatcctgtacgagatcctgctgggcaaggccaccctgtacgccgtgctggtgtctgccctggtgctgatggctatggtcaagcggaaggacagccgggga

SEQ ID NO: 533 - DNA, 480 bp, synthetic construct
  source 1..480: mol_type = other DNA
atccagaaccctgatcctgccgtgtaccagctgcgggatagcaagagcagcgacaagagcgtgtgtctgttcaccgacttcgacagccagaccaacgtgtcccagagcaaggactccgacgtgtacatcaccgataagtgcgtgctggacatgcggagcatggacttcaagagcaactccgccgtggcctggtccaacaagtccgatttcgcctgcgccaacgccttcaacaacagcattatccccgaggacacattcttcccaagccccgagagcagcgactccaccgaccacgtgaagcccaaagagacagagaacaccaagcagcccagcaagagctgccacaagcccaaggccatcgtgcacaccgagaaagtgaacatgatgagcctgaccgtgctgggcctgcggatgctgttcgccaaaaccgtggccgtgaacttcctgctgaccgccaagctgttcttcctcctcaccgcc

SEQ ID NO: 534 - DNA, 789 bp, synthetic construct
  source 1..789: mol_type = other DNA
gaggacctgaagaacgtgttcccacctgaggtggccgtgttcgagcctagcgaggccgagatcagccacacccagaaagccaccctcgtgtgcctggctaccggcttctaccccgaccatgtggaactgtcttggtgggtcaacggcaaagaggtgcacagcggcgtgtgtaccgacccccagccactgaaagaacagcccgccctgaacgacagccggtactgcctgagcagcagactgagagtgtccgccaccttctggcagaacccccggaaccacttcagatgccaggtgcagttctacggcctgagcgagaacgacgagtggacccaggacagagccaagcccgtgacccagatcgtgtctgccgaagcctggggcagagccgatgatgtgattaagatccactggcaggaaaagaagtccaacaccatcctgggcagccaggaaggcaacaccatgaagaccaacgacacctacatgaagttcagctggctgaccgtgcccgagaagtccctggacaaagaacacagatgcatcgtgcggcacgaaaacaacaagaacggcgtggaccaggaaatcatcttcccacccatcaagaccgatgtgattacaatggaccccaaggacaactgctccaaggacgccaacgataccctgctgctccagctgaccaacaccagcgcctactacatgtacttgttgctgctgctgaagtccgtggtgtacttcgccatcatcacatgctgcctgctgatggctatggtcaagcggaaggacagccgggga

SEQ ID NO: 535 - DNA, 531 bp, synthetic construct
  source 1..531: mol_type = other DNA
gaggacctgaagaacgtgttcccacctgaggtggccgtgttcgagcctagcgaggccgagatcagccacacccagaaagccaccctcgtgtgcctggctaccggcttctaccccgaccatgtggaactgtcttggtgggtcaacggcaaagaggtgcacagcggcgtgtctaccgacccccagccactgaaagaacagcccgccctgaacgacagccggtactgcctgagcagcagactgagagtgtccgccaccttctggcagaacccccggaaccacttcagatgccaggtgcagttctacggcctgagcgagaacgacgagtggacccaggacagagccaagcccgtgacccagatcgtgtctgccgaagcctggggcagagccgattgcgacgtgaagctggtggaaaagagcttcgagacagacaccaacctgaacttccagaacctgagcgtgatcggcttcagaatcctgctgctgaaagtggccggctttaacctgctgatgaccctgcggctgtggtccagc

SEQ ID NO: 536 - DNA, 426 bp, synthetic construct
  source 1..426: mol_type = other DNA
atccagaaccctgatcctgccgtgtaccagctgcgggatagcaagagcagcgacaagagcgtgtgtctgttcaccgacttcgacagccagaccaacgtgtcccagagcaaggactccgacgtgtacatcaccgataagaccgtgctggacatgcggagcatggacttcaagagcaactccgccgtggcctggtccaacaagtccgatttcgcctgcgccaacgccttcaacaacagcattatccccgaggacacattcttcccaagccccgagagcagctgcggctttaccagcgagagctaccagcagggcgtgctgagcgccaccatcctgtacgagatcctgctgggcaaggccaccctgtacgccgtgctggtgtctgccctggtgctgatggctatggtcaagcggaaggacagccgggga

SEQ ID NO: 537 - DNA, 522 bp, synthetic construct
  source 1..522: mol_type = other DNA
gaggacctgaagaacgtgttcccacctgaggtggccgtgttcgagcctagcgaggccgagatcagccacacccagaaagccaccctcgtgtgcctggctaccggcttctaccccgaccatgtggaactgtcttggtgggtcaacggcaaagaggtgcacagcggcgtgtctaccgacccccagccactgaaagaacagcccgccctgaacgacagccggtactgcctgagcagcagactgagagtgtccgccaccttctggcagaacccccggaaccacttcagatgccaggtgcagttctacggcctgagcgagaacgacgagtggacccaggacagagccaagcccgtgacccagatcgtgtctgccgaagcctggggcagagccgattgcggctttaccagcgagagctaccagcagggcgtgctgagcgccaccaacctgagcgtgatcggcttcagaatcctgctgctgaaagtggccggctttaacctgctgatgaccctgcggctgtggtccagc

SEQ ID NO: 538 - DNA, 435 bp, synthetic construct
  source 1..435: mol_type = other DNA
atccagaaccctgatcctgccgtgtaccagctgcgggatagcaagagcagcgacaagagcgtgtgtctgttcaccgacttcgacagccagaccaacgtgtcccagagcaaggactccgacgtgtacatcaccgataagaccgtgctggacatgcggagcatggacttcaagagcaactccgccgtggcctggtccaacaagtccgatttcgcctgcgccaacgccttcaacaacagcattatccccgaggacacattcttcccaagccccgagagcagctgcgacgtgaagctggtggaaaagagcttcgagacagacaccaacctgaacttccagatcctgtacgagatcctgctgggcaaggccaccctgtacgccgtgctggtgtctgccctggtgctgatggctatggtcaagcggaaggacagccgggga

SEQ ID NO: 539 - DNA, 480 bp, synthetic construct
  source 1..480: mol_type = other DNA
atccagaaccctgatcctgccgtgtaccagctgcgggatagcaagagcagcgacaagagcgtgtgtctgttcaccgacttcgacagccagaccaacgtgtcccagagcaaggactccgacgtgtacatcaccgataagaccgtgctggacatgcggagcatggacttcaagagcaactccgccgtggcctggtccaacaagtccgatttcgcctgcgccaacgccttcaacaacagcattatccccgaggacacattcttcccaagccccgagagcagcgactccaccgaccacgtgaagcccaaagagacagagaacaccaagcagcccagcaagagctgccacaagcccaaggccatcgtgcacaccgagaaagtgaacatgatgagcctgaccgtgctgggcctgcggatgctgttcgccaaaaccgtggccgtgaacttcctgctgaccgccaagctgttcttcctcctcaccgcc

SEQ ID NO: 540 - DNA, 789 bp, synthetic construct
  source 1..789: mol_type = other DNA
gaggacctgaagaacgtgttcccacctgaggtggccgtgttcgagcctagcgaggccgagatcagccacacccagaaagccaccctcgtgtgcctggctaccggcttctaccccgaccatgtggaactgtcttggtgggtcaacggcaaagaggtgcacagcggcgtgtctaccgacccccagccactgaaagaacagcccgccctgaacgacagccggtactgcctgagcagcagactgagagtgtccgccaccttctggcagaacccccggaaccacttcagatgccaggtgcagttctacggcctgagcgagaacgacgagtggacccaggacagagccaagcccgtgacccagatcgtgtctgccgaagcctggggcagagccgatgatgtgattaagatccactggcaggaaaagaagtccaacaccatcctgggcagccaggaaggcaacaccatgaagaccaacgacacctacatgaagttcagctggctgaccgtgcccgagaagtccctggacaaagaacacagatgcatcgtgcggcacgaaaacaacaagaacggcgtggaccaggaaatcatcttcccacccatcaagaccgatgtgattacaatggaccccaaggacaactgctccaaggacgccaacgataccctgctgctccagctgaccaacaccagcgcctactacatgtacttgttgctgctgctgaagtccgtggtgtacttcgccatcatcacatgctgcctgctgatggctatggtcaagcggaaggacagccgggga

SEQ ID NO: 541 - DNA, 471 bp, synthetic construct
  source 1..471: mol_type = other DNA
atccagaaccctgatcctgccgtgtaccagctgcgggatagcaagagcagcgacaagagcgtgtgtctgttcaccgacttcgacagccagaccaacgtgtcccagagcaaggactccgacgtgtacatcaccgataagtgcgtgctggacatgcggagcatggacttcaagagcaactccgccgtggcctggtccaacaagtccgatttcgcctgcgccaacgccttcaacaacagcattatccccgaggacacattcttcccaagccccgagagcagcgactccaccgaccacgtgaagcccaaagagacagagaacaccaagcagcccagcaagagctgccacaagcccaaggccatcgtgcacaccgagaaagtgaacatgatgagcctgaccgtgctgggcctgcggatgctgttcgccaaaaccgtggccgtgaacttcctgctgaccgccaagctgttcttcctc

SEQ ID NO: 542 - DNA, 792 bp, synthetic construct
  source 1..792: mol_type = other DNA
gaggacctgaagaacgtgttcccacctgaggtggccgtgttcgagcctagcgaggccgagatcagccacacccagaaagccaccctcgtgtgcctggctaccggcttctaccccgaccatgtggaactgtcttggtgggtcaacggcaaagaggtgcacagcggcgtgtgtaccgacccccagccactgaaagaacagcccgccctgaacgacagccggtactgcctgagcagcagactgagagtgtccgccaccttctggcagaacccccggaaccacttcagatgccaggtgcagttctacggcctgagcgagaacgacgagtggacccaggacagagccaagcccgtgacccagatcgtgtctgccgaagcctggggcagagccgatgatgtgattaagatccactggcaggaaaagaagtccaacaccatcctgggcagccaggaaggcaacaccatgaagaccaacgacacctacatgaagttcagctggctgaccgtgcccgagaagtccctggacaaagaacacagatgcatcgtgcggcacgaaaacaacaagaacggcgtggaccaggaaatcatcttcccacccatcaagaccgatgtgattacaatggaccccaaggacaactgctccaaggacgccaacgataccctgctgctccagctgaccaacaccagcgcctactacatgtacttgttgctgctgctgaagtccgtggtgtacttcgccatcatcacatgctgcctgctgcggagaaccgccttctgctgcaacggcgagaagtct

SEQ ID NO: 543 - DNA, 471 bp, synthetic construct
  source 1..471: mol_type = other DNA
atccagaaccctgatcctgccgtgtaccagctgcgggatagcaagagcagcgacaagagcgtgtgtctgttcaccgacttcgacagccagaccaacgtgtcccagagcaaggactccgacgtgtacatcaccgataagaccgtgctggacatgcggagcatggacttcaagagcaactccgccgtggcctggtccaacaagtccgatttcgcctgcgccaacgccttcaacaacagcattatccccgaggacacattcttcccaagccccgagagcagcgactccaccgaccacgtgaagcccaaagagacagagaacaccaagcagcccagcaagagctgccacaagcccaaggccatcgtgcacaccgagaaagtgaacatgatgagcctgaccgtgctgggcctgcggatgctgttcgccaaaaccgtggccgtgaacttcctgctgaccgccaagctgttcttcctc

SEQ ID NO: 544 - DNA, 792 bp, synthetic construct
  source 1..792: mol_type = other DNA
gaggacctgaagaacgtgttcccacctgaggtggccgtgttcgagcctagcgaggccgagatcagccacacccagaaagccaccctcgtgtgcctggctaccggcttctaccccgaccatgtggaactgtcttggtgggtcaacggcaaagaggtgcacagcggcgtgtctaccgacccccagccactgaaagaacagcccgccctgaacgacagccggtactgcctgagcagcagactgagagtgtccgccaccttctggcagaacccccggaaccacttcagatgccaggtgcagttctacggcctgagcgagaacgacgagtggacccaggacagagccaagcccgtgacccagatcgtgtctgccgaagcctggggcagagccgatgatgtgattaagatccactggcaggaaaagaagtccaacaccatcctgggcagccaggaaggcaacaccatgaagaccaacgacacctacatgaagttcagctggctgaccgtgcccgagaagtccctggacaaagaacacagatgcatcgtgcggcacgaaaacaacaagaacggcgtggaccaggaaatcatcttcccacccatcaagaccgatgtgattacaatggaccccaaggacaactgctccaaggacgccaacgataccctgctgctccagctgaccaacaccagcgcctactacatgtacttgttgctgctgctgaagtccgtggtgtacttcgccatcatcacatgctgcctgctgcggagaaccgccttctgctgcaacggcgagaagtct

SEQ ID NO: 545 - DNA, 654 bp, synthetic construct
  source 1..654: mol_type = other DNA
cagagcttcggcctgctggaccccaagctgtgctacctgctggatggcatcctgttcatctacggcgtgatcctgaccgccctgttcctgcacagacgggcctgtcggaagcggatcagacagaaactgcacctgtgctaccccgtgcagaccagccagcctaaactggaactggtggacagcagacccagaagaagcagcacccagctgagaagcggagcctctgtgacagaacctgtggccgaagaacggggcctgatgtctcagcctctgatggaaacctgccactctgtgggagccgcctaccttgagtctctgcccctgcaagatgcctctcctgctggcggaccaagctctccaagggatctgcctgagcctagagtgtccaccgagcacaccaacaacaagatcgagaaaatctacattatgaaggccgacaccgtgatcgtgggcaccgtgaaagctgagttgcccgaaggcagaggactggccggacctgctgaacctgagctggaagaagaactggaagccgatcacacccctcactaccccgagcaagaaaccgaacctcctctgggcagctgctccgatgtgatgctgtccgttgaggaagagggcaaagaggaccctctgcctacagccgcttctggaaaa

SEQ ID NO: 546 - DNA, 993 bp, synthetic construct
  source 1..993: mol_type = other DNA
cagagcttcggcctgctggaccccaagctgtgctacctgctggatggcatcctgttcatctacggcgtgatcctgaccgccctgttcctgcacagacgggcctgtcggaagcggatcagacagaaactgcacctgtgctaccccgtgcagaccagccagcctaaactggaactggtggacagcagacccagaagaagcagcacccagctgagaagcggagcctctgtgacagaacctgtggccgaagaacggggcctgatgtctcagcctctgatggaaacctgccactctgtgggagccgcctaccttgagtctctgcccctgcaagatgcctctcctgctggcggaccaagctctccaagggatctgcctgagcctagagtgtccaccgagcacaccaacaacaagatcgagaaaatctacattatgaaggccgacaccgtgatcgtgggcaccgtgaaagctgagttgcccgaaggcagaggactggccggacctgctgaacctgagctggaagaagaactggaagccgatcacacccctcactaccccgagcaagaaaccgaacctcctctgggcagctgctccgatgtgatgctgtccgttgaggaagagggcaaagaggaccctctgcctacagccgcttctggaaaaagagtgaagttcagcagaagcgccgacgcccctgcctaccagcagggacagaaccaactgtacaacgagctgaacctgggcagacgggaagagtacgacgtgctggacaagcggagaggcagggaccctgagatgggcggaaagccccagcggagaaagaacccccaggaaggactgtataacgaactccagaaagacaagatggccgaagcctacagcgagatcggcatgaagggcgagcggagaagaggcaagggccacgatggcctgtaccagggcctgagcaccgccaccaaggacacctatgacgccctgcacatgcaggccctgcctccaaga

SEQ ID NO: 547 - DNA, 654 bp, synthetic construct
  source 1..654: mol_type = other DNA
cagagttttgggttgttggaccctaaattgtgctatctgttggacggaatcctgttcatttacggagtgatcctgaccgcattgttcctgcatagaagggcctgtagaaagagaatccggcaaaagctgcatctctgttatcctgtgcagacctctcagcccaagttggagctggtggatagccggcctagacggtctagtacacagctgagatccggggccagtgtgactgaaccagttgctgaggaacgcggactgatgagccagccactcatggaaacatgtcacagcgtgggcgctgcctatctcgaaagcctgcctctccaagacgcttctccggcaggcggtccatcttctcctcgggatcttcccgagccacgggtgtccacagaacatacaaacaacaaaattgagaaaatctatattatgaaggctgatacggtcatcgtcgggacagtgaaagccgaactgcctgaaggacgtggccttgctggaccagccgaaccagaactcgaagaggaacttgaggccgaccatacaccacactatcctgagcaagagacagagccaccactgggctcttgcagcgacgtgatgctgagtgtggaagaggaaggcaaagaagatcccctgccaaccgctgcctctggcaaa

SEQ ID NO: 548 - DNA, 993 bp, synthetic construct
  source 1..993: mol_type = other DNA
cagagttttgggttgttggaccctaaattgtgctatctgttggacggaatcctgttcatttacggagtgatcctgaccgcattgttcctgcatagaagggcctgtagaaagagaatccggcaaaagctgcatctctgttatcctgtgcagacctctcagcccaagttggagctggtggatagccggcctagacggtctagtacacagctgagatccggggccagtgtgactgaaccagttgctgaggaacgcggactgatgagccagccactcatggaaacatgtcacagcgtgggcgctgcctatctcgaaagcctgcctctccaagacgcttctccggcaggcggtccatcttctcctcgggatcttcccgagccacgggtgtccacagaacatacaaacaacaaaattgagaaaatctatattatgaaggctgatacggtcatcgtcgggacagtgaaagccgaactgcctgaaggacgtggccttgctggaccagccgaaccagaactcgaagaggaacttgaggccgaccatacaccacactatcctgagcaagagacagagccaccactgggctcttgcagcgacgtgatgctgagtgtggaagaggaaggcaaagaagatcccctgccaaccgctgcctctggcaaacgggttaagttttccagatccgcagacgcacccgcttaccaacaagggcagaaccaactctacaatgaacttaatttggggcggagggaagagtacgacgttctggacaaaaggaggggacgagatcccgagatgggcggaaagcctcagcgaaggaagaatccgcaagaggggctttataacgaactccagaaagataaaatggcagaagcctatagtgagattgggatgaagggagaaaggaggaggggtaaaggtcacgatgggttgtaccaaggattgagcacagccactaaagatacctatgatgcgctccacatgcaggccctgccgccaaga

SEQ ID NO: 549 - DNA, 330 bp, synthetic construct
  source 1..330: mol_type = other DNA
ctgggagagcctcagctgtgctatatcctggacgccatcctgtttctgtacggcatcgtgctgaccctgctgtactgcaaacggggcagaaagaaactcctgtatatattcaaacaaccatttatgagaccagtacaaactactcaagaggaagatggctgtagctgccgatttccagaagaagaagaaggaggatgtgaactgcggctgaagatccaagtgcggaaggccgccatcaccagctacgagaaatccgacggcgtgtacaccggcctgagcaccagaaatcaagagacatacgagacactgaagcacgaaaagcctccacaa

SEQ ID NO: 550 - DNA, 330 bp, synthetic construct
  source 1..330: mol_type = other DNA
ctgggagagcctcagctgtgctatatcctggacgccatcctgtttctgtacggcatcgtgctgaccctgctgtactgccggctgaagatccaagtgcggaaggccgccatcaccagctacgagaaatccgacggcgtgtacaccggcctgagcaccagaaatcaagagacatacgagacactgaagcacgaaaagcctccacaaaaacggggcagaaagaaactcctgtatatattcaaacaaccatttatgagaccagtacaaactactcaagaggaagatggctgtagctgccgatttccagaagaagaagaaggaggatgtgaactg

SEQ ID NO: 551 - DNA, 330 bp, synthetic construct
  source 1..330: mol_type = other DNA
ctcggagaaccacagctctgttacattctggatgctatcctgttcctctatgggatcgtcctgacactcctgtattgcaagagaggccggaagaagctgctgtacatcttcaagcagcctttcatgcggcccgtgcagaccacccaggaagaggacggctgctcctgccggttccccgaggaagaagaaggcggctgcgagctgagactcaaaattcaagttcgcaaagccgccattacctcttacgagaagagtgatggggtgtacacaggactgtctacccggaatcaagaaacctacgaaaccctcaaacatgagaagccacctcag

SEQ ID NO: 552 - DNA, 330 bp, synthetic construct
  source 1..330: mol_type = other DNA
ctcggagaaccacagctctgttacattctggatgctatcctgttcctctatgggatcgtcctgacactcctgtattgcagactcaaaattcaagttcgcaaagccgccattacctcttacgagaagagtgatggggtgtacacaggactgtctacccggaatcaagaaacctacgaaaccctcaaacatgagaagccacctcagaagagaggccggaagaagctgctgtacatcttcaagcagcctttcatgcggcccgtgcagaccacccaggaagaggacggctgctcctgccggttccccgaggaagaagaaggcggctgcgagctg

SEQ ID NO: 553 - DNA, 327 bp, synthetic construct
  source 1..327: mol_type = other DNA
ctgggagagcctcagctgtgctatatcctggacgccatcctgtttctgtacggcatcgtgctgaccctgctgtactgcaggagtaagaggagcaggctcctgcacagtgactacatgaacatgactccacgccgccccggacccacccgcaagcattaccagccctatgccccaccacgcgacttcgcagcctatcgctcccggctgaagatccaagtgcggaaggccgccatcaccagctacgagaaatccgacggcgtgtacaccggcctgagcaccagaaatcaagagacatacgagacactgaagcacgaaaagcctccacaa

SEQ ID NO: 554 - DNA, 327 bp, synthetic construct
  source 1..327: mol_type = other DNA
ctcggagaaccacagctctgttacattctggatgctatcctgttcctctatgggatcgtcctgacactcctgtattgcaggagcaagcggtcacggctgctccacagcgattacatgaatatgacaccacgaagaccgggtcctactcgcaaacactaccaaccctacgcacctccccgcgactttgcagcgtaccgatctagactcaaaattcaagttcgcaaagccgccattacctcttacgagaagagtgatggggtgtacacaggactgtctacccggaatcaagaaacctacgaaaccctcaaacatgagaagccacctcag

SEQ ID NO: 555 - DNA, 486 bp, synthetic construct
  source 1..486: mol_type = other DNA
cagagcttcggcctgctggaccccaagctgtgctacctgctggatggcatcctgttcatctacggcgtgatcctgaccgccctgttcctgcacctgtgctgtagaagaaggcgggccagactgcggtttatgaagcagttctacaagagagtgaagttcagcagaagcgccgacgcccctgcctaccagcagggacagaaccaactgtacaacgagctgaacctgggcagacgggaagagtacgacgtgctggacaagcggagaggcagggaccctgagatgggcggaaagccccagcggagaaagaacccccaggaaggactgtataacgaactccagaaagacaagatggccgaagcctacagcgagatcggcatgaagggcgagcggagaagaggcaagggccacgatggcctgtaccagggcctgagcaccgccaccaaggacacctatgacgccctgcacatgcaggccctgcctccaaga

SEQ ID NO: 556 - DNA, 525 bp, synthetic construct
  source 1..525: mol_type = other DNA
cagagttttgggttgttggaccctaaattgtgctatctgttggacggaatcctgttcatttacggagtgatcctgaccgcattgttcctgctgtactgcaaccaccggaacaggcggagagtgtgcaagtgccctagacctgtggtcaagagcggcgacaagcctagcctgagcgccagatatgttcgggttaagttttccagatccgcagacgcacccgcttaccaacaagggcagaaccaactctacaatgaacttaatttggggcggagggaagagtacgacgttctggacaaaaggaggggacgagatcccgagatgggcggaaagcctcagcgaaggaagaatccgcaagaggggctttataacgaactccagaaagataaaatggcagaagcctatagtgagattgggatgaagggagaaaggaggaggggtaaaggtcacgatgggttgtaccaaggattgagcacagccactaaagatacctatgatgcgctccacatgcaggccctgccgccaaga

SEQ ID NO: 557 - DNA, 549 bp, synthetic construct
  source 1..549: mol_type = other DNA
cagagcttcggcctgctggaccccaagctgtgctacctgctggatggcatcctgttcatctacggcgtgatcctgaccgccctgttcctgtgcgtgcggtgcagacaccggcggagacaggccgagagaatgagccagatcaagagactgctgtccgagaagaaaacctgccagtgcccccacagattccagaaaacatgcagccccatcagagtgaagttcagcagaagcgccgacgcccctgcctaccagcagggacagaaccaactgtacaacgagctgaacctgggcagacgggaagagtacgacgtgctggacaagcggagaggcagggaccctgagatgggcggaaagccccagcggagaaagaacccccaggaaggactgtataacgaactccagaaagacaagatggccgaagcctacagcgagatcggcatgaagggcgagcggagaagaggcaagggccacgatggcctgtaccagggcctgagcaccgccaccaaggacacctatgacgccctgcacatgcaggccctgcctccaaga

SEQ ID NO: 558 - DNA, 549 bp, synthetic construct
  source 1..549: mol_type = other DNA
cagagttttgggttgttggaccctaaattgtgctatctgttggacggaatcctgttcatttacggagtgatcctgaccgcattgttcctgtgtgtgaggtgccgccatcgacggaggcaggcagaaagaatgtcccagataaagcggttgcttagtgaaaagaaaacctgccagtgtcctcaccgattccagaagacgtgctcccccattcgggttaagttttccagatccgcagacgcacccgcttaccaacaagggcagaaccaactctacaatgaacttaatttggggcggagggaagagtacgacgttctggacaaaaggaggggacgagatcccgagatgggcggaaagcctcagcgaaggaagaatccgcaagaggggctttataacgaactccagaaagataaaatggcagaagcctatagtgagattgggatgaagggagaaaggaggaggggtaaaggtcacgatgggttgtaccaaggattgagcacagccactaaagatacctatgatgcgctccacatgcaggccctgccgccaaga

SEQ ID NO: 559 - DNA, 588 bp, synthetic construct
  source 1..588: mol_type = other DNA
atgaaccaggccgatcctagactgagagccgtgtgtctgtggaccctgacatctgccgctatgagcagaggcgacaactgcactgatctgctggccctgggaatccccagcatcacacaggcttggggactgtgggttctgctgggagctgtgaccctgctgttcctgatttctctggccgctcacctgagccagtggaccagaggaagaagcagaagtcacccaggccagggaagatccggcgagtctgtggaagaggtgcccctgtatggcaacctgcactacctccagaccggcagactgtctcaggacccagaaccagatcagcaggaccctacactcggaggacctgccagagctgccgaggaagtgatgtgttacaccagcctccagctgcggcctcctcagggaagaatacctggacctggcacacccgtgaagtacagcgaagtggtgctggacagcgagcccaagtctcaggcttctggacctgagcctgagctgtacgcctctgtgtgtgctcagaccagaagggccagagccagctttccagatcaggcttacgccaactctcagcctgctgcttct

SEQ ID NO: 560 - DNA, 516 bp, synthetic construct
  source 1..516: mol_type = other DNA
gacaactgcactgatctgctggccctgggaatccccagcatcacacaggcttggggactgtgggttctgctgggagctgtgaccctgctgttcctgatttctctggccgctcacctgagccagtggaccagaggaagaagcagaagtcacccaggccagggaagatccggcgagtctgtggaagaggtgcccctgtatggcaacctgcactacctccagaccggcagactgtctcaggacccagaaccagatcagcaggaccctacactcggaggacctgccagagctgccgaggaagtgatgtgttacaccagcctccagctgcggcctcctcagggaagaatacctggacctggcacacccgtgaagtacagcgaagtggtgctggacagcgagcccaagtctcaggcttctggacctgagcctgagctgtacgcctctgtgtgtgctcagaccagaagggccagagccagctttccagatcaggcttacgccaactctcagcctgctgcttct

SEQ ID NO: 561 - DNA, 588 bp, synthetic construct
  source 1..588: mol_type = other DNA
atgaatcaggctgaccccagactgcgggctgtctgtctttggacactgactagcgccgccatgtccaggggcgatcagtgcacagacctgctcgctctgggcatccctagtattactcaggcatggggcctctgggtgctcctgggtgctgttacactcctgtttctcatcagcctggctgcccacctgtctcaatggacaaggggcagaagcagatcacaccccggacaaggcagaagcggcgagagcgttgaagaagtgcctctgtacggaaatctccactacctgcaaacaggacggctgagtcaggaccccgagcctgaccaacaagatccaacacttggcggccctgctagagccgctgaagaagtcatgtgctacacttccctgcaactgcggccaccacaaggcaggattccaggaccaggcactcctgtgaaatactctgaggtcgtgctggactccgagcctaagagccaagcctctggacccgaacctgaactctatgccagcgtgtgcgcccagacacgtagagctagggccagttttcccgaccaagcctatgccaatagtcagcctgccgcctct

SEQ ID NO: 562 - DNA, 516 bp, synthetic construct
  source 1..516: mol_type = other DNA
gatcagtgcacagacctgctcgctctgggcatccctagtattactcaggcatggggcctctgggtgctcctgggtgctgttacactcctgtttctcatcagcctggctgcccacctgtctcaatggacaaggggcagaagcagatcacaccccggacaaggcagaagcggcgagagcgttgaagaagtgcctctgtacggaaatctccactacctgcaaacaggacggctgagtcaggaccccgagcctgaccaacaagatccaacacttggcggccctgctagagccgctgaagaagtcatgtgctacacttccctgcaactgcggccaccacaaggcaggattccaggaccaggcactcctgtgaaatactctgaggtcgtgctggactccgagcctaagagccaagcctctggacccgaacctgaactctatgccagcgtgtgcgcccagacacgtagagctagggccagttttcccgaccaagcctatgccaatagtcagcctgccgcctct

SEQ ID NO: 563 - DNA, 558 bp, synthetic construct
  source 1..558: mol_type = other DNA
atgagcggaatcagcggctgccctttctttctgtggggactgctggctctgctgggactcgccctggttatcagcctgatcttcaacatcagccactacgtggaaaagcagcggcaggacaagatgtactcctacagcagcgaccacaccagagtggacgagtactacatcgaggacacccctatctacggcaacctggacgacatgatctccgagcctatggacgagaactgctacgagcagatgaaggccagacctgagaagtccgtgaacaagatgcaagaggccacaccttccgctcaggccaccaacgagacacagatgtgttacgccagcctggaccacagcgtgaagggcaagagaagaaagccccggaagcagaacacccacttcagcgacaaggatggcgacgaacagctgcacgccattgatgccagcgtgtccaagaccacactggtggacagcttcagccctgagtctcaggccgtggaagagaacatccacgacgaccccatcagactgttcggactgatccgggccaagagagagcctattaac

SEQ ID NO: 564 - DNA, 558 bp, synthetic construct
  source 1..558: mol_type = other DNA
atgtctggaatctccggctgtccatttttcctctggggcctgcttgccctgcttggcctggctctggttatctctctgatctttaatatctctcactatgtcgagaagcagcgccaagataagatgtatagctactcctccgaccacacacgggttgacgaatattacattgaggatacgcccatctatgggaacctcgatgatatgattagcgagccgatggatgagaattgctatgaacaaatgaaggctcggcccgagaaaagcgtcaacaaaatgcaagaagctacccctagcgcacaggccacaaatgagactcaaatgtgctatgcctctctggaccactctgtgaaaggcaagcggcggaagcccagaaaacagaatacccatttctccgataaggacggggatgagcagctccatgccatcgacgcctccgtgtctaaaacaaccctggtggactctttcagccccgaaagccaggccgtcgaggaaaacattcacgacgatcctatccggctgtttggcctgattagagccaagcgcgagcccatcaat

SEQ ID NO: 565 - DNA, 642 bp, synthetic construct
  source 1..642: mol_type = other DNA
ggaatgaggactgaggatcttcccaaagctgtcgtctttctcgaaccccaatggtatcgggtgctcgaaaaagactctgtgacactgaaatgccaaggggcctactctcccgaggacaactccacacagtggtttcataatgagtccctcatcagctctcaggccagctcttatttcattgatgccgctacagtggacgactccggcgagtatcggtgtcagaccaatctgtctacactgtctgaccccgtgcagcttgaggtccacattggatggttgctcttgcaagccccacgctgggttttcaaagaggaagatccaatccatctgcggtgccacagctggaaaaacaccgctctccacaaagtcacatacctgcaaaatggcaaaggacgcaaatacttccatcacaattccgatttttacattccgaaggctaccctgaaagacagcggcagctatttctgccggggactcgtcggctccaagaatgtgtcctccgaaaccgtgaatatcacgattacccaaggactggctgtgcctacaatctctagcttctttccgcctggataccaagtctccttctgtcttgtgatggtcctcctgtttgctgtggacacaggactgtacttttccgtgaaa

SEQ ID NO: 566 - DNA, 639 bp, synthetic construct
  source 1..639: mol_type = other DNA
ggaatgaggactgaggatcttcccaaagctgtcgtctttctcgaaccccaatggtatcgggtgctcgaaaaagactctgtgacactgaaatgccaaggggcctactctcccgaggacaactccacacagtggtttcataatgagtccctcatcagctctcaggccagctcttatttcattgatgccgctacagtggacgactccggcgagtatcggtgtcagaccaatctgtctacactgtctgaccccgtgcagcttgaggtccacattggatggttgctcttgcaagccccacgctgggttttcaaagaggaagatccaatccatctgcggtgccacagctggaaaaacaccgctctccacaaagtcacatacctgcaaaatggcaaaggacgcaaatacttccatcacaattccgatttttacattccgaaggctaccctgaaagacagcggcagctatttctgccggggactcgtcggctccaagaatgtgtcctccgaaaccgtgaatatcacgattacccaaggactggctgtgcctacaatctctagcttctttccgcctggataccaagtctccttctgtcttgtgatggtcctcctgtttgctgtggacacaggactgtacttttccgtg

SEQ ID NO: 567 - DNA, 636 bp, synthetic construct
  source 1..636: mol_type = other DNA
ggaatgaggactgaggatcttcccaaagctgtcgtctttctcgaaccccaatggtatcgggtgctcgaaaaagactctgtgacactgaaatgccaaggggcctactctcccgaggacaactccacacagtggtttcataatgagtccctcatcagctctcaggccagctcttatttcattgatgccgctacagtggacgactccggcgagtatcggtgtcagaccaatctgtctacactgtctgaccccgtgcagcttgaggtccacattggatggttgctcttgcaagccccacgctgggttttcaaagaggaagatccaatccatctgcggtgccacagctggaaaaacaccgctctccacaaagtcacatacctgcaaaatggcaaaggacgcaaatacttccatcacaattccgatttttacattccgaaggctaccctgaaagacagcggcagctatttctgccggggactcgtcggctccaagaatgtgtcctccgaaaccgtgaatatcacgattacccaaggactggctgtgcctacaatctctagcttctttccgcctggataccaagtctccttctgtcttgtgatggtcctcctgtttgctgtggacacaggactgtacttttcc

SEQ ID NO: 568 - DNA, 639 bp, synthetic construct
  source 1..639: mol_type = other DNA
ggaatgaggactgaggatcttcccaaagctgtcgtctttctcgaaccccaatggtatcgggtgctcgaaaaagactctgtgacactgaaatgccaaggggcctactctcccgaggacaactccacacagtggtttcataatgagtccctcatcagctctcaggccagctcttatttcattgatgccgctacagtggacgactccggcgagtatcggtgtcagaccaatctgtctacactgtctgaccccgtgcagcttgaggtccacattggatggttgctcttgcaagccccacgctgggttttcaaagaggaagatccaatccatctgcggtgccacagctggaaaaacaccgctctccacaaagtcacatacctgcaaaatggcaaaggacgcaaatacttccatcacaattccgatttttacattccgaaggctaccctgaaagacagcggcagctatttctgccggggactcgtcggctccaagaatgtgtcctccgaaaccgtgaatatcacgattacccaaggactggctgtgcctacaatctctagcttctttccgcctggataccaagtctccttctgtcttgtgatggtcctcctgtttgctgtggacacaggactgtacttttacgtg

SEQ ID NO: 569 - DNA, 714 bp, synthetic construct
  source 1..714: mol_type = other DNA
ggaatgaggactgaggatcttcccaaagctgtcgtctttctcgaaccccaatggtatcgggtgctcgaaaaagactctgtgacactgaaatgccaaggggcctactctcccgaggacaactccacacagtggtttcataatgagtccctcatcagctctcaggccagctcttatttcattgatgccgctacagtggacgactccggcgagtatcggtgtcagaccaatctgtctacactgtctgaccccgtgcagcttgaggtccacattggatggttgctcttgcaagccccacgctgggttttcaaagaggaagatccaatccatctgcggtgccacagctggaaaaacaccgctctccacaaagtcacatacctgcaaaatggcaaaggacgcaaatacttccatcacaattccgatttttacattccgaaggctaccctgaaagacagcggcagctatttctgccggggactcgtcggctccaagaatgtgtcctccgaaaccgtgaatatcacgattacccaaggactggctgtgcctacaatctctagcttctttccgcctggataccaagtctccttctgtcttgtgatggtcctcctgtttgctgtggacacaggactgtacttttccgtgaaaacgaacatccgcagctccacacgcgattggaaagatcacaagtttaaatggcgcaaagatccccaggacaag

SEQ ID NO: 570 - DNA, 66 bp, synthetic construct
  source 1..66: mol_type = other DNA
gtgaagcagaccctgaatttcgacctgctgaagctggctggcgacgtggaatccaacccaggccct

SEQ ID NO: 571 - DNA, 54 bp, synthetic construct
  source 1..54: mol_type = other DNA
gagggcagaggaagtctactaacctgcggagatgtggaagaaaatcctggccca

SEQ ID NO: 572 - DNA, 54 bp, synthetic construct
  source 1..54: mol_type = other DNA
gagggaagaggtagcctcctcacctgtggggacgttgaagagaaccccggccca

SEQ ID NO: 573 - DNA, 57 bp, synthetic construct
  source 1..57: mol_type = other DNA
gcaacaaacttctcactactcaaacaagcaggtgacgtggaggagaatcccgggcct

SEQ ID NO: 574 - DNA, 57 bp, synthetic construct
  source 1..57: mol_type = other DNA
gcaacaaacttctcactactcaaacaagcaggtgacgtggagcagaatcccgggcct

SEQ ID NO: 575 - DNA, 60 bp, synthetic construct
  source 1..60: mol_type = other DNA
caatgcactaattacgcattgctcaagctggccggtgacgttgagagtaatcctggcccc

SEQ ID NO: 576 - DNA, 12 bp, synthetic construct
  source 1..12: mol_type = other DNA
tctggatctgga

SEQ ID NO: 577 - DNA, 12 bp, synthetic construct
  source 1..12: mol_type = other DNA
agcggatctggc

SEQ ID NO: 578 - DNA, 12 bp, synthetic construct
  source 1..12: mol_type = other DNA
cgggccaagaga

SEQ ID NO: 579 - DNA, 12 bp, synthetic construct
  source 1..12: mol_type = other DNA
agggccaagcga

SEQ ID NO: 580 - DNA, 12 bp, synthetic construct
  source 1..12: mol_type = other DNA
cgcgccaagaga

SEQ ID NO: 581 - DNA, 318 bp, synthetic construct
  source 1..318: mol_type = other DNA
ggacagcctaaggccaatcctaccgtgacactgttccctccaagcagcgaagaactccaggccaacaaggccacacttgtgtgcctgatctccgacttctaccctggggctgtgacagtggcttggaaggccgatggatctcctgtgaaagccggcgtggaaaccaccaagccatccaagcagagcaacaacaaatacgccgccagctcctacctgagcctgacacctgagcagtggaagtcccacagatcctacagctgccaagtgacccacgaaggcagcaccgtggaaaagacagtggcccctacagagtgcagc

SEQ ID NO: 582 - DNA, 309 bp, synthetic construct
  source 1..309: mol_type = other DNA
gcctctacaaagggaccctccgtgtttcctctggctcccagcagcaagtctacaagcggaggaacagccgctctgggctgcctggtcaaggattactttcccgagcctgtgaccgtgtcctggaatagcggagcactgacaagcggcgtgcacacctttccagccgtgctgcaaagcagcggcctgtactctctgagcagcgtggtcacagtgcctagctctagcctgggcacccagacctacatctgcaatgtgaaccacaagcctagcaacaccaaggtggacaagagagtggaacccaagagctgt

SEQ ID NO: 583 - DNA, 306 bp, synthetic construct
  source 1..306: mol_type = other DNA
gcctctacaaagggaccctccgtgtttcctctggctcccagcagcaagtctacaagcggaggaacagccgctctgggctgcctggtcaaggattactttcccgagcctgtgaccgtgtcctggaatagcggagcactgacaagcggcgtgcacacctttccagccgtgctgcaaagcagcggcctgtactctctgagcagcgtggtcacagtgcctagctctagcctgggcacccagacctacatctgcaatgtgaaccacaagcctagcaacaccaaggtggacaagagagtggaacccaagagc

SEQ ID NO: 584 - DNA, 339 bp, synthetic construct
  source 1..339: mol_type = other DNA
gcctctacaaagggaccctccgtgtttcctctggctcccagcagcaagtctacaagcggaggaacagccgctctgggctgcctggtcaaggattactttcccgagcctgtgaccgtgtcctggaatagcggagcactgacaagcggcgtgcacacctttccagccgtgctgcaaagcagcggcctgtactctctgagcagcgtggtcacagtgcctagctctagcctgggcacccagacctacatctgcaatgtgaaccacaagcctagcaacaccaaggtggacaagagagtggaacccaagagctgtgataaaactcatacctgtccgccatgcccg

SEQ ID NO: 585 - DNA, 309 bp, synthetic construct
  source 1..309: mol_type = other DNA
gctagtaccaagggcccatcggtcttccccctggcaccctcctccaagagcacctctgggggcacagcggccctgggctgcctggtcaaggactacttccccgaaccggtgacggtgtcgtggaactcaggcgccctgaccagcggcgtgcacaccttcccggctgtcctacagtcctcaggactctactccctcagcagcgtggtgaccgtgccctccagcagcttgggcacccagacctacatctgcaacgtgaatcacaagcccagcaacaccaaggtggacaagaaagttgagcccaaatcttgt

SEQ ID NO: 586 - DNA, 306 bp, synthetic construct
  source 1..306: mol_type = other DNA
gctagtaccaagggcccatcggtcttccccctggcaccctcctccaagagcacctctgggggcacagcggccctgggctgcctggtcaaggactacttccccgaaccggtgacggtgtcgtggaactcaggcgccctgaccagcggcgtgcacaccttcccggctgtcctacagtcctcaggactctactccctcagcagcgtggtgaccgtgccctccagcagcttgggcacccagacctacatctgcaacgtgaatcacaagcccagcaacaccaaggtggacaagaaagttgagcccaaatct

SEQ ID NO: 587 - DNA, 339 bp, synthetic construct
  source 1..339: mol_type = other DNA
gctagtaccaagggcccatcggtcttccccctggcaccctcctccaagagcacctctgggggcacagcggccctgggctgcctggtcaaggactacttccccgaaccggtgacggtgtcgtggaactcaggcgccctgaccagcggcgtgcacaccttcccggctgtcctacagtcctcaggactctactccctcagcagcgtggtgaccgtgccctccagcagcttgggcacccagacctacatctgcaacgtgaatcacaagcccagcaacaccaaggtggacaagaaagttgagcccaaatcttgtgacaaaactcacacatgcccaccgtgccca

SEQ ID NO: 588 - DNA, 303 bp, synthetic construct
  source 1..303: mol_type = other DNA
gcctcaacgaaagggcctagcgtcttccccctggcgccgtgctcacgatccacaagcgaatccaccgccgctctcggatgcctcgtaaaggattatttccctgaaccagtcacggtgtcatggaacagcggtgcccttaccagcggcgtccatacctttcctgctgtgctccagtccagcggactttatagtctcagctctgtcgtgaccgtcccttcctctaattttggcacccagacttacacgtgcaacgtcgatcataagcccagtaacaccaaggtagacaagacggtggaacgaaag

SEQ ID NO: 589 - DNA, 306 bp, synthetic construct
  source 1..306: mol_type = other DNA
gcctccacgaagggaccatctgttttccctcttgccccctgctcacggtcaacgtctgaatccacggcagccctgggctgcctcgttaaggactactttccagagccggtaacagtctcctggaacagtggagcccttacatcaggtgttcacactttccctgccgtcttgcaaagtagcggactgtacagccttagttccgttgttacggttccttctagcaacttcggtacacagacatatacttgtaacgtagatcataagcctagcaacaccaaggtggacaaaaccgtagagagaaagtgt

SEQ ID NO: 590 - DNA, 309 bp, synthetic construct
  source 1..309: mol_type = other DNA
gcaagtacaaagggacccagtgttttcccgctcgccccctgttcacgatcaacgagtgagtccactgcggctctcggatgcctcgtcaaagactacttccccgagccggtgactgttagttggaactctggggctcttacttcaggcgtacacacattccccgccgtgcttcagtcaagtgggctctactcacttagcagtgtggtaacggttccctctagcaactttggcacccaaacatatacttgcaacgtcgatcacaagccgtcaaataccaaagttgacaagaccgttgaaaggaaatgttgt

SEQ ID NO: 591 - DNA, 309 bp, synthetic construct
  source 1..309: mol_type = other DNA
gcgtccactaagggtccgtcagtcttcccgctggcgccctgttcccgcagcacgagtgaatctaccgccgcccttgggtgcttggtaaaagactattttcctgagcccgttacagtatcatggaacagcggggctctgactagcggggtgcatacgttccctgcggttctgcaatctagcggactgtattctctctccagtgttgtgaccgtgccaagctccagcctcggtactaaaacttatacatgtaatgtggatcataaaccttcaaataccaaggttgacaaaagggtagagagtaagtacggt

SEQ ID NO: 592 - DNA, 363 bp, synthetic construct
  source 1..363: mol_type = other DNA
gcgtctcccacttctccgaaagttttccccctttccctctgtagcacacaacctgatggaaatgtggtcatcgcatgtctggtacaaggattctttccacaagagccattgagcgttacatggtcagagagcgggcagggagttaccgctaggaatttcccaccctcacaggatgcgagtggtgatctttataccacatcatcacaactcacgttgccagccactcagtgcctcgctggaaagtcagtaacatgccatgtcaaacattacactaatccctcacaagatgttaccgtgccttgcccagtaccttctacgccgcccaccccgtctccatctactccacccacgccatcacctagt

SEQ ID NO: 593 - DNA, 324 bp, synthetic construct
  source 1..324: mol_type = other DNA
gcgtcacctacgtccccaaaagtgttcccgctgtcactcgattccactccacaggacggtaacgtggtggttgcctgcctggtacaaggtttctttcctcaagaaccactctctgtgacgtggtctgaaagtggtcagaatgttacagcacggaacttcccaccgagtcaagatgcgagtggggatctctatacgacatccagtcaactcacactgcccgcaacacaatgccccgatggcaaatctgttacctgccatgtgaaacattacaccaatccatcccaggatgtgacagtaccttgtccggttccgccccctcccccg

SEQ ID NO: 594 - DNA, 477 bp, synthetic construct
  source 1..477: mol_type = other DNA
gctccgacaaaggcgccagacgtttttcctattatttcaggatgtcggcatccgaaagataattccccagttgttctggcgtgtcttatcacgggctaccatcctacatctgttaccgttacgtggtatatgggtacgcaaagccaacctcagcggacttttccagagatccaacggcgagattcatattatatgacatccagtcagttgagtacaccgctgcaacagtggcggcaaggtgagtataagtgtgtggtccaacacacagccagtaaaagtaagaaagagatattccggtggcctgaaagcccgaaggcacaagcatcttctgttccgacggcgcaaccgcaagctgaaggaagtcttgcaaaagcaaccacagcacccgcgacaacacgaaacacaggacgcggaggcgaggaaaagaaaaaagaaaaggaaaaggaagagcaagaggagagggaaactaagaccccc

SEQ ID NO: 595 - DNA, 309 bp, synthetic construct
  source 1..309: mol_type = other DNA
gctagtacccagtcaccttctgttttcccgcttactagatgctgcaagaacataccatccaatgccacttctgtcacactgggctgtcttgctacaggttattttcctgagccggtgatggtcacttgggataccggtagcctgaatggaactacaatgacgctgcctgccacgacgctcacattgagtgggcattacgcgacaattagtcttttgacggtaagcggagcttgggctaagcagatgttcacttgcagagtagcgcacactccctctagtactgactgggttgacaacaaaaccttttct

SEQ ID NO: 596 - DNA, 312 bp, synthetic construct
  source 1..312: mol_type = other DNA
gggtcagcaagtgcgcccacgctctttccattggtttcttgcgagaactctccctcagacacatcaagtgtcgcggtaggctgtctcgcccaagattttttgcccgatagtataacgctgtcatggaaatataagaacaatagtgatataagctccacaaggggttttccgagcgtactgcgaggcggtaaatatgcagcgacgagtcaagtcttgctcccatccaaggatgtcatgcaaggcaccgatgagcatgttgtttgcaaagtgcaacatccgaatggaaataaggaaaaaaacgtcccgctgccc

SEQ ID NO: 597 - DNA, 240 bp, synthetic construct
  source 1..240: mol_type = other DNA
atccagaaccctgatcctgccgtgtaccagctgcgggatagcaagagcagcgacaagagcgtgtgtctgttcaccgacttcgacagccagaccaacgtgtcccagagcaaggactccgacgtgtacatcaccgataagaccgtgctggacatgcggagcatggacttcaagagcaactccgccgtggcctggtccaacaagtccgatttcgcctgcgccaacgccttcaacaacagcatt

SEQ ID NO: 598 - DNA, 270 bp, synthetic construct
  source 1..270: mol_type = other DNA
atccagaaccctgatcctgccgtgtaccagctgcgggatagcaagagcagcgacaagagcgtgtgtctgttcaccgacttcgacagccagaccaacgtgtcccagagcaaggactccgacgtgtacatcaccgataagaccgtgctggacatgcggagcatggacttcaagagcaactccgccgtggcctggtccaacaagtccgatttcgcctgcgccaacgccttcaacaacagcattatccccgaggacacattcttcccaagcccc

SEQ ID NO: 599 - DNA, 378 bp, synthetic construct
  source 1..378: mol_type = other DNA
gaggacctgaagaacgtgttcccacctgaggtggccgtgttcgagcctagcgaggccgagatcagccacacccagaaagccaccctcgtgtgcctggctaccggcttctaccccgaccatgtggaactgtcttggtgggtcaacggcaaagaggtgcacagcggcgtgtctaccgacccccagccactgaaagaacagcccgccctgaacgacagccggtactgcctgagcagcagactgagagtgtccgccaccttctggcagaacccccggaaccacttcagatgccaggtgcagttctacggcctgagcgagaacgacgagtggacccaggacagagccaagcccgtgacccagatcgtgtctgccgaagcctgg

SEQ ID NO: 600 - DNA, 384 bp, synthetic construct
  source 1..384: mol_type = other DNA
gaggacctgaagaacgtgttcccacctgaggtggccgtgttcgagcctagcgaggccgagatcagccacacccagaaagccaccctcgtgtgcctggctaccggcttctaccccgaccatgtggaactgtcttggtgggtcaacggcaaagaggtgcacagcggcgtgtctaccgacccccagccactgaaagaacagcccgccctgaacgacagccggtactgcctgagcagcagactgagagtgtccgccaccttctggcagaacccccggaaccacttcagatgccaggtgcagttctacggcctgagcgagaacgacgagtggacccaggacagagccaagcccgtgacccagatcgtgtctgccgaagcctggggcaga

SEQ ID NO: 601 - DNA, 318 bp, synthetic construct
  source 1..318: mol_type = other DNA
gacaagcagctggacgccgacgtgtcccccaagcctaccatcttcctgccctctatcgccgagacaaagctccagaaggccggcacctacctgtgcctgctggaaaagttcttcccagatgtgattaagatccactggcaggaaaagaagtccaacaccatcctgggcagccaggaaggcaacaccatgaagaccaacgacacctacatgaagttcagctggctgaccgtgcccgagaagtccctggacaaagaacacagatgcatcgtgcggcacgaaaacaacaagaacggcgtggaccaggaaatcatcttccca

SEQ ID NO: 602 - DNA, 342 bp, synthetic construct
  source 1..342: mol_type = other DNA
gacaagcagctggacgccgacgtgtcccccaagcctaccatcttcctgccctctatcgccgagacaaagctccagaaggccggcacctacctgtgcctgctggaaaagttcttcccagatgtgattaagatccactggcaggaaaagaagtccaacaccatcctgggcagccaggaaggcaacaccatgaagaccaacgacacctacatgaagttcagctggctgaccgtgcccgagaagtccctggacaaagaacacagatgcatcgtgcggcacgaaaacaacaagaacggcgtggaccaggaaatcatcttcccacccatcaagaccgatgtgattaca

SEQ ID NO: 603 - DNA, 255 bp, synthetic construct
  source 1..255: mol_type = other DNA
agccagcctcacaccaagcccagcgtgttcgtgatgaagaacggcaccaacgtggcctgcctcgtgaaagagttctaccccaaggacatcaggatcaacctggtgtccagcaagaagatcaccgagttcgaccccgccatcgtgatctcccccagcggcaagtacaacgccgtgaagctggggaagtacgaggacagcaacagcgtgacctgctccgtgcagcacgacaacaagaccgtgcacagcaccgacttt

SEQ ID NO: 604 - DNA, 276 bp, synthetic construct
  source 1..276: mol_type = other DNA
agccagcctcacaccaagcccagcgtgttcgtgatgaagaacggcaccaacgtggcctgcctcgtgaaagagttctaccccaaggacatcaggatcaacctggtgtccagcaagaagatcaccgagttcgaccccgccatcgtgatctcccccagcggcaagtacaacgccgtgaagctggggaagtacgaggacagcaacagcgtgacctgctccgtgcagcacgacaacaagaccgtgcacagcaccgactttgaagtgaaaaccgactccacc

SEQ ID NO: 605 - DNA, 393 bp, synthetic construct
  source 1..393: mol_type = other DNA
gaggacctgaagaacgtgttcccacctgaggtggccgtgttcgagcctagcgaggccgagatcagccacacccagaaagccaccctcgtgtgcctggctaccggcttctaccccgaccatgtggaactgtcttggtgggtcaacggcaaagaggtgcacagcggcgtgtctaccgacccccagccactgaaagaacagcccgccctgaacgacagccggtactgcctgagcagcagactgagagtgtccgccaccttctggcagaacccccggaaccacttcagatgccaggtgcagttctacggcctgagcgagaacgacgagtggacccaggacagagccaagcccgtgacccagatcgtgtctgccgaagcctggggcagagccgattgc

SEQ ID NO: 606 - DNA, 282 bp, synthetic construct
  source 1..282: mol_type = other DNA
atccagaaccctgatcctgccgtgtaccagctgcgggatagcaagagcagcgacaagagcgtgtgtctgttcaccgacttcgacagccagaccaacgtgtcccagagcaaggactccgacgtgtacatcaccgataagaccgtgctggacatgcggagcatggacttcaagagcaactccgccgtggcctggtccaacaagtccgatttcgcctgcgccaacgccttcaacaacagcattatccccgaggacacattcttcccaagccccgagagcagctgc

SEQ ID NO: 607 - DNA, 282 bp, synthetic construct; identical to SEQ ID NO: 606
  source 1..282: mol_type = other DNA

SEQ ID NO: 608 - DNA, 237 bp, synthetic construct
  source 1..237: mol_type = other DNA
aagagcagcgacaagagcgtgtgtctgttcaccgacttcgacagccagaccaacgtgtcccagagcaaggactccgacgtgtacatcaccgataagaccgtgctggacatgcggagcatggacttcaagagcaactccgccgtggcctggtccaacaagtccgatttcgcctgcgccaacgccttcaacaacagcattatccccgaggacacattcttcccaagccccgagagcagc

SEQ ID NO: 609 - DNA, 378 bp, synthetic construct; identical to SEQ ID NO: 599
  source 1..378: mol_type = other DNA

SEQ ID NO: 610 - DNA, 330 bp, synthetic construct
  source 1..330: mol_type = other DNA
cctgaggtggccgtgttcgagcctagcgaggccgagatcagccacacccagaaagccaccctcgtgtgcctggctaccggcttctaccccgaccatgtggaactgtcttggtgggtcaacggcaaagaggtgcacagcggcgtgtctaccgacccccagccactgaaagaacagcccgccctgaacgacagccggtactgcctgagcagcagactgagagtgtccgccaccttctggcagaacccccggaaccacttcagatgccaggtgcagttctacggcctgagcgagaacgacgagtggacccaggacagagccaagcccgtgacc

SEQ ID NO: 611 - DNA, 342 bp, synthetic construct; identical to SEQ ID NO: 602
  source 1..342: mol_type = other DNA

SEQ ID NO: 612 - DNA, 285 bp, synthetic construct
  source 1..285: mol_type = other DNA
cccaagcctaccatcttcctgccctctatcgccgagacaaagctccagaaggccggcacctacctgtgcctgctggaaaagttcttcccagatgtgattaagatccactggcaggaaaagaagtccaacaccatcctgggcagccaggaaggcaacaccatgaagaccaacgacacctacatgaagttcagctggctgaccgtgcccgagaagtccctggacaaagaacacagatgcatcgtgcggcacgaaaacaacaagaacggcgtggaccaggaaatcatc

SEQ ID NO: 613 - DNA, 255 bp, synthetic construct; identical to SEQ ID NO: 603
  source 1..255: mol_type = other DNA

SEQ ID NO: 614 - DNA, 276 bp, synthetic construct; identical to SEQ ID NO: 604
  source 1..276: mol_type = other DNA

SEQ ID NO: 615 - DNA, 63 bp, synthetic construct
  source 1..63: mol_type = other DNA
gacgtgaagctggtggaaaagagcttcgagacagacaccaacctgaacttccagaacctgagc

SEQ ID NO: 616 - DNA, 66 bp, synthetic construct
  source 1..66: mol_type = other DNA
tgcgacgtgaagctggtggaaaagagcttcgagacagacaccaacctgaacttccagaacctgagc

SEQ ID NO: 617 - DNA, 57 bp, synthetic construct
  source 1..57: mol_type = other DNA
ggcagagccgattgcggctttaccagcgagagctaccagcagggcgtgctgagcgcc

SEQ ID NO: 618 - DNA, 81 bp, synthetic construct
  source 1..81: mol_type = other DNA
cagatcgtgtctgccgaagcctggggcagagccgattgcggctttaccagcgagagctaccagcagggcgtgctgagcgcc

SEQ ID NO: 619 - DNA, 72 bp, synthetic construct
  source 1..72: mol_type = other DNA
atggaccccaaggacaactgctccaaggacgccaacgataccctgctgctccagctgaccaacaccagcgcc

SEQ ID NO: 620 - DNA, 102 bp, synthetic construct
  source 1..102: mol_type = other DNA
ttcccacccatcaagaccgatgtgattacaatggaccccaaggacaactgctccaaggacgccaacgataccctgctgctccagctgaccaacaccagcgcc

SEQ ID NO: 621 - DNA, 132 bp, synthetic construct
  source 1..132: mol_type = other DNA
gaagtgaaaaccgactccaccgaccacgtgaagcccaaagagacagagaacaccaagcagcccagcaagagctgccacaagcccaaggccatcgtgcacaccgagaaagtgaacatgatgagcctgaccgtg

SEQ ID NO: 622 - DNA, 111 bp, synthetic construct
  source 1..111: mol_type = other DNA
gaccacgtgaagcccaaagagacagagaacaccaagcagcccagcaagagctgccacaagcccaaggccatcgtgcacaccgagaaagtgaacatgatgagcctgaccgtg

SEQ ID NO: 623 - DNA, 30 bp, synthetic construct
  source 1..30: mol_type = other DNA
cagagttttgggttgttggaccctaaattg

SEQ ID NO: 624 - DNA, 15 bp, synthetic construct
  source 1..15: mol_type = other DNA
ggggggggggggggg

SEQ ID NO: 625 - DNA, 60 bp, synthetic construct
  source 1..60: mol_type = other DNA
gtgatcggcttcagaatcctgctgctgaaagtggccggctttaacctgctgatgaccctg

SEQ ID NO: 626 - DNA, 69 bp, synthetic construct
  source 1..69: mol_type = other DNA
accatcctgtacgagatcctgctgggcaaggccaccctgtacgccgtgctggtgtctgccctggtgctg

SEQ ID NO: 627 - DNA, 69 bp, synthetic construct
  source 1..69: mol_type = other DNA
tactacatgtacttgttgctgctgctgaagtccgtggtgtacttcgccatcatcacatgctgcctgctg

SEQ ID NO: 628 - DNA, 69 bp, synthetic construct
  source 1..69: mol_type = other DNA
ctgggcctgcggatgctgttcgccaaaaccgtggccgtgaacttcctgctgaccgccaagctgttcttc

SEQ ID NO: 629 - DNA, 60 bp, synthetic construct
  source 1..60: mol_type = other DNA
tgctatctgttggacggaatcctgttcatttacggagtgatcctgaccgcattgttcctg

SEQ ID NO: 630 - DNA, 29 bp, synthetic construct
  source 1..29: mol_type = other DNA
ggggggggggggggggggggggggggggg

SEQ ID NO: 631 - DNA, 15 bp, synthetic construct
  source 1..15: mol_type = other DNA
cggctgtggtccagc

SEQ ID NO: 632 - DNA, 33 bp, synthetic construct
  source 1..33: mol_type = other DNA
atggctatggtcaagcggaaggacagccgggga

SEQ ID NO: 633 - DNA, 36 bp, synthetic construct
  source 1..36: mol_type = other DNA
cggagaaccgccttctgctgcaacggcgagaagtct

SEQ ID NO: 634 - DNA, 339 bp, synthetic construct; identical to SEQ ID NO: 506
  source 1..339: mol_type = other DNA

SEQ ID NO: 635 - DNA, 29 bp, synthetic construct
  source 1..29: mol_type = other DNA
ggggggggggggggggggggggggggggg

SEQ ID NO: 636 - DNA, 30 bp, synthetic construct
  source 1..30: mol_type = other DNA
gataaaactcatacctgtccgccatgcccg

SEQ ID NO: 637 - DNA, 27 bp, synthetic construct
  source 1..27: mol_type = other DNA
tgctgcgttgaatgtccgccgtgtcct

SEQ ID NO: 638 - DNA, 702 bp, synthetic construct
  source 1..702: mol_type = other DNA
cctgctgaacccaaatccccagacaagacacatacctgccccccttgccctgcgcctcccgtcgccgggccttctgtcttccttttccctcccaagcccaaagacacgttgatgattgcccgaactccagaggtaacgtgtgttgtcgtcgatgttagccatgaggacccagaggttaagttcaattggtatgtggacggtgttgaagttcataatgctaagacaaaacctagggaggaacaatacaattcaacatatcgggtcgtcagtgtcctcaccgtccttcaccaagattggctcaatggtaaagaatataagtgcaaagtctcaaataaggcgcttcctgcgcccatcgaaaaaaccatttccaaggccaagggacaacctagagagccacaggtgtatacgcttccgccgagtcgggatgaattgacgaaaaaccaggtgagcctgacatgcttggtcaaagggttttatccaagcgacattgctgtcgagtgggaatccaacggccagcctgaaaataactacaaaaccacaccgcccgtactggacagtgacggatcattcttcctgtactctaaactcaccgttgacaaatcccggtggcaacagggtaatgtctttagttgcagtgtcatgcatgaggctctgcacaatcattatacccagaaaagtctgagtctgtcacccggtaaaaaa

SEQ ID NO: 639 - DNA, 705 bp, synthetic construct
  source 1..705: mol_type = other DNA
ccagctgaaccaaaaagtcccgataaaacgcatacctgtccaccatgcccagcgccccctgtcgctgggccaagtgtttttctgtttcctccgaagccaaaggatacgctgatgattgcaagaactccagaagtcacctgcgtcgtcgtggatgtttctcacgaggacccagaggtaaagttcaactggtatgtagacggagtcgaagtacacaatgctaaaaccaaaccgcgcgaggaacaatacaattcaacttaccgggtcgtatctgtgcttaccgtcctccaccaagattggctgaatgggaaagaatacaaatgcaaagtcagtaataaggcgctgccggcacctatcgaaaagacgatctctaaggcaaaggggcagcccagagaaccgcaagtgtatacgcttccgccatcacgagatgagctgacgaagaaccaagtctcattgacttgcttggtgaaaggcttctacccgtccgacatagccgtggaatgggaaagcaatggtcaacctgagaataactacaagacaacacccccagttctcgacagcgatggtagcttctttttgtatagtaagttgacggtagataagtcacggtggcagcaaggcaacgtattcagttgtagtgtaatgcatgaagcactccataaccattatactcaaaagagcctttcttcactttctcctggaaagaaa

SEQ ID NO: 640 - DNA, 687 bp, synthetic construct
  source 1..687: mol_type = other DNA
gaaagtaagtatggccctccgtgccctccgtgccccgcaccggaatttgagggcggaccatccgtgttcctttttccaccaaaacccaaagacacacttatgatttccaggacccctgaagtcacctgcgtcgtggtagacgtttctcaggaagatccggaggttcaatttaactggtacgttgacggtgtagaagtacacaatgccaagactaagccacgggaggagcaatttaattcaacatacagggtagtatcagtcttgacagtattgcaccaggattggctgaacggaaaagagtataagtgtaaggtatctaacaagggtctcccgtcatccatcgagaaaacgatcagtaaagcaaaagggcagccacgggaaccacaagtgtacacactgccacccagtcaagaggagatgactaagaatcaagtaagtcttacgtgtctcgtcaaggggttttatccgtcagacattgctgttgagtgggaatccaatgggcaacccgagaacaattataagaccacaccaccagtccttgatagcgatggcagtttttttctgtactccagactcacagtagataagagccggtggcaggagggcaatgttttctcctgcagcgttatgcacgaagcgcttcataaccactatactcagaaatccttgagtctgagtctcggcaaa

SEQ ID NO: 641 - DNA, 357 bp, synthetic construct
  source 1..357: mol_type = other DNA
gagagtaaatacggtccgccgtgtccaccgtgccctggacagccgagggaaccacaggtttacactttgccaccgtcacaggaagaaatgactaaaaaccaggtcagcctcacttgtctggttaagggcttctaccccagcgacattgctgtggagtgggagagcaacggccagccagagaataattacaagaccacgccgcctgtgttggacagtgatggtagtttctttttgtactcacggcttacagtcgacaagagccggtggcaggaaggcaacgttttcagttgctcagtaatgcacgaagccttgcacaaccattatacccaaaaatcactgtcattgagtctcggtaag

SEQ ID NO: 642 - DNA, 36 bp, synthetic construct
  source 1..36: mol_type = other DNA
gaatcaaagtacggccccccgtgtcctccatgtcct

SEQ ID NO: 643 - DNA, 29 bp, synthetic construct
  source 1..29: mol_type = other DNA
ggggggggggggggggggggggggggggg

SEQ ID NO: 644 - DNA, 630 bp, synthetic construct
  source 1..630: mol_type = other DNA
atgaggccaagactgtggctgctgctggctgctcagctgacagtgctgcacggcaattctgtgctccagcagacccctgcctacatcaaggtgcagaccaacaagatggtcatgctgagctgcgaggccaaaatcagcctgagcaacatgcggatctactggctgcggcagagacaggcccctagcagcgatagccaccacgaatttctggccctgtgggatagcgccaagggcacaattcacggcgaggaagtggaacaagagaagatcgccgtgttccgggacgccagcagattcatcctgaacctgaccagcgtgaagcccgaggacagcggcatctatttctgcatgatcgtgggcagccccgagctgacatttggcaagggaacacagctgagcgtggtggacttcctgcctactacagcccagcctaccaagaagtctaccctgaagaaaagagtgtgcaggctgcccagacctgagacacagaaaggccctctgtgcagccctatcacactgggattgctggtggctggcgtgctggtgctgctggtttctctgggagttgccatccacctgtgctgtagaagaaggcgggccagactgcggtttatgaagcagttctacaag

SEQ ID NO: 645 - DNA, 705 bp, synthetic construct
  source 1..705: mol_type = other DNA
atggctctgcctgtgacagctctgctgctgcctctggcactgctgcttcatgctgctagacctagccagtttagagtgtcccctctggacagaacctggaacctgggcgagacagtggaactgaagtgccaggtgctgctgagcaaccctacaagcggctgctcctggctgtttcagcctagaggtgcagccgcctctcctacctttctgctgtacctgagccagaacaagcccaaggccgccgaaggactggacacccagagattcagcggcaagagactgggcgacaccttcgtgctgaccctgagcgacttcagaagagagaacgagggctactacttctgtagcgccctgagcaacagcatcatgtacttcagccacttcgtgcccgtgtttctgcccgccaagcctacaacaacccctgctcctagacctcctacaccagctcctacaatcgccagccagcctctgtctctcagacccgaagcctgtagacctgctgctggcggagctgtgcataccagaggactggatttcgcctgcgacatctacatctgggctcctctggctggcacatgtggcgtgctgctgctgtccctggtcatcaccctgtactgcaaccaccggaacaggcggagagtgtgcaagtgccctagacctgtggtcaagagcggcgacaagcctagcctgagcgccagatatgtt

SEQ ID NO: 646 - DNA, 1377 bp, synthetic construct
  source 1..1377: mol_type = other DNA
atgaaccggggagtcccttttaggcacttgcttctggtgctgcaactggcgctcctcccagcagccactcagggaaagaaagtggtgctgggcaaaaaaggggatacagtggaactgacctgtacagcttcccagaagaagagcatacaattccactggaaaaactccaaccagataaagattctgggaaatcagggctccttcttaactaaaggtccatccaagctgaatgatcgcgctgactcaagaagaagcctttgggaccaaggaaactttcccctgatcatcaagaatcttaagatagaagactcagatacttacatctgtgaagtggaggaccagaaggaggaggtgcaattgctagtgttcggattgactgccaactctgacacccacctgcttcaggggcagagcctgaccctgaccttggagagcccccctggtagtagcccctcagtgcaatgtaggagtccaaggggtaaaaacatacagggggggaagaccctctccgtgtctcagctggagctccaggatagtggcacctggacatgcactgtcttgcagaaccagaagaaggtggagttcaaaatagacatcgtggtgctagctttccagaaggcctccagcatagtctataagaaagagggggaacaggtggagttctccttcccactcgcctttacagttgaaaagctgacgggcagtggcgagctgtggtggcaggcggagagggcttcctcctccaagtcttggatcacctttgacctgaagaacaaggaagtgtctgtaaaacgggttacccaggaccctaagctccagatgggcaagaagctcccgctccacctcaccctgccccaggccttgcctcagtatgctggctctggaaacctcaccctggcccttgaagcgaaaacaggaaagttgcatcaggaagtgaacctggtggtgatgagagccactcagctccagaaaaatttgacctgtgaggtgtggggacccacctcccctaagctgatgctgagtttgaaactggagaacaaggaggcaaaggtctcgaagcgggagaaggcggtgtgggtgctgaaccctgaggcggggatgtggcagtgtctgctgagtgactcgggacaggtcctgctggaatccaacatcaaggttctgcccacatggtccaccccggtgcagccaatggccctgattgtgctggggggcgtcgccggcctcctgcttttcattgggctaggcatcttcttctgtgtcaggtgccggcaccgaaggcgccaagcagagcggatgtctcagatcaagagactcctcagtgagaagaagacctgccagtgtcctcaccggtttcagaagacatgtagccccatttga

SEQ ID NO: 647 - DNA, 57 bp, synthetic construct
  source 1..57: mol_type = other DNA
cacctgtgctgtagaagaaggcgggccagactgcggtttatgaagcagttctacaag

SEQ ID NO: 648 - DNA, 96 bp, synthetic construct
  source 1..96: mol_type = other DNA
ctgtactgcaaccaccggaacaggcggagagtgtgcaagtgccctagacctgtggtcaagagcggcgacaagcctagcctgagcgccagatatgtt

SEQ ID NO: 649 - DNA, 120 bp, synthetic construct
  source 1..120: mol_type = other DNA
tgcgtgcggtgcagacaccggcggagacaggccgagagaatgagccagatcaagagactgctgtccgagaagaaaacctgccagtgcccccacagattccagaaaacatgcagccccatc

SEQ ID NO: 650 - DNA, 29 bp, synthetic construct
  source 1..29: mol_type = other DNA
ggggggggggggggggggggggggggggg

SEQ ID NO: 651 - DNA, 2193 bp, synthetic construct
  source 1..2193: mol_type = other DNA
atggccttaccagtgaccgccttgctcctgccgctggccttgctgctccacgccgccaggccggacatccagatgacacagactacatcctccctgtctgcctctctgggagacagagtcaccatcagttgcagggcaagtcaggacattagtaaatatttaaattggtatcagcagaaaccagatggaactgttaaactcctgatctaccatacatcaagattacactcaggagtcccatcaaggttcagtggcagtgggtctggaacagattattctctcaccattagcaacctggagcaagaagatattgccacttacttttgccaacagggtaatacgcttccgtacacgttcggaggggggaccaagctggagatcacaggtggcggtggctcgggcggtggtgggtcgggtggcggcggatctgaggtgaaactgcaggagtcaggacctggcctggtggcgccctcacagagcctgtccgtcacatgcactgtctcaggggtctcattacccgactatggtgtaagctggattcgccagcctccacgaaagggtctggagtggctgggagtaatatggggtagtgaaaccacatactataattcagctctcaaatccagactgaccatcatcaaggacaactccaagagccaagttttcttaaaaatgaacagtctgcaaactgatgacacagccatttactactgtgccaaacattattactacggtggtagctatgctatggactactggggtcaaggaacctcagtcaccgtctcctcaacgcgtggaggcagtggtgtcttcacactcgaagatttcgttggggactggcgacagacagccggctacaacctggaccaagtccttgaacagggaggtgtgtccagtttgtttcagaatctcggggtgtccgtaactccgatccaaaggattgtcctgagcggtgaaaatgggctgaagatcgacatccatgtcatcatcccgtatgaaggtctgagcggcgaccaaatgggccagatcgaaaaaatttttaaggtggtgtaccctgtggatgatcatcactttaaggtgatcctgcactatggcacactggtaatcgacggggttacgccgaacatgatcgactatttcggacggccgtatgaaggcatcgccgtgttcgacggcaaaaagatcactgtaacagggaccctgtggaacggcaacaaaattatcgacgagcgcctgatcaaccccgacggctccctgctgttccgagtaaccatcaacggagtgaccggctggcggctgtgcgaacgcattctggcgctcgagggaggcagctggagccaccctcagtttgaaaaagactacaaagacgatgacgataagggatcagattacaaggatgatgatgacaaggggtcagattataaagacgacgatgataaagggagcgactacaaggacgacgatgacaaggcctggtcccatccccagttcgagaaacaccatcaccaccaccatcatcacactagtggctccggcgagggcagaggaagtctactaacctgcggagatgtggaagaaaatcctggcccacatatgaccgagtacaagcccacggtgcgcctcgccacccgcgacgacgtccccagggccgtacgcaccctcgccgccgcgttcgccgactaccccgccacgcgccacaccgtcgatccggaccgccacatcgagcgggtcaccgagctgcaagaactcttcctcacgcgcgtcgggctcgacatcggcaaggtgtgggtcgcggacgacggcgccgcggtggcggtctggaccacgccggagagcgtcgaagcgggggcggtgttcgccgagatcggcccgcgcatggccgagttgagcggttcccggctggccgcgcagcaacagatggaaggcctcctggcgccgcaccggcccaaggagcccgcgtggttcctggccaccgtcggcgtctcgcccgaccaccagggcaagggtctgggcagcgccgtcgtgctccccggagtggaggcggccgagcgcgccggggtgcccgccttcctggagacctccgcgccccgcaacctccccttctacgagcggctcggcttcaccgtcaccgccgacgtcgaggtgcccgaaggaccgcgcacctggtgcatgacccgcaagcccggtgcctga

SEQ ID NO: 652 - DNA, 2025 bp, synthetic construct
  source 1..2025: mol_type = other DNA
atgccctcctgggccctcttcatggtcacctcctgcctcctcctggcccctcaaaacctggcccaagtcagcagccaagatgtctccttgctggcatcagactcagagcccctgaagtgtttctcccgaacatttgaggacctcacttgcttctgggatgaggaagaggcagcgcccagtgggacataccagctgctgtatgcctacccgcgggagaagccccgtgcttgccccctgagttcccagagcatgccccactttggaacccgatacgtgtgccagtttccagaccaggaggaagtgcgtctcttctttccgctgcacctctgggtgaagaatgtgttcctaaaccagactcggactcagcgagtcctctttgtggacagtgtaggcctgccggctccccccagtatcatcaaggccatgggtgggagccagccaggggaacttcagatcagctgggaggagccagctccagaaatcagtgatttcctgaggtacgaactccgctatggccccagagatcccaagaactccactggtcccacggtcatacagctgattgccacagaaacctgctgccctgctctgcagaggcctcactcagcctctgctctggaccagtctccatgtgctcagcccacaatgccctggcaagatggaccaaagcagacctccccaagtagagaagcttcagctctgacagcagagggtggaagctgcctcatctcaggactccagcctggcaactcctactggctgcagctgcgcagcgaacctgatgggatctccctcggtggctcctggggatcctggtccctccctgtgactgtggacctgcctggagatgcagtggcacttggactgcaatgctttaccttggacctgaagaatgttacctgtcaatggcagcaacaggaccatgctagctcccaaggcttcttctaccacagcagggcacggtgctgccccagagacaggtaccccatctgggagaactgcgaagaggaagagaaaacaaatccaggactacagaccccacagttctctcgctgccacttcaagtcacgaaatgacagcattattcacatccttgtggaggtgaccacagccccgggtactgttcacagctacctgggctcccctttctggatccaccaggctgtgcgcctccccaccccaaacttgcactggagggagatctccagtgggcatctggaattggagtggcagcacccatcgtcctgggcagcccaagagacctgttatcaactccgatacacaggagaaggccatcaggactggaaggtgctggagccgcctctcggggcccgaggagggaccctggagctgcgcccgcgatctcgctaccgtttacagctgcgcgccaggctcaacggccccacctaccaaggtccctggagctcgtggtcggacccaactagggtggagaccgccaccgagaccgccacgcgtggaggcagtggtgtcttcacactcgaagatttcgttggggactggcgacagacagccggctacaacctggaccaagtccttgaacagggaggtgtgtccagtttgtttcagaatctcggggtgtccgtaactccgatccaaaggattgtcctgagcggtgaaaatgggctgaagatcgacatccatgtcatcatcccgtatgaaggtctgagcggcgaccaaatgggccagatcgaaaaaatttttaaggtggtgtaccctgtggatgatcatcactttaaggtgatcctgcactatggcacactggtaatcgacggggttacgccgaacatgatcgactatttcggacggccgtatgaaggcatcgccgtgttcgacggcaaaaagatcactgtaacagggaccctgtggaacggcaacaaaattatcgacgagcgcctgatcaaccccgacggctccctgctgttccgagtaaccatcaacggagtgaccggctggcggctgtgcgaacgcattctggcgagttggaaggatgcctctggatggtcc

SEQ ID NO: 653 - DNA, 1449 bp, synthetic construct
  source 1..1449: mol_type = other DNA
atgccacctcctcgcctcctcttcttcctcctcttcctcacccccatggaagtcaggcccgactacaaggacgacgatgacaaggaggaacctctagtggtgaaggtggaagagggagataacgctgtgctgcagtgcctcaaggggacctcagatggccccactcagcagctgacctggtctcgggagtccccgcttaaacccttcttaaaactcagcctggggctgccaggcctgggaatccacatgaggcccctggccatctggcttttcatcttcaacgtctctcaacagatggggggcttctacctgtgccagccggggcccccctctgagaaggcctggcagcctggctggacagtcaatgtggagggcagcggggagctgttccggtggaatgtttcggacctaggtggcctgggctgtggcctgaagaacaggtcctcagagggccccagctccccttccgggaagctcatgagccccaagctgtatgtgtgggccaaagaccgccctgaaatctgggagggagagcctccgtgtctcccaccgagggacagcctgaaccagagcctcagccaggacctcaccatggcccctggctccacactctggctgtcctgtggggtaccccctgactctgtgtccaggggccccctctcctggacccatgtgcaccccaaggggcctaagtcattgctgagcctagagctgaaggacgatcgcccggccagagatatgtgggtaatggagacgggtctgttgttgccccgggccacagctcaagacgctggaaagtattattgtcaccgtggcaacctgaccatgtcattccacctcgagatcactgctcggccagtactatggcactggctgctgaggactggtggctggacgcgtggaggcagtggtgtcttcacactcgaagatttcgttggggactggcgacagacagccggctacaacctggaccaagtccttgaacagggaggtgtgtccagtttgtttcagaatctcggggtgtccgtaactccgatccaaaggattgtcctgagcggtgaaaatgggctgaagatcgacatccatgtcatcatcccgtatgaaggtctgagcggcgaccaaatgggccagatcgaaaaaatttttaaggtggtgtaccctgtggatgatcatcactttaaggtgatcctgcactatggcacactggtaatcgacggggttacgccgaacatgatcgactatttcggacggccgtatgaaggcatcgccgtgttcgacggcaaaaagatcactgtaacagggaccctgtggaacggcaacaaaattatcgacgagcgcctgatcaaccccgacggctccctgctgttccgagtaaccatcaacggagtgaccggctggcggctgtgcgaacgcattctggcgagttggaaggatgcctctggatggtcc

SEQ ID NO: 654 - DNA, 2298 bp, synthetic construct
  source 1..2298: mol_type = other DNA
atgccacctcctcgcctcctcttcttcctcctcttcctcacccccatggaagtcaggcccgactacaaggacgacgatgacaaggaggaacctctagtggtgaaggtggaagagggagataacgctgtgctgcagtgcctcaaggggacctcagatggccccactcagcagctgacctggtctcgggagtccccgcttaaacccttcttaaaactcagcctggggctgccaggcctgggaatccacatgaggcccctggccatctggcttttcatcttcaacgtctctcaacagatggggggcttctacctgtgccagccggggcccccctctgagaaggcctggcagcctggctggacagtcaatgtggagggcagcggggagctgttccggtggaatgtttcggacctaggtggcctgggctgtggcctgaagaacaggtcctcagagggccccagctccccttccgggaagctcatgagccccaagctgtatgtgtgggccaaagaccgccctgaaatctgggagggagagcctccgtgtctcccaccgagggacagcctgaaccagagcctcagccaggacctcaccatggcccctggctccacactctggctgtcctgtggggtaccccctgactctgtgtccaggggccccctctcctggacccatgtgcaccccaaggggcctaagtcattgctgagcctagagctgaaggacgatcgcccggccagagatatgtgggtaatggagacgggtctgttgttgccccgggccacagctcaagacgctggaaagtattattgtcaccgtggcaacctgaccatgtcattccacctcgagatcactgctcggccagtactatggcactggctgctgaggactggtggctggacgcgtggaggcagtggtgtcttcacactcgaagatttcgttggggactggcgacagacagccggctacaacctggaccaagtccttgaacagggaggtgtgtccagtttgtttcagaatctcggggtgtccgtaactccgatccaaaggattgtcctgagcggtgaaaatgggctgaagatcgacatccatgtcatcatcccgtatgaaggtctgagcggcgaccaaatgggccagatcgaaaaaatttttaaggtggtgtaccctgtggatgatcatcactttaaggtgatcctgcactatggcacactggtaatcgacggggttacgccgaacatgatcgactatttcggacggccgtatgaaggcatcgccgtgttcgacggcaaaaagatcactgtaacagggaccctgtggaacggcaacaaaattatcgacgagcgcctgatcaaccccgacggctccctgctgttccgagtaaccatcaacggagtgaccggctggcggctgtgcgaacgcattctggcgctcgagggaggcagctggagccaccctcagtttgaaaaagactacaaagacgatgacgataagggatcagattacaaggatgatgatgacaaggggtcagattataaagacgacgatgataaagggagcgactacaaggacgacgatgacaaggcctggtcccatccccagttcgagaaacaccatcaccaccaccatcatcacactagtggctccggcgagggcagaggaagtctactaacctgcggagatgtggaagaaaatcctggcccacatatgaccgagtacaagcccacggtgcgcctcgccacccgcgacgacgtccccagggccgtacgcaccctcgccgccgcgttcgccgactaccccgccacgcgccacaccgtcgatccggaccgccacatcgagcgggtcaccgagctgcaagaactcttcctcacgcgcgtcgggctcgacatcggcaaggtgtgggtcgcggacgacggcgccgcggtggcggtctggaccacgccggagagcgtcgaagcgggggcggtgttcgccgagatcggcccgcgcatggccgagttgagcggttcccggctggccgcgcagcaacagatggaaggcctcctggcgccgcaccggcccaaggagcccgcgtggttcctggccaccgtcggcgtctcgcccgaccaccagggcaagggtctgggcagcgccgtcgtgctccccggagtggaggcggccgagcgcgccggggtgcccgccttcctggagacctccgcgccccgcaacctccccttctacgagcggctcggcttcaccgtcaccgccgacgtcgaggtgcccgaaggaccgcgcacctggtgcatgacccgcaagcccggtgcctga

SEQ ID NO: 655 - DNA, 29 bp, synthetic construct
  source 1..29: mol_type = other DNA
ggggggggggggggggggggggggggggg

SEQ ID NO: 656 - DNA, 597 bp, synthetic construct
  source 1..597: mol_type = other DNA
atgaccgagtacaagcccacggtgcgcctcgccacccgcgacgacgtccccagggccgtacgcaccctcgccgccgcgttcgccgactaccccgccacgcgccacaccgtcgatccggaccgccacatcgagcgggtcaccgagctgcaagaactcttcctcacgcgcgtcgggctcgacatcggcaaggtgtgggtcgcggacgacggcgccgcggtggcggtctggaccacgccggagagcgtcgaagcgggggcggtgttcgccgagatcggcccgcgcatggccgagttgagcggttcccggctggccgcgcagcaacagatggaaggcctcctggcgccgcaccggcccaaggagcccgcgtggttcctggccaccgtcggcgtctcgcccgaccaccagggcaagggtctgggcagcgccgtcgtgctccccggagtggaggcggccgagcgcgccggggtgcccgccttcctggagacctccgcgccccgcaacctccccttctacgagcggctcggcttcaccgtcaccgccgacgtcgaggtgcccgaaggaccgcgcacctggtgcatgacccgcaagcccggtgcc

SEQ ID NO: 657 - DNA, 396 bp, synthetic construct
  source 1..396: mol_type = other DNA
atggccaagcctttgtctcaagaagaatccaccctcattgaaagagcaacggctacaatcaacagcatccccatctctgaagactacagcgtcgccagcgcagctctctctagcgacggccgcatcttcactggtgtcaatgtatatcattttactgggggaccttgtgcagaactcgtggtgctgggcactgctgctgctgcggcagctggcaacctgacttgtatcgtcgcgatcggaaatgagaacaggggcatcttgagcccctgcggacggtgccgacaggtgcttctcgatctgcatcctgggatcaaagccatagtgaaggacagtgatggacagccgacggcagttgggattcgtgaattgctgccctctggttatgtgtgggagggc

SEQ ID NO: 658 - DNA, 516 bp, synthetic construct
  source 1..516: mol_type = other DNA
atgggcaacgaggccagctaccctctggagatgtgctcccacttcgacgccgacgagatcaagcggctgggcaagcgcttcaagaagctggacctggacaacagcggcagcctgagcgtggaggagtttatgtctctgcccgagctgcagcagaaccccctggtgcagcgcgtgatcgacatcttcgacaccgacggcaacggcgaggtggacttcaaggagttcatcgagggcgtgagccagttcagcgtgaagggcgacaaggagcagaagctgcggttcgccttccgcatctacgatatggataaagatggctatatttctaatggcgagctgttccaggtgctgaagatgatggtgggcaacaataccaagctggccgatacccagctgcagcagatcgtggacaagaccatcatcaacgccgacaaggacggcgacggcagaatcagcttcgaggagttctgtgccgtggtgggaggcctggatattcacaaaaaaatggtggtggacgtg

SEQ ID NO: 659 - DNA, 1071 bp, synthetic construct
  source 1..1071: mol_type = other DNA
atgctgctgctcgtgaccagcctgctgctgtgcgaactgccccaccctgcctttctgctgatcccccggaaagtgtgcaacggcatcggcatcggagagttcaaggacagcctgagcatcaacgccaccaacatcaagcacttcaagaactgcaccagcatcagcggcgacctgcacatcctgcccgtggcctttagaggcgacagcttcacccacacccccccactggaccctcaggaactggacatcctgaaaaccgtgaaagagatcaccggatttctgctgattcaggcttggcccgagaaccggaccgatctgcacgccttcgagaacctggaaatcatccggggcaggaccaagcagcacggccagttttctctggccgtggtgtccctgaacatcaccagcctgggcctgcggagcctgaaagaaatcagcgacggggatgtgattatcagcggcaacaagaacctgtgctacgccaacaccatcaactggaagaagctgttcggcacctccggccagaaaacaaagatcatcagcaaccggggcgagaacagctgcaaggccacaggacaagtgtgccacgccctgtgtagccctgagggctgttggggacccgagcccagagattgcgtgtcctgccggaatgtgtccagaggccgcgagtgcgtggacaagtgcaacctgctggaaggcgagccccgcgagtttgtggaaaacagcgagtgcatccagtgccaccccgagtgtctgccccaggccatgaatatcacctgtaccggcagaggccccgacaactgtatccagtgcgcccactacatcgacggcccccactgcgtgaaaacctgtccagctggcgtgatgggagagaacaacaccctcgtgtggaagtacgccgacgccggccatgtgtgccacctgtgtcaccccaactgcacctacggctgtacaggccctggcctggaaggctgccctaccaacggacccaagatccccagcattgccaccggcatggtgggagcattgctgctgctgctggtggtggccctgggcatcggcctgtttatg

SEQ ID NO: 660 - DNA, 1272 bp, synthetic construct
  source 1..1272: mol_type = other DNA
atgcgaccctccgggacggccggggcagcgttcctggcgctgctggctgcgctctgcccggcgagtcgggctctggaggaaaagaaaggtaattatgtggtgacagatcacggctcgtgcgtccgagcctgtggggccgacagctatgagatggaggaagacggcgtccgcaagtgtaagaagtgcgaagggccttgccgcaaagtgtgtaacggaataggtattggtgaatttaaagactcactctccataaatgctacgaatattaaacacttcaaaaactgcacctccatcagtggcgatctccacatcctgccggtggcatttaggggtgactccttcacacatactcctcctctggatccacaggaactggatattctgaaaaccgtaaaggaaatcacagggtttttgctgattcaggcttggcctgaaaacaggacggacctccatgcctttgagaacctagaaatcatacgcggcaggaccaagcaacatggtcagttttctcttgcagtcgtcagcctgaacataacatccttgggattacgctccctcaaggagataagtgatggagatgtgataatttcaggaaacaaaaatttgtgctatgcaaatacaataaactggaaaaaactgtttgggacctccggtcagaaaaccaaaattataagcaacagaggtgaaaacagctgcaaggccacaggccaggtctgccatgccttgtgctcccccgagggctgctggggcccggagcccagggactgcgtctcttgccggaatgtcagccgaggcagggaatgcgtggacaagtgcaaccttctggagggtgagccaagggagtttgtggagaactctgagtgcatacagtgccacccagagtgcctgcctcaggccatgaacatcacctgcacaggacggggaccagacaactgtatccagtgtgcccactacattgacggcccccactgcgtcaagacctgcccggcaggagtcatgggagaaaacaacaccctggtctggaagtacgcagacgccggccatgtgtgccacctgtgccatccaaactgcacctacggatgcactgggccaggtcttgaaggctgtccaacgaatgggcctaagatcccgtccatcgccactgggatggtgggggccctcctcttgctgctggtggtggccctggggatcggcctcttcatgcgaaggcgccacatcgttcggaagcgcacgctgcggaggctgctgcaggagagggagcttgtggagcct

SEQ ID NO: 661 - DNA, 999 bp, synthetic construct
  source 1..999: mol_type = other DNA
atgccccctcccagactgctgttcttcctgctgttcctgacccctatggaagtgcggcccgaggaacccctggtcgtgaaagtggaagagggcgacaacgccgtgctccagtgtctgaagggcacctccgatggccctacccagcagctgacatggtccagagagagccccctgaagcccttcctgaagctgtctctgggcctgcctggcctgggcatccacatgaggccactggctatctggctgttcatcttcaacgtgtcccagcagatgggcggcttctacctgtgtcagcctggccccccaagcgagaaagcctggcagcctggctggaccgtgaacgtggaaggatctggcgagctgttccggtggaacgtgtccgatctgggcggcctgggatgcggcctgaagaacagaagcagcgaaggccccagcagccccagcggcaaactgatgagccccaagctgtacgtgtgggccaaggaccggcccgagatttgggaaggcgagcctccttgcctgccccccagagatagcctgaaccagagcctgagccaggacctgacaatggcccctggcagcacactgtggctgagctgtggcgtgccacccgactctgtgtccagaggccctctgagctggacccacgtgcaccccaagggacctaagagcctgctgagcctggaactgaaggacgacagacccgccagagatatgtgggtcatggaaaccggcctgctgctgcctagagccacagcccaggatgccggcaagtattactgccaccggggcaacctgaccatgagcttccacctggaaatcaccgccagacccgtgctgtggcactggctgctgagaaccggcggatggaaagtgtccgccgtgaccctggcctacctgatcttctgcctgtgctccctcgtgggcatcctgcatctccagcgggctctggtgctgcggcggaagagaaagagaatgaccgaccccacccggcggttc

SEQ ID NO: 662 - DNA, 315 bp, synthetic construct
  source 1..315: mol_type = other DNA
atggccttaccagtgaccgccttgctcctgccgctggccttgctgctccacgccgccaggccgttcgaaatgttgcagatggctgggcagtgctcccaaaatgaatattttgacagtttgttgcatgcttgcataccttgtcaacttcgatgttcttctaatactcctcctctaacatgtcagcgttattgtaatgcaagtgtgaccaattcagtgaaaggaacgaatgcgattctctggacctgtttgggactgagcttaataatttctttggcagttttcgtgctaatgtttttgctaaggaagataaactct

SEQ ID NO: 663 - DNA, 564 bp, synthetic construct
  source 1..564: mol_type = other DNA
atggccacttacgaggttctctgtgaggtggcgcggaaactgggcacggatgacagggaagtggtattgttcctcctaaacgtgttcatacctcaacccacactggcccaattaattggagctcttagagctttaaaggaggagggcaggttaacgtttcccctgttagcggaatgtctgtttcgtgcaggtcgcagagacctcttgcgcgacctgcttcacttagacccgcgttttttagagcgccacctagcgggcacaatgagttatttcagcccttatcagctcactgttctccacgtagacggggagctgtgtgcgagggatattaggtctttgatatttttaagcaaggacactatagggtctcgcagcacaccacagacattcttacactgggtgtactgtatggaaaacttagacctactgggtcccactgacgtggatgccctaatgtcaatgcttagatctttgtcaagagtagacctacagcgccaagtgcaaaccctaatgggccttcacctttccggcccatcacactcccaacactatcgccatacacca

SEQ ID NO: 664 - DNA, 723 bp, synthetic construct
  source 1..723: mol_type = other DNA
atgtccgactccaaggaggtccctagccttccatttttgcgacacttgctcgaagagttggacagccatgaggacagcttgctgctgtttctgtgtcacgacgcggccccgggctgcacgacggtcacgcaagctttgtgctcgcttagccaacagcgcaagctgaccctcgcggctctggtcgagatgctctacgtgctgcagcgtatggatcttctcaagagccgcttcgggctcagcaaggagggggccgagcaattgctgggcacaagctttctcacgcgctaccgcaagctcatggtttgcgtgggtgaggagctcgactcgagcgagctacgcgctctacgcttgttcgcgtgcaacctgaatccgagcctgagcacggcgctttctgagagcagccgctttgtcgagcttgtactcgcgcttgaaaacgtaggactcgtctcgccatcgagtgtttccgtgcttgcggacatgttgcgcactcttcggcgcctcgatttgtgccagcagcttgttgagtacgaacaacaagagcaagccaggtaccgttactgttacgcggcctcgccctcattgccagttcgtacgttacgtcgggggcacggcgcgagtgaacacgagcagctgtgcatgcccgtgcaagaatcctctgacagccccgagctgctgcgcacgcccgtacaagaatcctccagcgacagccccgagcaaacgact

SEQ ID NO: 665 - DNA, 564 bp, synthetic construct
  source 1..564: mol_type = other DNA
atggctacctacgaggtgctgtgcgaggtggcaagaaagctgggcaccgacgacagagaagtggtgctgttcctgctgaacgtgttcatccctcagcctacactggcccagctgatcggtgcactgagagccctgaaagaggaaggccggctgacctttcctctgctggccgaatgcctgttcagagccggaagaagggatctgctgcgggacctgctgcatctggaccccagatttctggaaagacacctggccggcaccatgagctacttcagcccttaccagctgaccgtgctgcacgttgacggcgaactgtgcgccagagatattcggagcctgatcttcctgagcaaggacaccatcggcagccggtctacccctcagacatttctgcactgggtgtactgcatggaaaacctggacctgctcggccccacagatgtggatgccctgatgtccatgctgagaagcctgagcagagtggacctccagagacaggtgcagacactgatgggactgcacctgagcggacctagccacagccagcactacagacacacccct

SEQ ID NO: 666 - DNA, 1200 bp, synthetic construct
  source 1..1200: mol_type = other DNA
atgctggaaggcgtgcaggtggaaaccatcagccctggcgacggcagaaccttccctaagaggggccagacctgcgtggtgcactacaccggaatgctggaagatggcaagaaggtggacagcagccgggaccggaacaagcccttcaagttcatgctgggcaagcaggaagtgatccggggctgggaagagggcgtggcccagatgtctgtgggccagagagccaagctgaccatctcccccgattacgcctacggcgctacaggccaccctggcatcattcctccacacgccacactggtgttcgacgtggaactgctgaagctggaaagcggcggaggcagcggagtggatggcttcggagatgtgggagccctggaaagcctgagaggcaacgccgacctggcctacatcctgagcatggaaccttgcggccactgcctgattatcaacaacgtgaacttctgccgcgagagcggcctgagaaccagaaccggcagcaacatcgactgcgagaagctgcggcggagattcagcagcctgcacttcatggtggaagtgaagggcgacctgaccgccaagaaaatggtgctggccctgctggaactggcccagcaggatcatggcgctctggactgctgtgtggtcgtgatcctgagccacggctgccaggcttcccatcttcagttccctggcgctgtgtacggcaccgatggctgtcctgtgtccgtggaaaagatcgtgaacatcttcaacggcaccagctgccccagcctgggcggaaagcccaagctgttctttattcaagcctgtggcggcgagcagaaggaccacggctttgaggtggcctccaccagccctgaggatgagagccctggcagcaaccctgagcctgacgccaccccattccaggaaggactgcggaccttcgaccagctggacgccatctctagcctgcccacccccagcgacatcttcgtgtcctacagcaccttccccggctttgtgtcctggcgggaccctaagagcggctcttggtacgtggaaaccctggacgacatctttgagcagtgggctcacagcgaggacctccagagcctgctgctgagagtggctaacgccgtgtccgtgaagggcatctacaagcagatgcctggctgcttcaacttcctgcggaagaagctgtttttcaagaccagc

SEQ ID NO: 667 - DNA, 1188 bp, synthetic construct
  source 1..1188: mol_type = other DNA
atgtacaggatgcaactcctgtcttgcattgcactaagtcttgcacttgtcacaaacagtgcacctacttcaagttctacaaagaaaacacagctacaactggagcatttactgctggatttacagatgattttgaatggaattaataattacaagaatcccaaactcaccaggatgctcacatttaagttttacatgcccaagaaggccacagaactgaaacatcttcagtgtctagaagaagaactcaaacctctggaggaagtgctaaatttagctcaaagcaaaaactttcacttaagacccagggacttaatcagcaatatcaacgtaatagttctggaactaaagggatctgaaacaacattcatgtgtgaatatgctgatgagacagcaaccattgtagaatttctgaacagatggattaccttttgtcaaagcatcatctcaacactgactacgcgaggcggaggaagctcgcgtaaaattgaagttatgtatcctcctccttacctagacaatgagaagagcaatggaaccattatccatgtgaaagggaaacacctttgtccaagtcccctatttcccggaccttctaagcccttttgggtgctggtggtggttgggggagtcctggcttgctatagcttgctagtaacagtggcctttattattttctgggtgaggagtaagaggagctctagtagagcaaagcgaagtggtagcggagcaaccaacttttctctgctcaagcaagccggtgacgtggaagagaaccctggtcctcatatggccaagcctttgtctcaagaagaatccaccctcattgaaagagcaacggctacaatcaacagcatccccatctctgaagactacagcgtcgccagcgcagctctctctagcgacggccgcatcttcactggtgtcaatgtatatcattttactgggggaccttgtgcagaactcgtggtgctgggcactgctgctgctgcggcagctggcaacctgacttgtatcgtcgcgatcggaaatgagaacaggggcatcttgagcccctgcggacggtgccgacaggtgcttctcgatctgcatcctgggatcaaagccatagtgaaggacagtgatggacagccgacggcagttgggattcgtgaattgctgccctctggttatgtgtgggagggctaa

SEQ ID NO: 668 - DNA, 90 bp, synthetic construct; identical to SEQ ID NO: 499
  source 1..90: mol_type = other DNA

SEQ ID NO: 669 - DNA, 90 bp, synthetic construct; identical to SEQ ID NO: 505
  source 1..90: mol_type = other DNA

SEQ ID NO: 670 - DNA, 90 bp, synthetic construct
  source 1..90: mol_type = other DNA
cagagcttcggcctgctggaccccaagctgagctacctgctggatggcatcctgttcatctacggcgtgatcctgaccgccctgttcctg

SEQ ID NO: 671 - DNA, 90 bp, synthetic construct
  source 1..90: mol_type = other DNA
cagagttttgggttgttggaccctaaattgagctatctgttggacggaatcctgttcatttacggagtgatcctgaccgcattgttcctg

SEQ ID NO: 672 - DNA, 108 bp, synthetic construct
  source 1..108: mol_type = other DNA
agggaccaaagactgcctcctgacgctcacaaacctccaggcggaggcagcttcagaacccctatccaagaggaacaggctgacgcccacagcaccctggcaaaaatt

SEQ ID NO: 673 - DNA, 108 bp, synthetic construct
  source 1..108: mol_type = other DNA
cgcgatcagaggctgccacctgatgctcataagccacctggcggcggatctttcaggaccccaattcaagaagaacaagccgacgctcactctaccctggctaagatc

SEQ ID NO: 674 - DNA, 198 bp, synthetic construct
  source 1..198: mol_type = other DNA
cagagcttcggcctgctggaccccaagctgtgctacctgctggatggcatcctgttcatctacggcgtgatcctgaccgccctgttcctgagggaccaaagactgcctcctgacgctcacaaacctccaggcggaggcagcttcagaacccctatccaagaggaacaggctgacgcccacagcaccctggcaaaaatt

SEQ ID NO: 675 - DNA, 198 bp, synthetic construct
  source 1..198: mol_type = other DNA
cagagttttgggttgttggaccctaaattgtgctatctgttggacggaatcctgttcatttacggagtgatcctgaccgcattgttcctgcgcgatcagaggctgccacctgatgctcataagccacctggcggcggatctttcaggaccccaattcaagaagaacaagccgacgctcactctaccctggctaagatc

SEQ ID NO: 676 - DNA, 198 bp, synthetic construct
  source 1..198: mol_type = other DNA
cagagcttcggcctgctggaccccaagctgagctacctgctggatggcatcctgttcatctacggcgtgatcctgaccgccctgttcctgagggaccaaagactgcctcctgacgctcacaaacctccaggcggaggcagcttcagaacccctatccaagaggaacaggctgacgcccacagcaccctggcaaaaatt

SEQ ID NO: 677 - DNA, 198 bp, synthetic construct
  source 1..198: mol_type = other DNA
cagagttttgggttgttggaccctaaattgagctatctgttggacggaatcctgttcatttacggagtgatcctgaccgcattgttcctgcgcgatcagaggctgccacctgatgctcataagccacctggcggcggatctttcaggaccccaattcaagaagaacaagccgacgctcactctaccctggctaagatc

SEQ ID NO: 678 - DNA, 345 bp, synthetic construct
  source 1..345: mol_type = other DNA
atgggaggactggaaccctgtagcagactgctgctgcttcctctgctgctggctgtgtctggactcagacctgttcaggctggatcccaggctcagagcgattgcagctgtagcacagtgtctccaggcgtgctggccggaattgtgatgggcgatctggtgctgacagtgctgattgccctggccgtgtacttcctgggtagactggtgcctagaggaagaggcgctgccgaagccgccacaagaaagcagagaatcaccgagacagagagcccctaccaagagctgcaaggccagagaagcgacgtgtacagcgacctgaatacccagcggccttactacaaa

SEQ ID NO: 679 - DNA, 258 bp, synthetic construct
  source 1..258: mol_type = other DNA
caggctcagagcgattgcagctgtagcacagtgtctccaggcgtgctggccggaattgtgatgggcgatctggtgctgacagtgctgattgccctggccgtgtacttcctgggtagactggtgcctagaggaagaggcgctgccgaagccgccacaagaaagcagagaatcaccgagacagagagcccctaccaagagctgcaaggccagagaagcgacgtgtacagcgacctgaatacccagcggccttactacaaa

SEQ ID NO: 680 - DNA, 345 bp, synthetic construct
  source 1..345: mol_type = other DNA
atgggtggacttgagccttgttccaggctgctgttgctgccactgctcctcgctgttagtggactgaggccagtgcaggctggtacccaggcacagtctgactgtagctgctccacagttagccctggcgttctggctggcatcgttatgggcgacctcgtcctgactgtcctgatcgctctggcagtgtattttctcggacggctggtcccaagaggaaggggagcagctgaagctgctacccggaagcagcggatcacagagactgagtctccataccaagaactccagggacagagatccgatgtgtactccgacctgaacacacagaggccctattataag

SEQ ID NO: 681 - DNA, 258 bp, synthetic construct
  source 1..258: mol_type = other DNA
caggcacagtctgactgtagctgctccacagttagccctggcgttctggctggcatcgttatgggcgacctcgtcctgactgtcctgatcgctctggcagtgtattttctcggacggctggtcccaagaggaaggggagcagctgaagctgctacccggaagcagcggatcacagagactgagtctccataccaagaactccagggacagagatccgatgtgtactccgacctgaacacacagaggccctattataag

SEQ ID NO: 682 - DNA, 345 bp, synthetic construct
  source 1..345: mol_type = other DNA
atgggaggactggaaccctgtagcagactgctgctgcttcctctgctgctggctgtgtctggactcagacctgttcaggctggatcccaggctcagagcgattgcagctctagcacagtgtctccaggcgtgctggccggaattgtgatgggcgatctggtgctgacagtgctgattgccctggccgtgtacttcctgggtagactggtgcctagaggaagaggcgctgccgaagccgccacaagaaagcagagaatcaccgagacagagagcccctaccaagagctgcaaggccagagaagcgacgtgtacagcgacctgaatacccagcggccttactacaaa

SEQ ID NO: 683 - DNA, 258 bp, synthetic construct
  source 1..258: mol_type = other DNA
caggctcagagcgattgcagctctagcacagtgtctccaggcgtgctggccggaattgtgatgggcgatctggtgctgacagtgctgattgccctggccgtgtacttcctgggtagactggtgcctagaggaagaggcgctgccgaagccgccacaagaaagcagagaatcaccgagacagagagcccctaccaagagctgcaaggccagagaagcgacgtgtacagcgacctgaatacccagcggccttactacaaa

SEQ ID NO: 684 - DNA, 345 bp, synthetic construct
  source 1..345: mol_type = other DNA
atgggtggacttgagccttgttccaggctgctgttgctgccactgctcctcgctgttagtggactgaggccagtgcaggctggtacccaggcacagtctgactgtagcagctccacagttagccctggcgttctggctggcatcgttatgggcgacctcgtcctgactgtcctgatcgctctggcagtgtattttctcggacggctggtcccaagaggaaggggagcagctgaagctgctacccggaagcagcggatcacagagactgagtctccataccaagaactccagggacagagatccgatgtgtactccgacctgaacacacagaggccctattataag

SEQ ID NO: 685 - DNA, 258 bp, synthetic construct
  source 1..258: mol_type = other DNA
caggcacagtctgactgtagcagctccacagttagccctggcgttctggctggcatcgttatgggcgacctcgtcctgactgtcctgatcgctctggcagtgtattttctcggacggctggtcccaagaggaaggggagcagctgaagctgctacccggaagcagcggatcacagagactgagtctccataccaagaactccagggacagagatccgatgtgtactccgacctgaacacacagaggccctattataag

SEQ ID NO: 686 - DNA, 549 bp, synthetic construct
  source 1..549: mol_type = other DNA
ctgtgggtttcacagcctccagagatcagaaccctggaaggcagcagcgccttcctgccttgcagcttcaatgcctctcagggcagactggctatcggcagcgtgacctggttcagagatgaggtggtgcccggcaaagaagtgcggaacggcacccctgagtttagaggaaggctggcccctctggcctccagcagatttctgcacgatcaccaggccgagctgcacatcagagatgtgcgaggacacgacgccagcatctacgtgtgcagagtggaagtgctcggcctcggagttggcacaggcaatggaacaagactggtggtggaaaaagagcaccctcagctcggagccggaacagtgctgcttctgagagccggcttttacgccgtgtcctttctgtctgtggccgtgggcagcaccgtgtactatcagggcaagtgcctgacctggaagggacctagaaggcaactgcctgctgtggtgcctgctcctttgcctcctccatgtggaagctctgcccatctgctgccacctgttccaggcgga

SEQ ID NO: 687 - DNA, 228 bp, synthetic construct
  source 1..228: mol_type = other DNA
gtggtggaaaaagagcaccctcagctcggagccggaacagtgctgcttctgagagccggcttttacgccgtgtcctttctgtctgtggccgtgggcagcaccgtgtactatcagggcaagtgcctgacctggaagggacctagaaggcaactgcctgctgtggtgcctgctcctttgcctcctccatgtggaagctctgcccatctgctgccacctgttccaggcgga

SEQ ID NO: 688 - DNA, 324 bp, synthetic construct
  source 1..324: mol_type = other DNA
ctgtgggtttcacagcctccagagatcagaaccctggaaggcagcagcgccttcctgccttgcagcttcaatgcctctcagggcagactggctatcggcagcgtgacctggttcagagatgaggtggtgcccggcaaagaagtgcggaacggcacccctgagtttagaggaaggctggcccctctggcctccagcagatttctgcacgatcaccaggccgagctgcacatcagagatgtgcgaggacacgacgccagcatctacgtgtgcagagtggaagtgctcggcctcggagttggcacaggcaatggaacaagactggtg

SEQ ID NO: 689 - DNA, 27 bp, synthetic construct
  source 1..27: mol_type = other DNA
gtggaaaaagagcaccctcagctcgga

SEQ ID NO: 690 - DNA, 63 bp, synthetic construct
  source 1..63: mol_type = other DNA
gccggaacagtgctgcttctgagagccggcttttacgccgtgtcctttctgtctgtggccgtg

SEQ ID NO: 691 - DNA, 136 bp, synthetic construct
  source 1..136: mol_type = other DNA
gggcagcaccgtgtactatcagggcaagtgcctgacctggaagggacctagaaggcaactgcctgctgtggtgcctgctcctttgcctcctccatgtggaagctctgcccatctgctgccacctgttccaggcgga

SEQ ID NO: 692 - DNA, 549 bp, synthetic construct
  source 1..549: mol_type = other DNA
ctgtgggtgtcccagccacctgaaattcggacactggaaggctcctccgcctttctgccctgtagctttaacgccagccaggggagactcgccatcggctctgtgacatggttccgggatgaagtcgtccctggaaaagaagttcgcaacggaacaccagagttcagaggcagactcgccccactggcaagctccagattcctgcatgaccatcaggctgaactgcacattagggacgtgcggggccacgatgcctccatctatgtgtgtcgggtcgaagtgcttggactcggcgtcggaactggaaacggcactaggctggtggtcgagaaagaacatccacagcttggcgctggcaccgtcctgttgcttagagccggattctatgccgtcagcttcctgtccgtggctgtggggtctacagtgtattaccagggaaaatgtctcacctggaaaggccccagacgccagcttccagctgttgttcctgctccactgccaccaccttgtggctcctctgctcacttgcttccaccagtgcctggcgga

SEQ ID NO: 693 - DNA, 225 bp, synthetic construct
  source 1..225: mol_type = other DNA
gtcgagaaagaacatccacagcttggcgctggcaccgtcctgttgcttagagccggattctatgccgtcagcttcctgtccgtggctgtggggtctacagtgtattaccagggaaaatgtctcacctggaaaggccccagacgccagcttccagctgttgttcctgctccactgccaccaccttgtggctcctctgctcacttgcttccaccagtgcctggcgga

SEQ ID NO: 694 - DNA, 324 bp, synthetic construct
  source 1..324: mol_type = other DNA
ctgtgggtgtcccagccacctgaaattcggacactggaaggctcctccgcctttctgccctgtagctttaacgccagccaggggagactcgccatcggctctgtgacatggttccgggatgaagtcgtccctggaaaagaagttcgcaacggaacaccagagttcagaggcagactcgccccactggcaagctccagattcctgcatgaccatcaggctgaactgcacattagggacgtgcggggccacgatgcctccatctatgtgtgtcgggtcgaagtgcttggactcggcgtcggaactggaaacggcactaggctggtg

SEQ ID NO: 695 - DNA, 27 bp, synthetic construct
  source 1..27: mol_type = other DNA
gtcgagaaagaacatccacagcttggc

SEQ ID NO: 696 - DNA, 63 bp, synthetic construct
  source 1..63: mol_type = other DNA
gctggcaccgtcctgttgcttagagccggattctatgccgtcagcttcctgtccgtggctgtg

SEQ ID NO: 697 - DNA, 135 bp, synthetic construct
  source 1..135: mol_type = other DNA
gggtctacagtgtattaccagggaaaatgtctcacctggaaaggccccagacgccagcttccagctgttgttcctgctccactgccaccaccttgtggctcctctgctcacttgcttccaccagtgcctggcgga

SEQ ID NO: 698 - DNA, 858 bp, synthetic construct
  source 1..858: mol_type = other DNA
atggcttggagagccctgcatcctctgctgctgcttctcctgctgttccctggatctcaggccggtaccagcggagaattcggatctctcgagcagtctaaagcccaggtgctgcaatctgtggccggacagacactgacagtgcggtgtcagtatcctcctaccggcagcctgtacgagaagaaaggctggtgcaaagaggccagcgcactcgtctgtatcagactggtcaccagcagcaagccccggacaatggcatggaccagcagattcaccatctgggacgatcccgacgccggcttctttaccgtgaccatgaccgacctgagagaagaggacagcggccactactggtgccggatctacagacccagcgacaacagcgtgtccaagagcgtgcggttctacctggtggtgtctcctgcctctgccagcacacagacaagctggaccccacgcgatctggtgtctagccagactcagacccagagctgtgtgcctcctacagctggtgctagacaggcccctgagagcccttctacaatccccgttccaagccagcctcagaacagcacactcagacctggacctgccgctcctattgctctggtgcctgtgttttgtggcctgctggtggctaagagcctggtgctgtctgccctgcttgtttggtggggagacatctggtggaaaaccatgatggaactgcggagcctggacacccagaaggccacctgtcatctccagcaagtgaccgatctgccctggacctctgtgtcaagccccgtggaaagagagatcctgtaccacaccgtggctcggaccaagatcagcgacgacgatgatgagcacaccctt

SEQ ID NO: 699 - DNA, 765 bp, synthetic construct
  source 1..765: mol_type = other DNA
cagtctaaagcccaggtgctgcaatctgtggccggacagacactgacagtgcggtgtcagtatcctcctaccggcagcctgtacgagaagaaaggctggtgcaaagaggccagcgcactcgtctgtatcagactggtcaccagcagcaagccccggacaatggcatggaccagcagattcaccatctgggacgatcccgacgccggcttctttaccgtgaccatgaccgacctgagagaagaggacagcggccactactggtgccggatctacagacccagcgacaacagcgtgtccaagagcgtgcggttctacctggtggtgtctcctgcctctgccagcacacagacaagctggaccccacgcgatctggtgtctagccagactcagacccagagctgtgtgcctcctacagctggtgctagacaggcccctgagagcccttctacaatccccgttccaagccagcctcagaacagcacactcagacctggacctgccgctcctattgctctggtgcctgtgttttgtggcctgctggtggctaagagcctggtgctgtctgccctgcttgtttggtggggagacatctggtggaaaaccatgatggaactgcggagcctggacacccagaaggccacctgtcatctccagcaagtgaccgatctgccctggacctctgtgtcaagccccgtggaaagagagatcctgtaccacaccgtggctcggaccaagatcagcgacgacgatgatgagcacaccctt

SEQ ID NO: 700 - DNA, 468 bp, synthetic construct
  source 1..468: mol_type = other DNA
aagagcgtgcggttctacctggtggtgtctcctgcctctgccagcacacagacaagctggaccccacgcgatctggtgtctagccagactcagacccagagctgtgtgcctcctacagctggtgctagacaggcccctgagagcccttctacaatccccgttccaagccagcctcagaacagcacactcagacctggacctgccgctcctattgctctggtgcctgtgttttgtggcctgctggtggctaagagcctggtgctgtctgccctgcttgtttggtggggagacatctggtggaaaaccatgatggaactgcggagcctggacacccagaaggccacctgtcatctccagcaagtgaccgatctgccctggacctctgtgtcaagccccgtggaaagagagatcctgtaccacaccgtggctcggaccaagatcagcgacgacgatgatgagcacaccctt

SEQ ID NO: 701 - DNA, 297 bp, synthetic construct
  source 1..297: mol_type = other DNA
cagtctaaagcccaggtgctgcaatctgtggccggacagacactgacagtgcggtgtcagtatcctcctaccggcagcctgtacgagaagaaaggctggtgcaaagaggccagcgcactcgtctgtatcagactggtcaccagcagcaagccccggacaatggcatggaccagcagattcaccatctgggacgatcccgacgccggcttctttaccgtgaccatgaccgacctgagagaagaggacagcggccactactggtgccggatctacagacccagcgacaacagcgtgtcc

SEQ ID NO: 702 - DNA, 216 bp, synthetic construct
  source 1..216: mol_type = other DNA
aagagcgtgcggttctacctggtggtgtctcctgcctctgccagcacacagacaagctggaccccacgcgatctggtgtctagccagactcagacccagagctgtgtgcctcctacagctggtgctagacaggcccctgagagcccttctacaatccccgttccaagccagcctcagaacagcacactcagacctggacctgccgctcctattgct

SEQ ID NO: 703 - DNA, 63 bp, synthetic construct
  source 1..63: mol_type = other DNA
ctggtgcctgtgttttgtggcctgctggtggctaagagcctggtgctgtctgccctgcttgtt

SEQ ID NO: 704 - DNA, 189 bp, synthetic construct
  source 1..189: mol_type = other DNA
tggtggggagacatctggtggaaaaccatgatggaactgcggagcctggacacccagaaggccacctgtcatctccagcaagtgaccgatctgccctggacctctgtgtcaagccccgtggaaagagagatcctgtaccacaccgtggctcggaccaagatcagcgacgacgatgatgagcacaccctt

SEQ ID NO: 705 - DNA, 855 bp, synthetic construct
  source 1..855: mol_type = other DNA
atggcttggcgtgcactccatccattgctgttgttgctgctcctgtttcctggcagccaggctggatccagcttcgaaggcagcacgcgtcagagcaaggctcaggttctccagagtgtggcaggccagactctgactgtcagatgccagtatccaccaacaggctccctctatgagaaaaaaggatggtgtaaagaggcttctgccctcgtctgcatccggctggttacctctagcaagcccagaactatggcctggacatcccggtttacaatctgggatgaccctgatgccggatttttcacagtgacaatgacggatctgcgcgaggaagattccgggcactattggtgtagaatctacaggccctccgacaactccgtgtctaagtctgtgcgcttttacctggtcgtcagccctgccagtgcctccactcagacatcttggaccccaagggaccttgtgtcctctcagacacagacacagtcctgcgtgccaccaactgctggcgcaagacaggctccagagtctcccagcacaatccccgtcccttctcagccccagaactccacacttaggccaggaccagctgctccaatcgcactggtcccagtgttctgcggactgctggttgccaagtctctggtgctgagcgcactcctcgtttggtggggcgatatttggtggaaaacgatgatggaattgagatccctcgatacgcagaaagccacatgccaccttcagcaagtcacagacttgccttggaccagcgtcagctctcccgtggaacgggaaattctgtatcatacagtggcccgcaccaagatttccgacgatgacgacgagcacacactg

SEQ ID NO: 706 - DNA, 765 bp, synthetic construct
  source 1..765: mol_type = other DNA
cagagcaaggctcaggttctccagagtgtggcaggccagactctgactgtcagatgccagtatccaccaacaggctccctctatgagaaaaaaggatggtgtaaagaggcttctgccctcgtctgcatccggctggttacctctagcaagcccagaactatggcctggacatcccggtttacaatctgggatgaccctgatgccggatttttcacagtgacaatgacggatctgcgcgaggaagattccgggcactattggtgtagaatctacaggccctccgacaactccgtgtctaagtctgtgcgcttttacctggtcgtcagccctgccagtgcctccactcagacatcttggaccccaagggaccttgtgtcctctcagacacagacacagtcctgcgtgccaccaactgctggcgcaagacaggctccagagtctcccagcacaatccccgtcccttctcagccccagaactccacacttaggccaggaccagctgctccaatcgcactggtcccagtgttctgcggactgctggttgccaagtctctggtgctgagcgcactcctcgtttggtggggcgatatttggtggaaaacgatgatggaattgagatccctcgatacgcagaaagccacatgccaccttcagcaagtcacagacttgccttggaccagcgtcagctctcccgtggaacgggaaattctgtatcatacagtggcccgcaccaagatttccgacgatgacgacgagcacacactg

SEQ ID NO: 707 - DNA, 468 bp, synthetic construct
  source 1..468: mol_type = other DNA
aagtctgtgcgcttttacctggtcgtcagccctgccagtgcctccactcagacatcttggaccccaagggaccttgtgtcctctcagacacagacacagtcctgcgtgccaccaactgctggcgcaagacaggctccagagtctcccagcacaatccccgtcccttctcagccccagaactccacacttaggccaggaccagctgctccaatcgcactggtcccagtgttctgcggactgctggttgccaagtctctggtgctgagcgcactcctcgtttggtggggcgatatttggtggaaaacgatgatggaattgagatccctcgatacgcagaaagccacatgccaccttcagcaagtcacagacttgccttggaccagcgtcagctctcccgtggaacgggaaattctgtatcatacagtggcccgcaccaagatttccgacgatgacgacgagcacacactg

SEQ ID NO: 708 - DNA, 297 bp, synthetic construct
  source 1..297: mol_type = other DNA
cagagcaaggctcaggttctccagagtgtggcaggccagactctgactgtcagatgccagtatccaccaacaggctccctctatgagaaaaaaggatggtgtaaagaggcttctgccctcgtctgcatccggctggttacctctagcaagcccagaactatggcctggacatcccggtttacaatctgggatgaccctgatgccggatttttcacagtgacaatgacggatctgcgcgaggaagattccgggcactattggtgtagaatctacaggccctccgacaactccgtgtct

SEQ ID NO: 709 - DNA, 216 bp, synthetic construct
  source 1..216: mol_type = other DNA
aagtctgtgcgcttttacctggtcgtcagccctgccagtgcctccactcagacatcttggaccccaagggaccttgtgtcctctcagacacagacacagtcctgcgtgccaccaactgctggcgcaagacaggctccagagtctcccagcacaatccccgtcccttctcagccccagaactccacacttaggccaggaccagctgctccaatcgca

SEQ ID NO: 710 - DNA, 63 bp, synthetic construct
  source 1..63: mol_type = other DNA
ctggtcccagtgttctgcggactgctggttgccaagtctctggtgctgagcgcactcctcgtt

SEQ ID NO: 711 - DNA, 189 bp, synthetic construct
  source 1..189: mol_type = other DNA
tggtggggcgatatttggtggaaaacgatgatggaattgagatccctcgatacgcagaaagccacatgccaccttcagcaagtcacagacttgccttggaccagcgtcagctctcccgtggaacgggaaattctgtatcatacagtggcccgcaccaagatttccgacgatgacgacgagcacacactg

SEQ ID NO: 712 - DNA, 849 bp, synthetic construct
  source 1..849: mol_type = other DNA
cagcagcagacactgcccaagcctttcatttgggccgagcctcacttcatggtgcccaaagaaaagcaagtgaccatctgctgccagggcaactacggcgctgtggaataccagctgcacttcgagggaagcctgttcgccgtggacagacctaagcctcctgagcggatcaacaaggtgcagttctacatccccgacatgaacagccggatggccggacagtacagctgcatctatagagtgggcgagctttggagcgagcccagcaatctgctggatctggtggtcaccgagatgtacgacacccctacactgagcgtgcaccccggacctgaagtgatctctggcgagaaagtgaccttctactgtcggctggataccgccaccagcatgtttctgctgctcaaagaaggccggtccagccacgtgcagcgcggatatggaaaagtgcaggccgagtttcccctgggacctgtgacaacagcccacagaggcacctacagatgcttcggcagctacaacaaccacgcttggagcttccctagcgagcccgtgaagttgcttgtgaccggcgacatcgagaacaccagtctggcccctgaggaccctacctttcctgccgatacctggggcacctacctgctgaccacagagacaggactccagaaagatcacgccctgtgggaccacacagcccagaacctgctgagaatgggcctcgcctttctggtgctggttgccctcgtgtggttcctggtggaagattggctgagccggaagcggacaagagagagagccagcagagcctctacctgggagggaagaagaaggctgaacacccagacactt

SEQ ID NO: 713 - DNA, 558 bp, synthetic construct
  source 1..558: mol_type = other DNA
gagatgtacgacacccctacactgagcgtgcaccccggacctgaagtgatctctggcgagaaagtgaccttctactgtcggctggataccgccaccagcatgtttctgctgctcaaagaaggccggtccagccacgtgcagcgcggatatggaaaagtgcaggccgagtttcccctgggacctgtgacaacagcccacagaggcacctacagatgcttcggcagctacaacaaccacgcttggagcttccctagcgagcccgtgaagttgcttgtgaccggcgacatcgagaacaccagtctggcccctgaggaccctacctttcctgccgatacctggggcacctacctgctgaccacagagacaggactccagaaagatcacgccctgtgggaccacacagcccagaacctgctgagaatgggcctcgcctttctggtgctggttgccctcgtgtggttcctggtggaagattggctgagccggaagcggacaagagagagagccagcagagcctctacctgggagggaagaagaaggctgaacacccagacactt

SEQ ID NO: 714 - DNA, 528 bp, synthetic construct
  source 1..528: mol_type = other DNA
caccccggacctgaagtgatctctggcgagaaagtgaccttctactgtcggctggataccgccaccagcatgtttctgctgctcaaagaaggccggtccagccacgtgcagcgcggatatggaaaagtgcaggccgagtttcccctgggacctgtgacaacagcccacagaggcacctacagatgcttcggcagctacaacaaccacgcttggagcttccctagcgagcccgtgaagttgcttgtgaccggcgacatcgagaacaccagtctggcccctgaggaccctacctttcctgccgatacctggggcacctacctgctgaccacagagacaggactccagaaagatcacgccctgtgggaccacacagcccagaacctgctgagaatgggcctcgcctttctggtgctggttgccctcgtgtggttcctggtggaagattggctgagccggaagcggacaagagagagagccagcagagcctctacctgggagggaagaagaaggctgaacacccagacactt

SEQ ID NO: 715 - DNA, 279 bp, synthetic construct
  source 1..279: mol_type = other DNA
ggcgacatcgagaacaccagtctggcccctgaggaccctacctttcctgccgatacctggggcacctacctgctgaccacagagacaggactccagaaagatcacgccctgtgggaccacacagcccagaacctgctgagaatgggcctcgcctttctggtgctggttgccctcgtgtggttcctggtggaagattggctgagccggaagcggacaagagagagagccagcagagcctctacctgggagggaagaagaaggctgaacacccagacactt

SEQ ID NO: 716 - DNA, 291 bp, synthetic construct
  source 1..291: mol_type = other DNA
cagcagcagacactgcccaagcctttcatttgggccgagcctcacttcatggtgcccaaagaaaagcaagtgaccatctgctgccagggcaactacggcgctgtggaataccagctgcacttcgagggaagcctgttcgccgtggacagacctaagcctcctgagcggatcaacaaggtgcagttctacatccccgacatgaacagccggatggccggacagtacagctgcatctatagagtgggcgagctttggagcgagcccagcaatctgctggatctggtggtcacc

SEQ ID NO: 717 - DNA, 30 bp, synthetic construct
  source 1..30: mol_type = other DNA
gagatgtacgacacccctacactgagcgtg

SEQ ID NO: 718 - DNA, 249 bp, synthetic construct
  source 1..249: mol_type = other DNA
caccccggacctgaagtgatctctggcgagaaagtgaccttctactgtcggctggataccgccaccagcatgtttctgctgctcaaagaaggccggtccagccacgtgcagcgcggatatggaaaagtgcaggccgagtttcccctgggacctgtgacaacagcccacagaggcacctacagatgcttcggcagctacaacaaccacgcttggagcttccctagcgagcccgtgaagttgcttgtgacc

SEQ ID NO: 719 - DNA, 141 bp, synthetic construct
  source 1..141: mol_type = other DNA
ggcgacatcgagaacaccagtctggcccctgaggaccctacctttcctgccgatacctggggcacctacctgctgaccacagagacaggactccagaaagatcacgccctgtgggaccacacagcccagaacctgctgaga

SEQ ID NO: 720 - DNA, 63 bp, synthetic construct
  source 1..63: mol_type = other DNA
atgggcctcgcctttctggtgctggttgccctcgtgtggttcctggtggaagattggctgagc

SEQ ID NO: 721 - DNA, 75 bp, synthetic construct
  source 1..75: mol_type = other DNA
cggaagcggacaagagagagagccagcagagcctctacctgggagggaagaagaaggctgaacacccagacactt

SEQ ID NO: 722 - DNA, 849 bp, synthetic construct
  source 1..849: mol_type = other DNA
caacaacagaccctgcctaaaccattcatctgggctgaaccccactttatggttccgaaagagaaacaagtcacgatttgttgccaagggaattacggggccgtcgagtatcagctccactttgagggctccctgtttgctgtggatcggcccaagccacctgaaagaatcaacaaagtccaattctatattcctgatatgaactcccgcatggcaggccagtattcatgtatctaccgcgtgggagaactttggagtgaaccctctaacctgctggacctcgtcgtgacagagatgtatgatacacccacactgtctgtgcaccctgggccagaagttatcagcggagaaaaagttaccttttattgccgcctcgataccgctacctctatgttcctcttgctgaaagagggccgcagctctcacgtgcagcgaggctacggaaaggtccaagctgagtttcctctcggccccgtgaccaccgctcacaggggcacatatagatgttttggctcttataacaatcatgcctggtcattcccatccgagcctgtgaaactgctggtcacaggcgatattgagaatacctctctggccccagaagatcctacattccccgccgacacatggggaacatatctgctgacaaccgaaaccgggctgcaaaaggaccatgctctgtgggatcataccgctcagaatctgcttcggatggggcttgcattcctggtcctggtggctcttgtctggtttctggtcgaggactggctgtcccggaagagaaccagagaaagagcttccagggccagcacctgggaaggcagacgcagactgaatactcagaccctg

SEQ ID NO: 723 - DNA, 558 bp, synthetic construct
  source 1..558: mol_type = other DNA
gagatgtatgatacacccacactgtctgtgcaccctgggccagaagttatcagcggagaaaaagttaccttttattgccgcctcgataccgctacctctatgttcctcttgctgaaagagggccgcagctctcacgtgcagcgaggctacggaaaggtccaagctgagtttcctctcggccccgtgaccaccgctcacaggggcacatatagatgttttggctcttataacaatcatgcctggtcattcccatccgagcctgtgaaactgctggtcacaggcgatattgagaatacctctctggccccagaagatcctacattccccgccgacacatggggaacatatctgctgacaaccgaaaccgggctgcaaaaggaccatgctctgtgggatcataccgctcagaatctgcttcggatggggcttgcattcctggtcctggtggctcttgtctggtttctggtcgaggactggctgtcccggaagagaaccagagaaagagcttccagggccagcacctgggaaggcagacgcagactgaatactcagaccctg

SEQ ID NO: 724 - DNA, 531 bp, synthetic construct
  source 1..531: mol_type = other DNA
gtgcaccctgggccagaagttatcagcggagaaaaagttaccttttattgccgcctcgataccgctacctctatgttcctcttgctgaaagagggccgcagctctcacgtgcagcgaggctacggaaaggtccaagctgagtttcctctcggccccgtgaccaccgctcacaggggcacatatagatgttttggctcttataacaatcatgcctggtcattcccatccgagcctgtgaaactgctggtcacaggcgatattgagaatacctctctggccccagaagatcctacattccccgccgacacatggggaacatatctgctgacaaccgaaaccgggctgcaaaaggaccatgctctgtgggatcataccgctcagaatctgcttcggatggggcttgcattcctggtcctggtggctcttgtctggtttctggtcgaggactggctgtcccggaagagaaccagagaaagagcttccagggccagcacctgggaaggcagacgcagactgaatactcagaccctg

SEQ ID NO: 725 - DNA, 279 bp, synthetic construct
  source 1..279: mol_type = other DNA
ggcgatattgagaatacctctctggccccagaagatcctacattccccgccgacacatggggaacatatctgctgacaaccgaaaccgggctgcaaaaggaccatgctctgtgggatcataccgctcagaatctgcttcggatggggcttgcattcctggtcctggtggctcttgtctggtttctggtcgaggactggctgtcccggaagagaaccagagaaagagcttccagggccagcacctgggaaggcagacgcagactgaatactcagaccctg

SEQ ID NO: 726 - DNA, 291 bp, synthetic construct
  source 1..291: mol_type = other DNA
caacaacagaccctgcctaaaccattcatctgggctgaaccccactttatggttccgaaagagaaacaagtcacgatttgttgccaagggaattacggggccgtcgagtatcagctccactttgagggctccctgtttgctgtggatcggcccaagccacctgaaagaatcaacaaagtccaattctatattcctgatatgaactcccgcatggcaggccagtattcatgtatctaccgcgtgggagaactttggagtgaaccctctaacctgctggacctcgtcgtgaca

SEQ ID NO: 727 - DNA, 30 bp, synthetic construct
  source 1..30: mol_type = other DNA
gagatgtatgatacacccacactgtctgtg

SEQ ID NO: 728 - DNA, 249 bp, synthetic construct
  source 1..249: mol_type = other DNA
caccctgggccagaagttatcagcggagaaaaagttaccttttattgccgcctcgataccgctacctctatgttcctcttgctgaaagagggccgcagctctcacgtgcagcgaggctacggaaaggtccaagctgagtttcctctcggccccgtgaccaccgctcacaggggcacatatagatgttttggctcttataacaatcatgcctggtcattcccatccgagcctgtgaaactgctggtcaca

SEQ ID NO: 729 - DNA, 141 bp, synthetic construct
  source 1..141: mol_type = other DNA
ggcgatattgagaatacctctctggccccagaagatcctacattccccgccgacacatggggaacatatctgctgacaaccgaaaccgggctgcaaaaggaccatgctctgtgggatcataccgctcagaatctgcttcgg

SEQ ID NO: 730 - DNA, 63 bp, synthetic construct
  source 1..63: mol_type = other DNA
atggggcttgcattcctggtcctggtggctcttgtctggtttctggtcgaggactggctgtcc

SEQ ID NO: 731 - DNA, 75 bp, synthetic construct
  source 1..75: mol_type = other DNA
cggaagagaaccagagaaagagcttccagggccagcacctgggaaggcagacgcagactgaatactcagaccctg

SEQ ID NO: 732 - DNA, 714 bp, synthetic construct
  source 1..714: mol_type = other DNA
ggcatgcggactgaagacctcccaaaggctgtggtgttcctggagcctcaatggtacagggtgctggagaaggacagtgtgactctgaagtgccagggagcctactcccctgaggacaattccacacagtggtttcacaatgagagcctcatctcaagccaggcctccagctacttcattgacgctgccacagtggacgacagtggagagtacaggtgccagacaaacctctccaccctcagtgacccggtgcagctagaagtccatatcggctggctgttgctccaggcccctcggtgggtgttcaaggaggaagaccctattcacctgaggtgtcacagctggaagaacactgctctgcataaggtcacatatttacagaatggcaaaggcaggaagtattttcatcataattctgacttctacattccaaaagccacactcaaagacagcggctcctacttctgcagggggcttgttgggagtaaaaatgtgtcttcagagactgtgaacatcaccatcactcaaggtttggcagtgtcaaccatctcatcattctttccacctggctaccaagtgtccttctgcctggtcatggtgctgctgttcgccgtggataccggcctgtacttcagcgtcaagaccaacatccggtccagcaccagagactggaaggaccacaagttcaagtggcggaaggaccctcaggacaag

SEQ ID NO: 733 - DNA, 714 bp, synthetic construct
  source 1..714: mol_type = other DNA
ggcatgagaaccgaggacctgcctaaggccgtggtgttcctggaaccccagtggtacagagtgctggaaaaggacagcgtgaccctgaagtgccagggcgcctacagccccgaggacaatagcacccagtggttccacaacgagagcctgatctccagccaggccagcagctacttcatcgacgccgccaccgtggacgacagcggcgagtatagatgccagaccaacctgagcaccctgagcgaccccgtgcagctggaagtgcacatcggatggctgctgctgcaggcccccagatgggtgttcaaagaagaggaccccatccacctgagatgccactcttggaagaacaccgccctgcacaaagtgacctacctgcagaacggcaagggcagaaagtacttccaccacaacagcgacttctacatccccaaggccaccctgaaggactccggctcctacttctgcagaggcctcgtgggcagcaagaacgtgtccagcgagacagtgaacatcaccatcacccagggcctggccgtgtctaccatcagcagctttttcccacccggctaccaggtgtccttctgcctcgtgatggtgctgctgttcgccgtggacaccggcctgtacttcagcgtgaaaacaaacatccggtccagcaccagagactggaaggaccacaagttcaagtggcggaaggacccccaggacaag

SEQ ID NO: 734 - DNA, 714 bp, synthetic construct; identical to SEQ ID NO: 569
  source 1..714: mol_type = other DNA

SEQ ID NO: 735 - DNA, 267 bp, synthetic construct
  source 1..267: mol_type = other DNA
atgattcctgccgtggtgctgctgctcctgctgctggttgaacaagctgccgctctgggatccctgggagagcctcagctgtgctatatcctggacgccatcctgtttctgtacggcatcgtgctgaccctgctgtactgccggctgaagatccaagtgcggaaggccgccatcaccagctacgagaaatccgacggcgtgtacaccggcctgagcaccagaaatcaagagacatacgagacactgaagcacgaaaagcctccacaa

SEQ ID NO: 736 - DNA, 204 bp, synthetic construct
  source 1..204: mol_type = other DNA
ctgggagagcctcagctgtgctatatcctggacgccatcctgtttctgtacggcatcgtgctgaccctgctgtactgccggctgaagatccaagtgcggaaggccgccatcaccagctacgagaaatccgacggcgtgtacaccggcctgagcaccagaaatcaagagacatacgagacactgaagcacgaaaagcctccacaa

SEQ ID NO: 737 - DNA, 267 bp, synthetic construct
  source 1..267: mol_type = other DNA
atgatccctgctgttgtcctcctcctgcttctgctggtcgagcaagcagcagctctcggtaccctcggagaaccacagctctgttacattctggatgctatcctgttcctctatgggatcgtcctgacactcctgtattgcagactcaaaattcaagttcgcaaagccgccattacctcttacgagaagagtgatggggtgtacacaggactgtctacccggaatcaagaaacctacgaaaccctcaaacatgagaagccacctcag

SEQ ID NO: 738 - DNA, 204 bp, synthetic construct
  source 1..204: mol_type = other DNA
ctcggagaaccacagctctgttacattctggatgctatcctgttcctctatgggatcgtcctgacactcctgtattgcagactcaaaattcaagttcgcaaagccgccattacctcttacgagaagagtgatggggtgtacacaggactgtctacccggaatcaagaaacctacgaaaccctcaaacatgagaagccacctcag

SEQ ID NO: 739 - DNA, 267 bp, synthetic construct
  source 1..267: mol_type = other DNA
atgattcctgccgtggtgctgctgctcctgctgctggttgaacaagctgccgctctgggatccctgggagagcctcagctgagctatatcctggacgccatcctgtttctgtacggcatcgtgctgaccctgctgtactgccggctgaagatccaagtgcggaaggccgccatcaccagctacgagaaatccgacggcgtgtacaccggcctgagcaccagaaatcaagagacatacgagacactgaagcacgaaaagcctccacaa

SEQ ID NO: 740 - DNA, 204 bp, synthetic construct
  source 1..204: mol_type = other DNA
ctgggagagcctcagctgagctatatcctggacgccatcctgtttctgtacggcatcgtgctgaccctgctgtactgccggctgaagatccaagtgcggaaggccgccatcaccagctacgagaaatccgacggcgtgtacaccggcctgagcaccagaaatcaagagacatacgagacactgaagcacgaaaagcctccacaa

SEQ ID NO: 741 - DNA, 267 bp, synthetic construct
  source 1..267: mol_type = other DNA
atgatccctgctgttgtcctcctcctgcttctgctggtcgagcaagcagcagctctcggtaccctcggagaaccacagctctcttacattctggatgctatcctgttcctctatgggatcgtcctgacactcctgtattgcagactcaaaattcaagttcgcaaagccgccattacctcttacgagaagagtgatggggtgtacacaggactgtctacccggaatcaagaaacctacgaaaccctcaaacatgagaagccacctcag

SEQ ID NO: 742 - DNA, 204 bp, synthetic construct
  source 1..204: mol_type = other DNA
ctcggagaaccacagctctcttacattctggatgctatcctgttcctctatgggatcgtcctgacactcctgtattgcagactcaaaattcaagttcgcaaagccgccattacctcttacgagaagagtgatggggtgtacacaggactgtctacccggaatcaagaaacctacgaaaccctcaaacatgagaagccacctcag

SEQ ID NO: 743 - DNA, 450 bp, synthetic construct
  source 1..450: mol_type = other DNA
cagagcttcggcctgctggaccccaagctgagctacctgctggatggcatcctgttcatctacggcgtgatcctgaccgccctgttcctgtggcggcggaagcggaaagagaagcagtctgagacaagccccaaagagttcctgaccatctacgaggacgtgaaggacctgaaaacccggcggaaccacgaacaagagcagacctttcctggcggaggcagcaccatctacagcatgatccagagccagagcagcgcccctacaagccaagagcctgcctacacactgtactccctgatccagcctagcagaaagagcggcagccggaagagaaatcacagccccagcttcaacagcacgatctacgaagtgatcggcaagagccagccaaaggctcagaaccctgccagactgagccggaaagagctggaaaacttcgacgtgtacagc

SEQ ID NO: 744 - DNA, 360 bp, synthetic construct
  source 1..360: mol_type = other DNA
tggcggcggaagcggaaagagaagcagtctgagacaagccccaaagagttcctgaccatctacgaggacgtgaaggacctgaaaacccggcggaaccacgaacaagagcagacctttcctggcggaggcagcaccatctacagcatgatccagagccagagcagcgcccctacaagccaagagcctgcctacacactgtactccctgatccagcctagcagaaagagcggcagccggaagagaaatcacagccccagcttcaacagcacgatctacgaagtgatcggcaagagccagccaaaggctcagaaccctgccagactgagccggaaagagctggaaaacttcgacgtgtacagc

SEQ ID NO: 745 - DNA, 456 bp, synthetic construct
  source 1..456: mol_type = other DNA
cagagttttgggttgttggaccctaaattgagctatctgttggacggaatcctgttcatttacggagtgatcctgaccgcattgttcctgtggcgacgcaagcgcaaagaaaagcaaagcgagacaagcccaaaagaatttctcactatatacgaggacgtgaaagatttgaagacgaggcggaatcatgagcaagagcagacatttcctggcgggggctctactatctactcaatgattcaatcccaaagctccgctccgacttcccaagagcccgcttacactctctactcactgatacagccttcaagaaaatcaggctctcggaaacggaatcattccccatccttcaatagtaccatctatgaagtaatcggtaagagtcaacctaaagctcaaaaccccgctcgcttgagccgcaaggagctggaaaacttcgatgtatatagctctaga

SEQ ID NO: 746 - DNA, 360 bp, synthetic construct
  source 1..360: mol_type = other DNA
tggcgacgcaagcgcaaagaaaagcaaagcgagacaagcccaaaagaatttctcactatatacgaggacgtgaaagatttgaagacgaggcggaatcatgagcaagagcagacatttcctggcgggggctctactatctactcaatgattcaatcccaaagctccgctccgacttcccaagagcccgcttacactctctactcactgatacagccttcaagaaaatcaggctctcggaaacggaatcattccccatccttcaatagtaccatctatgaagtaatcggtaagagtcaacctaaagctcaaaaccccgctcgcttgagccgcaaggagctggaaaacttcgatgtatatagc

SEQ ID NO: 747 - DNA, 597 bp, synthetic construct
  source 1..597: mol_type = other DNA
gcaaagcccaccacgactccagcgccgcgaccaccaacaccggcgcccactatcgcgtcgcagcccctgtccctgagaccagaggcgtgtagaccagcggctggaggcgcagtgcacacgagggggctggacttcgcctgtgacagcaacctgtttgtggcctcttggatcgccgtgatgattatcttcagaatcggaatggccgtggctatcttctgctgcttcttcttcccatcctggcggcggaagcggaaagagaagcagtctgagacaagccccaaagagttcctgaccatctacgaggacgtgaaggacctgaaaacccggcggaaccacgaacaagagcagacctttcctggcggaggcagcaccatctacagcatgatccagagccagagcagcgcccctacaagccaagagcctgcctacacactgtactccctgatccagcctagcagaaagagcggcagccggaagagaaatcacagccccagcttcaacagcacgatctacgaagtgatcggcaagagccagccaaaggctcagaaccctgccagactgagccggaaagagctggaaaacttcgacgtgtacagc

SEQ ID NO: 748 - DNA, 144 bp, synthetic construct
  source 1..144: mol_type = other DNA
gcaaagcccaccacgactccagcgccgcgaccaccaacaccggcgcccactatcgcgtcgcagcccctgtccctgagaccagaggcgtgtagaccagcggctggaggcgcagtgcacacgagggggctggacttcgcctgtgac

SEQ ID NO: 749 - DNA, 93 bp, synthetic construct
  source 1..93: mol_type = other DNA
agcaacctgtttgtggcctcttggatcgccgtgatgattatcttcagaatcggaatggccgtggctatcttctgctgcttcttcttcccatcc

SEQ ID NO: 750 - DNA, 360 bp, synthetic construct; identical to SEQ ID NO: 744
  source 1..360: mol_type = other DNA

SEQ ID NO: 751 - DNA, 597 bp, synthetic construct
  source 1..597: mol_type = other DNA
gctaagccaaccaccacgccagctcctagacctcctacaccagctcctacaatcgccagccagcctctgtctctcagacccgaagcctgcagacctgctgctggcggagctgtgcataccagaggactggatttcgcctgcgattccaatctgttcgtggcaagctggattgccgtcatgataattttccgcattggaatggctgtcgcaatcttttgttgtttcttctttccctcctggcgacgcaagcgcaaagaaaagcaaagcgagacaagcccaaaagaatttctcactatatacgaggacgtgaaagatttgaagacgaggcggaatcatgagcaagagcagacatttcctggcgggggctctactatctactcaatgattcaatcccaaagctccgctccgacttcccaagagcccgcttacactctctactcactgatacagccttcaagaaaatcaggctctcggaaacggaatcattccccatccttcaatagtaccatctatgaagtaatcggtaagagtcaacctaaagctcaaaaccccgctcgcttgagccgcaaggagctggaaaacttcgatgtatatagc

SEQ ID NO: 752 - DNA, 144 bp, synthetic construct
  source 1..144: mol_type = other DNA
gctaagccaaccaccacgccagctcctagacctcctacaccagctcctacaatcgccagccagcctctgtctctcagacccgaagcctgcagacctgctgctggcggagctgtgcataccagaggactggatttcgcctgcgat

SEQ ID NO: 753 - DNA, 93 bp, synthetic construct
  source 1..93: mol_type = other DNA
tccaatctgttcgtggcaagctggattgccgtcatgataattttccgcattggaatggctgtcgcaatcttttgttgtttcttctttccctcc

SEQ ID NO: 754 - DNA, 360 bp, synthetic construct; identical to SEQ ID NO: 746
  source 1..360: mol_type = other DNA

SEQ ID NO: 755 - DNA, 597 bp, synthetic construct
  source 1..597: mol_type = other DNA
gcaaagcccaccacgactccagcgccgcgaccaccaacaccggcgcccactatcgcgtcgcagcccctgtccctgagaccagaggcggccagaccagcggctggaggcgcagtgcacacgagggggctggacttcgcctgtgacagcaacctgtttgtggcctcttggatcgccgtgatgattatcttcagaatcggaatggccgtggctatcttctgctgcttcttcttcccatcctggcggcggaagcggaaagagaagcagtctgagacaagccccaaagagttcctgaccatctacgaggacgtgaaggacctgaaaacccggcggaaccacgaacaagagcagacctttcctggcggaggcagcaccatctacagcatgatccagagccagagcagcgcccctacaagccaagagcctgcctacacactgtactccctgatccagcctagcagaaagagcggcagccggaagagaaatcacagccccagcttcaacagcacgatctacgaagtgatcggcaagagccagccaaaggctcagaaccctgccagactgagccggaaagagctggaaaacttcgacgtgtacagc

SEQ ID NO: 756 - DNA, 144 bp, synthetic construct
  source 1..144: mol_type = other DNA
gcaaagcccaccacgactccagcgccgcgaccaccaacaccggcgcccactatcgcgtcgcagcccctgtccctgagaccagaggcggccagaccagcggctggaggcgcagtgcacacgagggggctggacttcgcctgtgac

SEQ ID NO: 757 - DNA, 597 bp, synthetic construct
  source 1..597: mol_type = other DNA
gctaagccaaccaccacgccagctcctagacctcctacaccagctcctacaatcgccagccagcctctgtctctcagacccgaagccgcgagacctgctgctggcggagctgtgcataccagaggactggatttcgcctgcgattccaatctgttcgtggcaagctggattgccgtcatgataattttccgcattggaatggctgtcgcaatcttttgttgtttcttctttccctcctggcgacgcaagcgcaaagaaaagcaaagcgagacaagcccaaaagaatttctcactatatacgaggacgtgaaagatttgaagacgaggcggaatcatgagcaagagcagacatttcctggcgggggctctactatctactcaatgattcaatcccaaagctccgctccgacttcccaagagcccgcttacactctctactcactgatacagccttcaagaaaatcaggctctcggaaacggaatcattccccatccttcaatagtaccatctatgaagtaatcggtaagagtcaacctaaagctcaaaaccccgctcgcttgagccgcaaggagctggaaaacttcgatgtatatagc

SEQ ID NO: 758 - DNA, 144 bp, synthetic construct
  source 1..144: mol_type = other DNA
gctaagccaaccaccacgccagctcctagacctcctacaccagctcctacaatcgccagccagcctctgtctctcagacccgaagccgcgagacctgctgctggcggagctgtgcataccagaggactggatttcgcctgcgat

SEQ ID NO: 759 - DNA, 267 bp, synthetic construct
  source 1..267: mol_type = other DNA
ggcatgcggactgaagacctcccaaaggctgtggtgttcctggagcctcaatggtacagggtgctggagaaggacagtgtgactctgaagtgccagggagcctactcccctgaggacaattccacacagtggtttcacaatgagagcctcatctcaagccaggcctccagctacttcattgacgctgccacagtggacgacagtggagagtacaggtgccagacaaacctctccaccctcagtgacccggtgcagctagaagtccat

SEQ ID NO: 760 - DNA, 252 bp, synthetic construct
  source 1..252: mol_type = other DNA
atcggctggctgttgctccaggcccctcggtgggtgttcaaggaggaagaccctattcacctgaggtgtcacagctggaagaacactgctctgcataaggtcacatatttacagaatggcaaaggcaggaagtattttcatcataattctgacttctacattccaaaagccacactcaaagacagcggctcctacttctgcagggggcttgttgggagtaaaaatgtgtcttcagagactgtgaacatcacc

SEQ ID NO: 761 - DNA, 42 bp, synthetic construct
  source 1..42: mol_type = other DNA
atcggctggctgttgctccaggcccctcggtgggtgttcaag

SEQ ID NO: 762 - DNA, 210 bp, synthetic construct
  source 1..210: mol_type = other DNA
gaggaagaccctattcacctgaggtgtcacagctggaagaacactgctctgcataaggtcacatatttacagaatggcaaaggcaggaagtattttcatcataattctgacttctacattccaaaagccacactcaaagacagcggctcctacttctgcagggggcttgttgggagtaaaaatgtgtcttcagagactgtgaacatcacc

SEQ ID NO: 763 - DNA, 51 bp, synthetic construct
  source 1..51: mol_type = other DNA
atcactcaaggtttggcagtgtcaaccatctcatcattctttccacctggc

SEQ ID NO: 764 - DNA, 69 bp, synthetic construct
  source 1..69: mol_type = other DNA
taccaagtgtccttctgcctggtcatggtgctgctgttcgccgtggataccggcctgtacttcagcgtc

SEQ ID NO: 765 - DNA, 75 bp, synthetic construct
  source 1..75: mol_type = other DNA
aagaccaacatccggtccagcaccagagactggaaggaccacaagttcaagtggcggaaggaccctcaggacaag

SEQ ID NO: 766 - DNA, 714 bp, synthetic construct; identical to SEQ ID NO: 732
  source 1..714: mol_type = other DNA

SEQ ID NO: 767 - DNA, 447 bp, synthetic construct
  source 1..447: mol_type = other DNA
atcggctggctgttgctccaggcccctcggtgggtgttcaaggaggaagaccctattcacctgaggtgtcacagctggaagaacactgctctgcataaggtcacatatttacagaatggcaaaggcaggaagtattttcatcataattctgacttctacattccaaaagccacactcaaagacagcggctcctacttctgcagggggcttgttgggagtaaaaatgtgtcttcagagactgtgaacatcaccatcactcaaggtttggcagtgtcaaccatctcatcattctttccacctggctaccaagtgtccttctgcctggtcatggtgctgctgttcgccgtggataccggcctgtacttcagcgtcaagaccaacatccggtccagcaccagagactggaaggaccacaagttcaagtggcggaaggaccctcaggacaag

SEQ ID NO: 768 - DNA, 195 bp, synthetic construct
  source 1..195: mol_type = other DNA
atcactcaaggtttggcagtgtcaaccatctcatcattctttccacctggctaccaagtgtccttctgcctggtcatggtgctgctgttcgccgtggataccggcctgtacttcagcgtcaagaccaacatccggtccagcaccagagactggaaggaccacaagttcaagtggcggaaggaccctcaggacaag

SEQ ID NO: 769 - DNA, 267 bp, synthetic construct
  source 1..267: mol_type = other DNA
ggaatgaggactgaggatcttcccaaagctgtcgtctttctcgaaccccaatggtatcgggtgctcgaaaaagactctgtgacactgaaatgccaaggggcctactctcccgaggacaactccacacagtggtttcataatgagtccctcatcagctctcaggccagctcttatttcattgatgccgctacagtggacgactccggcgagtatcggtgtcagaccaatctgtctacactgtctgaccccgtgcagcttgaggtccac

SEQ ID NO: 770 - DNA, 252 bp, synthetic construct
  source 1..252: mol_type = other DNA
attggatggttgctcttgcaagccccacgctgggttttcaaagaggaagatccaatccatctgcggtgccacagctggaaaaacaccgctctccacaaagtcacatacctgcaaaatggcaaaggacgcaaatacttccatcacaattccgatttttacattccgaaggctaccctgaaagacagcggcagctatttctgccggggactcgtcggctccaagaatgtgtcctccgaaaccgtgaatatcacg

SEQ ID NO: 771 - DNA, 42 bp, synthetic construct
  source 1..42: mol_type = other DNA
attggatggttgctcttgcaagccccacgctgggttttcaaa

SEQ ID NO: 772 - DNA, 210 bp, synthetic construct
  source 1..210: mol_type = other DNA
gaggaagatccaatccatctgcggtgccacagctggaaaaacaccgctctccacaaagtcacatacctgcaaaatggcaaaggacgcaaatacttccatcacaattccgatttttacattccgaaggctaccctgaaagacagcggcagctatttctgccggggactcgtcggctccaagaatgtgtcctccgaaaccgtgaatatcacg

SEQ ID NO: 773 - DNA, 51 bp, synthetic construct
  source 1..51: mol_type = other DNA
attacccaaggactggctgtgcctacaatctctagcttctttccgcctgga

SEQ ID NO: 774 - DNA, 69 bp, synthetic construct
  source 1..69: mol_type = other DNA
taccaagtctccttctgtcttgtgatggtcctcctgtttgctgtggacacaggactgtacttttccgtg

SEQ ID NO: 775 - DNA, 75 bp, synthetic construct
  source 1..75: mol_type = other DNA
aaaacgaacatccgcagctccacacgcgattggaaagatcacaagtttaaatggcgcaaagatccccaggacaag

SEQ ID NO: 776 - DNA, 714 bp, synthetic construct; identical to SEQ ID NO: 569
  source 1..714: mol_type = other DNA

SEQ ID NO: 777 - DNA, 447 bp, synthetic construct
  source 1..447: mol_type = other DNA
attggatggttgctcttgcaagccccacgctgggttttcaaagaggaagatccaatccatctgcggtgccacagctggaaaaacaccgctctccacaaagtcacatacctgcaaaatggcaaaggacgcaaatacttccatcacaattccgatttttacattccgaaggctaccctgaaagacagcggcagctatttctgccggggactcgtcggctccaagaatgtgtcctccgaaaccgtgaatatcacgattacccaaggactggctgtgcctacaatctctagcttctttccgcctggataccaagtctccttctgtcttgtgatggtcctcctgtttgctgtggacacaggactgtacttttccgtgaaaacgaacatccgcagctccacacgcgattggaaagatcacaagtttaaatggcgcaaagatccccaggacaag

SEQ ID NO: 778 - DNA, 195 bp, synthetic construct
  source 1..195: mol_type = other DNA
attacccaaggactggctgtgcctacaatctctagcttctttccgcctggataccaagtctccttctgtcttgtgatggtcctcctgtttgctgtggacacaggactgtacttttccgtgaaaacgaacatccgcagctccacacgcgattggaaagatcacaagtttaaatggcgcaaagatccccaggacaag

SEQ ID NO: 779 - DNA, 267 bp, synthetic construct
  source 1..267: mol_type = other DNA
ggcatgagaaccgaggacctgcctaaggccgtggtgttcctggaaccccagtggtacagagtgctggaaaaggacagcgtgaccctgaagtgccagggcgcctacagccccgaggacaatagcacccagtggttccacaacgagagcctgatctccagccaggccagcagctacttcatcgacgccgccaccgtggacgacagcggcgagtatagatgccagaccaacctgagcaccctgagcgaccccgtgcagctggaagtgcac

SEQ ID NO: 780 - DNA, 252 bp, synthetic construct
  source 1..252: mol_type = other DNA
atcggatggctgctgctgcaggcccccagatgggtgttcaaagaagaggaccccatccacctgagatgccactcttggaagaacaccgccctgcacaaagtgacctacctgcagaacggcaagggcagaaagtacttccaccacaacagcgacttctacatccccaaggccaccctgaaggactccggctcctacttctgcagaggcctcgtgggcagcaagaacgtgtccagcgagacagtgaacatcacc

SEQ ID NO: 781 - DNA, 42 bp, synthetic construct
  source 1..42: mol_type = other DNA
atcggatggctgctgctgcaggcccccagatgggtgttcaaa

SEQ ID NO: 782 - DNA, 210 bp, synthetic construct
  source 1..210: mol_type = other DNA
gaagaggaccccatccacctgagatgccactcttggaagaacaccgccctgcacaaagtgacctacctgcagaacggcaagggcagaaagtacttccaccacaacagcgacttctacatccccaaggccaccctgaaggactccggctcctacttctgcagaggcctcgtgggcagcaagaacgtgtccagcgagacagtgaacatcacc

SEQ ID NO: 783 - DNA, 51 bp, synthetic construct
  source 1..51: mol_type = other DNA
atcacccagggcctggccgtgtctaccatcagcagctttttcccacccggc

SEQ ID NO: 784 - DNA, 69 bp, synthetic construct
  source 1..69: mol_type = other DNA
taccaggtgtccttctgcctcgtgatggtgctgctgttcgccgtggacaccggcctgtacttcagcgtg

SEQ ID NO: 785 - DNA, 75 bp, synthetic construct
  source 1..75: mol_type = other DNA
aaaacaaacatccggtccagcaccagagactggaaggaccacaagttcaagtggcggaaggacccccaggacaag

SEQ ID NO: 786 - DNA, 714 bp, synthetic construct; identical to SEQ ID NO: 733
  source 1..714: mol_type = other DNA

SEQ ID NO: 787 - DNA, 447 bp, synthetic construct
  source 1..447: mol_type = other DNA
atcggatggctgctgctgcaggcccccagatgggtgttcaaagaagaggaccccatccacctgagatgccactcttggaagaacaccgccctgcacaaagtgacctacctgcagaacggcaagggcagaaagtacttccaccacaacagcgacttctacatccccaaggccaccctgaaggactccggctcctacttctgcagaggcctcgtgggcagcaagaacgtgtccagcgagacagtgaacatcaccatcacccagggcctggccgtgtctaccatcagcagctttttcccacccggctaccaggtgtccttctgcctcgtgatggtgctgctgttcgccgtggacaccggcctgtacttcagcgtgaaaacaaacatccggtccagcaccagagactggaaggaccacaagttcaagtggcggaaggacccccaggacaag

SEQ ID NO: 788 - DNA, 195 bp, synthetic construct
  source 1..195: mol_type = other DNA
atcacccagggcctggccgtgtctaccatcagcagctttttcccacccggctaccaggtgtccttctgcctcgtgatggtgctgctgttcgccgtggacaccggcctgtacttcagcgtgaaaacaaacatccggtccagcaccagagactggaaggaccacaagttcaagtggcggaaggacccccaggacaag

SEQ ID NO: 789 - DNA, 291 bp, synthetic construct
  source 1..291: mol_type = other DNA
gtggccgagggcaagaccgacaaccagtacaccctgtttgtggctggcggcacagttctgctgctgctgttcgtgatctccatcacgactatcatcgtgatctttctgaaccggcggaggcggagagagcggagggatctgtttacagagagctgggacacccagaaggcccctaacaactacagaagccccatcagcaccggccagcctaccaaccagagcatggacgatacccgcgaggacatctacgtgaactaccctaccttcagcagacggcccaagacaagagtt

SEQ ID NO: 790 - DNA, 45 bp, synthetic construct
  source 1..45: mol_type = other DNA
gtggccgagggcaagaccgacaaccagtacaccctgtttgtggct

SEQ ID NO: 791 - DNA, 63 bp, synthetic construct
  source 1..63: mol_type = other DNA
ggcggcacagttctgctgctgctgttcgtgatctccatcacgactatcatcgtgatctttctg

SEQ ID NO: 792 - DNA, 183 bp, synthetic construct
  source 1..183: mol_type = other DNA
aaccggcggaggcggagagagcggagggatctgtttacagagagctgggacacccagaaggcccctaacaactacagaagccccatcagcaccggccagcctaccaaccagagcatggacgatacccgcgaggacatctacgtgaactaccctaccttcagcagacggcccaagacaagagtt

SEQ ID NO: 793 - DNA, 291 bp, synthetic construct
  source 1..291: mol_type = other DNA
gtggctgaaggcaaaacagataatcagtacacactcttcgttgccggcggaaccgtgctgctcctgctctttgtgattagcatcacaacgattatcgtcatcttcctcaaccgcaggcggagaagagagaggcgcgatctgttcaccgagtcttgggatacacagaaagctccgaacaactatcggagccctatctccaccggacagcccacaaatcagtctatggacgacacacgcgaggacatctatgtcaattaccccactttttctaggcggcctaagaccagagtg

SEQ ID NO: 794 - DNA, 45 bp, synthetic construct
  source 1..45: mol_type = other DNA
gtggctgaaggcaaaacagataatcagtacacactcttcgttgcc

SEQ ID NO: 795 - DNA, 63 bp, synthetic construct
  source 1..63: mol_type = other DNA
ggcggaaccgtgctgctcctgctctttgtgattagcatcacaacgattatcgtcatcttcctc

SEQ ID NO: 796 - DNA, 183 bp, synthetic construct
  source 1..183: mol_type = other DNA
aaccgcaggcggagaagagagaggcgcgatctgttcaccgagtcttgggatacacagaaagctccgaacaactatcggagccctatctccaccggacagcccacaaatcagtctatggacgacacacgcgaggacatctatgtcaattaccccactttttctaggcggcctaagaccagagtg

SEQ ID NO: 797 - DNA, 1008 bp, synthetic construct
  source 1..1008: mol_type = other DNA
atggactaccccacactgctgctggctctgctgcatgtgtatagagccctgtgcgaagaggtgctgtggcacacctctgtgcccttcgccgagaacatgagcctggaatgcgtgtaccccagcatgggcatcctgacacaggtggaatggttcaagatcggcacccagcaggactctatcgccatcttcagccccacacacggcatggtcatcagaaagccttacgccgagcgggtgtacttcctgaacagcacaatggcctccaacaacatgaccctgttcttcagaaacgccagcgaggacgacgtgggctactacagctgttccctgtacacataccctcaaggcacctggcagaaagtgatccaggtggtgcagagcgacagcttcgaggctgccgtgcctagcaatagccacatcgtgtctgagcccggcaagaacgtgaccctgacttgccagcctcagatgacctggcctgtgcaggccgttagatgggagaagatccagcctcggcagatcgacctgctgacctactgcaatctggtgcacggcagaaacttcaccagcaagttccccagacagatcgtgtccaactgctcccacggacgttggagcgtgatcgtgatccctgatgtgaccgtgtccgacagcggcctgtatcggtgttacctgcaagcctctgccggcgagaacgagacattcgtgatgagactgacagtggccgagggcaagaccgacaaccagtacaccctgtttgtggctggcggcacagttctgctgctgctgttcgtgatctccatcacgactatcatcgtgatctttctgaaccggcggaggcggagagagcggagggatctgtttacagagagctgggacacccagaaggcccctaacaactacagaagccccatcagcaccggccagcctaccaaccagagcatggacgatacccgcgaggacatctacgtgaactaccctaccttcagcagacggcccaagacaagagtt

SEQ ID NO: 798 - DNA, 954 bp, synthetic construct
  source 1..954: mol_type = other DNA
gaagaggtgctgtggcacacctctgtgcccttcgccgagaacatgagcctggaatgcgtgtaccccagcatgggcatcctgacacaggtggaatggttcaagatcggcacccagcaggactctatcgccatcttcagccccacacacggcatggtcatcagaaagccttacgccgagcgggtgtacttcctgaacagcacaatggcctccaacaacatgaccctgttcttcagaaacgccagcgaggacgacgtgggctactacagctgttccctgtacacataccctcaaggcacctggcagaaagtgatccaggtggtgcagagcgacagcttcgaggctgccgtgcctagcaatagccacatcgtgtctgagcccggcaagaacgtgaccctgacttgccagcctcagatgacctggcctgtgcaggccgttagatgggagaagatccagcctcggcagatcgacctgctgacctactgcaatctggtgcacggcagaaacttcaccagcaagttccccagacagatcgtgtccaactgctcccacggacgttggagcgtgatcgtgatccctgatgtgaccgtgtccgacagcggcctgtatcggtgttacctgcaagcctctgccggcgagaacgagacattcgtgatgagactgacagtggccgagggcaagaccgacaaccagtacaccctgtttgtggctggcggcacagttctgctgctgctgttcgtgatctccatcacgactatcatcgtgatctttctgaaccggcggaggcggagagagcggagggatctgtttacagagagctgggacacccagaaggcccctaacaactacagaagccccatcagcaccggccagcctaccaaccagagcatggacgatacccgcgaggacatctacgtgaactaccctaccttcagcagacggcccaagacaagagtt

SEQ ID NO: 799 - DNA, 1008 bp, synthetic construct
  source 1..1008: mol_type = other DNA
atggattaccctactctgcttctcgccctcctgcacgtgtaccgggcactttgtgaagaagtgctctggcataccagcgtgccatttgccgagaatatgtcccttgagtgtgtgtacccctctatggggattctgacccaagtcgagtggtttaagattgggacgcagcaagacagcattgccatcttctctccaactcacggaatggttattcggaagccctatgccgagagagtctatttcctgaactctacgatggcaagcaacaatatgacgctgttttttcggaacgcctccgaggatgatgtggggtactattcctgtagcctgtacacctatccacaaggcacatggcaaaaagtcattcaagtggtccagtccgactccttcgaggccgcagttccaagcaactcccacatcgttagcgagcctgggaagaatgtcacactgacctgtcagccccaaatgacatggcccgtccaagctgtccgctgggagaaaattcagccaagacagattgatctcctcacctactgtaacctggttcatggccggaatttcacctccaagtttccacggcagattgtcagcaactgtagccacggacgttggagtgtcattgtgattccagacgtgacagtgtctgactccgggctgtacagatgctatctgcaagccagcgcaggcgaaaacgaaacctttgtgatgcggctgaccgtggctgaaggcaaaacagataatcagtacacactcttcgttgccggcggaaccgtgctgctcctgctctttgtgattagcatcacaacgattatcgtcatcttcctcaaccgcaggcggagaagagagaggcgcgatctgttcaccgagtcttgggatacacagaaagctccgaacaactatcggagccctatctccaccggacagcccacaaatcagtctatggacgacacacgcgaggacatctatgtcaattaccccactttttctaggcggcctaagaccagagtg

SEQ ID NO: 800 - DNA, 954 bp, synthetic construct
  source 1..954: mol_type = other DNA
gaagaagtgctctggcataccagcgtgccatttgccgagaatatgtcccttgagtgtgtgtacccctctatggggattctgacccaagtcgagtggtttaagattgggacgcagcaagacagcattgccatcttctctccaactcacggaatggttattcggaagccctatgccgagagagtctatttcctgaactctacgatggcaagcaacaatatgacgctgttttttcggaacgcctccgaggatgatgtggggtactattcctgtagcctgtacacctatccacaaggcacatggcaaaaagtcattcaagtggtccagtccgactccttcgaggccgcagttccaagcaactcccacatcgttagcgagcctgggaagaatgtcacactgacctgtcagccccaaatgacatggcccgtccaagctgtccgctgggagaaaattcagccaagacagattgatctcctcacctactgtaacctggttcatggccggaatttcacctccaagtttccacggcagattgtcagcaactgtagccacggacgttggagtgtcattgtgattccagacgtgacagtgtctgactccgggctgtacagatgctatctgcaagccagcgcaggcgaaaacgaaacctttgtgatgcggctgaccgtggctgaaggcaaaacagataatcagtacacactcttcgttgccggcggaaccgtgctgctcctgctctttgtgattagcatcacaacgattatcgtcatcttcctcaaccgcaggcggagaagagagaggcgcgatctgttcaccgagtcttgggatacacagaaagctccgaacaactatcggagccctatctccaccggacagcccacaaatcagtctatggacgacacacgcgaggacatctatgtcaattaccccactttttctaggcggcctaagaccagagtg

SEQ ID NO: 801 - DNA, 954 bp, synthetic construct
  source 1..954: mol_type = other DNA
gccgctctgggcaaagacacaatcccttggctgggccatctgcttgtgggactgtctggcgctttcggcttcatcatcctggtgtacctgctcatcaactgccggaacaccggaccttggctgaagaaagtgctgaagtgcaacacccctgatccgagcaagttctttagccagctgagcagcgagcatggcggcgacgttcagaaatggctgtctagcccatttcctagcagcagcttcagccctggtggactggcccctgagattagccctctggaagtgctggaacgggacaaagtgacccagctgctcctccagcaggataaggtgccagaacctgccagcctgtccagcaatcacagcctgaccagctgctttaccaaccagggctacttcttcttccatctgcctgacgcactggaaatcgaagcctgccaggtgtacttcacctacgatccctacagcgaagaggaccccgatgaaggtgttgccggtgctcctaccggaagctctcctcaacctctccaacctctgagcggcgaggatgacgcctactgcacattccccagcagagatgacctgctgctgttcagcccttctctgctcggtggaccttctccaccttctacagcacctggcggatctggcgctggcgaggaaagaatgcctccatctctgcaagagcgggtgcccagagattgggaccctcaaccacttggccctccaacacctggtgtccccgacctggttgatttccagcctcctcctgaactggtgctgagagaagccggcgaagaagtgccagacgccggacctagagagggcgttagctttccttggagcagacctcctggacaaggcgagttcagagccctgaatgccagactgcctctgaacaccgatgcctacctgagtctgcaagaactgcaaggacaggaccccactcacctggtt

SEQ ID NO: 802 - DNA, 348 bp, synthetic construct
  source 1..348: mol_type = other DNA
aaccccttcctgttcgccctggaagccgtggttatcagcgtgggctctatgggcctgattatctccctgctgtgcgtgtacttctggctggaacggaccatgccaagaatccccacactgaagaaccttgaggacctggtcaccgagtaccacggcaacttttctgcttggagcggcgtgtccaaaggactggccgaatctctccagcctgactacagcgagagactgtgcctggtgtctgagatccctcctaaaggcggagccctcggagaaggacctggcgcttctccatgtaaccagcacagcccttactgggctcctccttgctacaccctgaagcctgagaca

SEQ ID NO: 803 - DNA, 324 bp, synthetic construct; identical to SEQ ID NO: 688
  source 1..324: mol_type = other DNA

SEQ ID NO: 804 - DNA, 324 bp, synthetic construct; identical to SEQ ID NO: 694
  source 1..324: mol_type = other DNA

SEQ ID NO: 805 - DNA, 297 bp, synthetic construct; identical to SEQ ID NO: 701
  source 1..297: mol_type = other DNA

SEQ ID NO: 806 - DNA, 189 bp, synthetic construct; identical to SEQ ID NO: 704
  source 1..189: mol_type = other DNA

SEQ ID NO: 807 - DNA, 291 bp, synthetic construct; identical to SEQ ID NO: 716
  source 1..291: mol_type = other DNA

SEQ ID NO: 808 - DNA, 249 bp, synthetic construct; identical to SEQ ID NO: 718
  source 1..249: mol_type = other DNA

SEQ ID NO: 809 - DNA, 570 bp, synthetic construct
  source 1..570: mol_type = other DNA
cagcagcagacactgcccaagcctttcatttgggccgagcctcacttcatggtgcccaaagaaaagcaagtgaccatctgctgccagggcaactacggcgctgtggaataccagctgcacttcgagggaagcctgttcgccgtggacagacctaagcctcctgagcggatcaacaaggtgcagttctacatccccgacatgaacagccggatggccggacagtacagctgcatctatagagtgggcgagctttggagcgagcccagcaatctgctggatctggtggtcaccgagatgtacgacacccctacactgagcgtgcaccccggacctgaagtgatctctggcgagaaagtgaccttctactgtcggctggataccgccaccagcatgtttctgctgctcaaagaaggccggtccagccacgtgcagcgcggatatggaaaagtgcaggccgagtttcccctgggacctgtgacaacagcccacagaggcacctacagatgcttcggcagctacaacaaccacgcttggagcttccctagcgagcccgtgaagttgcttgtgacc

SEQ ID NO: 810 - DNA, 291 bp, synthetic construct; identical to SEQ ID NO: 726
  source 1..291: mol_type = other DNA

SEQ ID NO: 811 - DNA, 249 bp, synthetic construct; identical to SEQ ID NO: 728
  source 1..249: mol_type = other DNA

SEQ ID NO: 812 - DNA, 570 bp, synthetic construct
  source 1..570: mol_type = other DNA
caacaacagaccctgcctaaaccattcatctgggctgaaccccactttatggttccgaaagagaaacaagtcacgatttgttgccaagggaattacggggccgtcgagtatcagctccactttgagggctccctgtttgctgtggatcggcccaagccacctgaaagaatcaacaaagtccaattctatattcctgatatgaactcccgcatggcaggccagtattcatgtatctaccgcgtgggagaactttggagtgaaccctctaacctgctggacctcgtcgtgacagagatgtatgatacacccacactgtctgtgcaccctgggccagaagttatcagcggagaaaaagttaccttttattgccgcctcgataccgctacctctatgttcctcttgctgaaagagggccgcagctctcacgtgcagcgaggctacggaaaggtccaagctgagtttcctctcggccccgtgaccaccgctcacaggggcacatatagatgttttggctcttataacaatcatgcctggtcattcccatccgagcctgtgaaactgctggtcaca

SEQ ID NO: 813 - DNA, 267 bp, synthetic construct; identical to SEQ ID NO: 759
  source 1..267: mol_type = other DNA

SEQ ID NO: 814 - DNA, 252 bp, synthetic construct; identical to SEQ ID NO: 760
  source 1..252: mol_type = other DNA

SEQ ID NO: 815 - DNA, 210 bp, synthetic construct; identical to SEQ ID NO: 762
  source 1..210: mol_type = other DNA

SEQ ID NO: 816 - DNA, 519 bp, synthetic construct
  source 1..519: mol_type = other DNA
ggcatgcggactgaagacctcccaaaggctgtggtgttcctggagcctcaatggtacagggtgctggagaaggacagtgtgactctgaagtgccagggagcctactcccctgaggacaattccacacagtggtttcacaatgagagcctcatctcaagccaggcctccagctacttcattgacgctgccacagtggacgacagtggagagtacaggtgccagacaaacctctccaccctcagtgacccggtgcagctagaagtccatatcggctggctgttgctccaggcccctcggtgggtgttcaaggaggaagaccctattcacctgaggtgtcacagctggaagaacactgctctgcataaggtcacatatttacagaatggcaaaggcaggaagtattttcatcataattctgacttctacattccaaaagccacactcaaagacagcggctcctacttctgcagggggcttgttgggagtaaaaatgtgtcttcagagactgtgaacatcacc

SEQ ID NO: 817 - DNA, 267 bp, synthetic construct; identical to SEQ ID NO: 769
  source 1..267: mol_type = other DNA

SEQ ID NO: 818 - DNA, 252 bp, synthetic construct; identical to SEQ ID NO: 770
  source 1..252: mol_type = other DNA

SEQ ID NO: 819 - DNA, 42 bp, synthetic construct; identical to SEQ ID NO: 771
  source 1..42: mol_type = other DNA

SEQ ID NO: 820 - DNA, 210 bp, synthetic construct; identical to SEQ ID NO: 772
  source 1..210: mol_type = other DNA

SEQ ID NO: 821 - DNA, 519 bp, synthetic construct
  source 1..519: mol_type = other DNA
ggaatgaggactgaggatcttcccaaagctgtcgtctttctcgaaccccaatggtatcgggtgctcgaaaaagactctgtgacactgaaatgccaaggggcctactctcccgaggacaactccacacagtggtttcataatgagtccctcatcagctctcaggccagctcttatttcattgatgccgctacagtggacgactccggcgagtatcggtgtcagaccaatctgtctacactgtctgaccccgtgcagcttgaggtccacattggatggttgctcttgcaagccccacgctgggttttcaaagaggaagatccaatccatctgcggtgccacagctggaaaaacaccgctctccacaaagtcacatacctgcaaaatggcaaaggacgcaaatacttccatcacaattccgatttttacattccgaaggctaccctgaaagacagcggcagctatttctgccggggactcgtcggctccaagaatgtgtcctccgaaaccgtgaatatcacg

SEQ ID NO: 822 - DNA, 267 bp, synthetic construct; identical to SEQ ID NO: 779
  source 1..267: mol_type = other DNA

SEQ ID NO: 823 - DNA, 252 bp, synthetic construct; identical to SEQ ID NO: 780
  source 1..252: mol_type = other DNA

SEQ ID NO: 824 - DNA, 42 bp, synthetic construct; identical to SEQ ID NO: 781
  source 1..42: mol_type = other DNA

SEQ ID NO: 825 - DNA, 210 bp, synthetic construct; identical to SEQ ID NO: 782
  source 1..210: mol_type = other DNA

SEQ ID NO: 826 - DNA, 519 bp, synthetic construct
  source 1..519: mol_type = other DNA
ggcatgagaaccgaggacctgcctaaggccgtggtgttcctggaaccccagtggtacagagtgctggaaaaggacagcgtgaccctgaagtgccagggcgcctacagccccgaggacaatagcacccagtggttccacaacgagagcctgatctccagccaggccagcagctacttcatcgacgccgccaccgtggacgacagcggcgagtatagatgccagaccaacctgagcaccctgagcgaccccgtgcagctggaagtgcacatcggatggctgctgctgcaggcccccagatgggtgttcaaagaagaggaccccatccacctgagatgccactcttggaagaacaccgccctgcacaaagtgacctacctgcagaacggcaagggcagaaagtacttccaccacaacagcgacttctacatccccaaggccaccctgaaggactccggctcctacttctgcagaggcctcgtgggcagcaagaacgtgtccagcgagacagtgaacatcacc

SEQ ID NO: 827 - DNA, 15 bp, synthetic construct
  source 1..15: mol_type = other DNA
ctgggagagcctcag

SEQ ID NO: 828 - DNA, 15 bp, synthetic construct
  source 1..15: mol_type = other DNA
ctcggagaaccacag

SEQ ID NO: 829 - DNA, 90 bp, synthetic construct; identical to SEQ ID NO: 499
  source 1..90: mol_type = other DNA

SEQ ID NO: 830 - DNA, 90 bp, synthetic construct; identical to SEQ ID NO: 505
  source 1..90: mol_type = other DNA

SEQ ID NO: 831 - DNA, 90 bp, synthetic construct; identical to SEQ ID NO: 670
  source 1..90: mol_type = other DNA

SEQ ID NO: 832 - DNA, 90 bp, synthetic construct; identical to SEQ ID NO: 671
  source 1..90: mol_type = other DNA

SEQ ID NO: 833 - DNA, 78 bp, synthetic construct
  source 1..78: mol_type = other DNA
ctgggagagcctcagctgtgctatatcctggacgccatcctgtttctgtacggcatcgtgctgaccctgctgtactgc

SEQ ID NO: 834 - DNA, 78 bp, synthetic construct
  source 1..78: mol_type = other DNA
ctcggagaaccacagctctgttacattctggatgctatcctgttcctctatgggatcgtcctgacactcctgtattgc

SEQ ID NO: 835 - DNA, 78 bp, synthetic construct
  source 1..78: mol_type = other DNA
ctgggagagcctcagctgagctatatcctggacgccatcctgtttctgtacggcatcgtgctgaccctgctgtactgc

SEQ ID NO: 836 - DNA, 78 bp, synthetic construct
  source 1..78: mol_type = other DNA
ctcggagaaccacagctctcttacattctggatgctatcctgttcctctatgggatcgtcctgacactcctgtattgc

SEQ ID NO: 837 - DNA, 63 bp, synthetic construct; identical to SEQ ID NO: 690
  source 1..63: mol_type = other DNA

SEQ ID NO: 838 - DNA, 63 bp, synthetic construct; identical to SEQ ID NO: 696
  source 1..63: mol_type = other DNA

SEQ ID NO: 839 - DNA, 63 bp, synthetic construct; identical to SEQ ID NO: 703
  source 1..63: mol_type = other DNA

SEQ ID NO: 840 - DNA, 63 bp, synthetic construct; identical to SEQ ID NO: 710
  source 1..63: mol_type = other DNA

SEQ ID NO: 841 - DNA, 63 bp, synthetic construct; identical to SEQ ID NO: 720
  source 1..63: mol_type = other DNA

SEQ ID NO: 842 - DNA, 63 bp, synthetic construct; identical to SEQ ID NO: 730
  source 1..63: mol_type = other DNA

SEQ ID NO: 843 - DNA, 93 bp, synthetic construct; identical to SEQ ID NO: 749
  source 1..93: mol_type = other DNA

SEQ ID NO: 844 - DNA, 93 bp, synthetic construct; identical to SEQ ID NO: 753
  source 1..93: mol_type = other DNA

SEQ ID NO: 845 - DNA, 69 bp, synthetic construct; identical to SEQ ID NO: 764
  source 1..69: mol_type = other DNA

SEQ ID NO: 846 - DNA, 69 bp, synthetic construct; identical to SEQ ID NO: 774
  source 1..69: mol_type = other DNA

SEQ ID NO: 847 - DNA, 69 bp, synthetic construct; identical to SEQ ID NO: 784
  source 1..69: mol_type = other DNA

SEQ ID NO: 848 - DNA, 63 bp, synthetic construct; identical to SEQ ID NO: 791
  source 1..63: mol_type = other DNA

SEQ ID NO: 849 - DNA, 63 bp, synthetic construct
  source 1..63: mol_type = other DNA
ctgagctatatcctggacgccatcctgtttctgtacggcatcgtgctgaccctgctgtactgc

SEQ ID NO: 850 - DNA, 63 bp, synthetic construct
  source 1..63: mol_type = other DNA
ctctgttacattctggatgctatcctgttcctctatgggatcgtcctgacactcctgtattgc

SEQ ID NO: 851 - DNA, 60 bp, synthetic construct; identical to SEQ ID NO: 629
  source 1..60: mol_type = other DNA

SEQ ID NO: 852 - DNA, 27 bp, synthetic construct
  source 1..27: mol_type = other DNA
gtggaaaaagagcaccctcagctcgga

SEQ ID NO: 853 - DNA, 27 bp, synthetic construct
  source 1..27: mol_type = other DNA
gtcgagaaagaacatccacagcttggc

SEQ ID NO: 854 - DNA, 216 bp, synthetic construct; identical to SEQ ID NO: 702
  source 1..216: mol_type = other DNA

SEQ ID NO: 855 - DNA, 216 bp, synthetic construct; identical to SEQ ID NO: 709
  source 1..216: mol_type = other DNA

SEQ ID NO: 856 - DNA, 141 bp, synthetic construct; identical to SEQ ID NO: 719
  source 1..141: mol_type = other DNA

SEQ ID NO: 857 - DNA, 141 bp, synthetic construct; identical to SEQ ID NO: 729
  source 1..141: mol_type = other DNA

SEQ ID NO: 858 - DNA, 144 bp, synthetic construct; identical to SEQ ID NO: 748
  source 1..144: mol_type = other DNA

SEQ ID NO: 859 - DNA, 144 bp, synthetic construct; identical to SEQ ID NO: 752
  source 1..144: mol_type = other DNA

SEQ ID NO: 860 - DNA, 144 bp, synthetic construct; identical to SEQ ID NO: 756
  source 1..144: mol_type = other DNA

SEQ ID NO: 861 - DNA, 144 bp, synthetic construct; identical to SEQ ID NO: 758
  source 1..144: mol_type = other DNA

SEQ ID NO: 862 - DNA, 51 bp, synthetic construct; identical to SEQ ID NO: 763
  source 1..51: mol_type = other DNA

SEQ ID NO: 863 - DNA, 51 bp, synthetic construct; identical to SEQ ID NO: 773
  source 1..51: mol_type = other DNA

SEQ ID NO: 864 - DNA, 51 bp, synthetic construct; identical to SEQ ID NO: 783
  source 1..51: mol_type = other DNA

SEQ ID NO: 865 - DNA, 45 bp, synthetic construct; identical to SEQ ID NO: 790
  source 1..45: mol_type = other DNA

SEQ ID NO: 866 - DNA, 30 bp, synthetic construct; identical to SEQ ID NO: 623
  source 1..30: mol_type = other DNA

SEQ ID NO: 867 - DNA, 136 bp, synthetic construct; identical to SEQ ID NO: 691
  source 1..136: mol_type = other DNA

SEQ ID NO: 868 - DNA, 135 bp, synthetic construct; identical to SEQ ID NO: 697
  source 1..135: mol_type = other DNA

SEQ ID NO: 869 - DNA, 189 bp, synthetic construct; identical to SEQ ID NO: 704
  source 1..189: mol_type = other DNA

SEQ ID NO: 870 - DNA, 189 bp, synthetic construct; identical to SEQ ID NO: 711
  source 1..189: mol_type = other DNA

SEQ ID NO: 871 - DNA, 75 bp, synthetic construct; identical to SEQ ID NO: 721
  source 1..75: mol_type = other DNA

SEQ ID NO: 872 - DNA, 75 bp, synthetic construct; identical to SEQ ID NO: 731
  source 1..75: mol_type = other DNA

SEQ ID NO: 873 - DNA, 75 bp, synthetic construct; identical to SEQ ID NO: 765
  source 1..75: mol_type = other DNA

SEQ ID NO: 874 - DNA, 75 bp, synthetic construct; identical to SEQ ID NO: 775
  source 1..75: mol_type = other DNA

SEQ ID NO: 875 - DNA, 75 bp, synthetic construct; identical to SEQ ID NO: 785
  source 1..75: mol_type = other DNA

SEQ ID NO: 876 - DNA, 183 bp, synthetic construct; identical to SEQ ID NO: 792
  source 1..183: mol_type = other DNA

SEQ ID NO: 877 - DNA, 126 bp, synthetic construct
  source 1..126: mol_type = other DNA
cggctgaagatccaagtgcggaaggccgccatcaccagctacgagaaatccgacggcgtgtacaccggcctgagcaccagaaatcaagagacatacgagacactgaagcacgaaaagcctccacaa

SEQ ID NO: 878 - DNA, 126 bp, synthetic construct
  source 1..126: mol_type = other DNA
agactcaaaattcaagttcgcaaagccgccattacctcttacgagaagagtgatggggtgtacacaggactgtctacccggaatcaagaaacctacgaaaccctcaaacatgagaagccacctcag

SEQ ID NO: 879 - DNA, 339 bp, synthetic construct; identical to SEQ ID NO: 506
  source 1..339: mol_type = other DNA

SEQ ID NO: 880 - DNA, 339 bp, synthetic construct
  source 1..339: mol_type = other DNA
agagtgaagttcagcagaagcgccgacgcccctgcctaccagcagggacagaaccaactgtacaacgagctgaacctgggcagacgggaagagtacgacgtgctggacaagcggagaggcagggaccctgagatgggcggaaagccccagcggagaaagaacccccaggaaggactgtataacgaactccagaaagacaagatggccgaagcctacagcgagatcggcatgaagggcgagcggagaagaggcaagggccacgatggcctgtaccagggcctgagcaccgccaccaaggacacctatgacgccctgcacatgcaggccctgcctccaaga

SEQ ID NO: 881 - DNA, 339 bp, synthetic construct; identical to SEQ ID NO: 506
  source 1..339: mol_type = other DNA

SEQ ID NO: 882 - DNA, 108 bp, synthetic construct; identical to SEQ ID NO: 672
  source 1..108: mol_type = other DNA

SEQ ID NO: 883 - DNA, 108 bp, synthetic construct; identical to SEQ ID NO: 673
  source 1..108: mol_type = other DNA

SEQ ID NO: 884 - DNA, 360 bp, synthetic construct; identical to SEQ ID NO: 744
  source 1..360: mol_type = other DNA

SEQ ID NO: 885 - DNA, 360 bp, synthetic construct; identical to SEQ ID NO: 746
  source 1..360: mol_type = other DNA

SEQ ID NO: 886 - DNA, 123 bp, synthetic construct; identical to SEQ ID NO: 502
  source 1..123: mol_type = other DNA

SEQ ID NO: 887 - DNA, 126 bp, synthetic construct; identical to SEQ ID NO: 503
  source 1..126: mol_type = other DNA

SEQ ID NO: 888 - DNA, 123 bp, synthetic construct; identical to SEQ ID NO: 508
  source 1..123: mol_type = other DNA

SEQ ID NO: 889 - DNA, 126 bp, synthetic construct; identical to SEQ ID NO: 509
  source 1..126: mol_type = other DNA

SEQ ID NO: 890 - DNA, 696 bp, synthetic construct
  source 1..696: mol_type = other DNA
ctgcaagacccttgctctaattgccctgccggcaccttctgcgacaacaaccggaaccagatttgctccccttgtcctcctaacagcttcagctctgccggcggacagagaacctgcgacatctgtagacagtgcaagggcgtgttcagaacccggaaagagtgcagcagcacctccaacgccgagtgcgattgcacacctggcttccattgtctcggagccggctgttctatgtgcgagcaggattgcaagcagggccaagagctgaccaagaagggctgcaaggattgctgcttcggcacctttaacgaccagaagagaggcatctgccggccttggaccaactgtagcctggatggcaagagcgtgctggtcaacggcaccaaagaacgggatgtcgtgtgcggaccttctccagccgatttgtctcctggcgcttctagcgtgacacctcctgctccagctagagagcctggacacagccctcagatcatctcattctttctggccctgacctctacagccctgctgtttctgctgttcttcctgacactgcggttcagcgtggtcaagcggggcagaaagaagctgctgtacatcttcaagcagcctttcatgcggcccgtgcagaccacacaagaagaggacggctgctcctgtcggttccccgaggaagaggaaggcggttgcgaactt

SEQ ID NO: 891 - DNA, 696 bp, synthetic construct
  source 1..696: mol_type = other DNA
cttcaggacccttgcagcaactgtccagccggaaccttttgtgataacaacagaaatcagatatgcagcccctgtccgccaaactcctttagcagtgctggcggccagcggacatgtgacatttgtcggcagtgcaaaggggttttccgcaccagaaaagagtgctcctccaccagcaatgccgagtgtgactgtaccccaggctttcactgtctcggcgctggatgtagcatgtgtgaacaggactgtaaacaggggcaagaactcacgaagaaagggtgcaaagactgctgttttgggacgttcaacgatcagaagcggggaatctgtaggccctggacaaactgttctctggacggcaagtccgtgctcgtgaatggaacaaaagagcgggacgttgtctgcggcccaagtcctgctgatcttagcccaggcgcttcctctgtgactcctccagctcctgcacgcgaacctggacactctccccagatcatctcattttttctcgctctcacatcaaccgctttgctgttcctgctcttttttctcaccctccggttctccgtggttaagagaggccggaaaaaactcctctatatctttaaacagccctttatgcgcccggtccaaacaacccaagaggaagatggctgctcttgcagattcccggaagaggaagaaggcggctgcgagctg

SEQ ID NO: 892 - DNA, 606 bp, synthetic construct
  source 1..606: mol_type = other DNA
aacaagatcctggtcaagcagagccctatgctggtggcctacgacaacgccgtgaacctgagctgcaagtacagctacaacctgttcagcagagagttccgggccagcctgcacaaaggactggattctgctgtggaagtgtgcgtggtgtacggcaactacagccagcagctccaggtgtacagcaagaccggcttcaactgcgacggcaagctgggcaatgagagcgtgaccttctacctgcaaaacctgtacgtgaaccagaccgacatctatttctgcaagatcgaagtgatgtacccgcctccttacctggacaacgagaagtccaacggcaccatcatccacgtgaagggcaagcacctgtgtccttctccactgttccccggacctagcaagcctttctgggtgctcgttgttgttggcggcgtgctggcctgttatagcctgctggttaccgtggccttcatcatcttttgggtccgaagcaagcggagccggctgctgcacagcgactacatgaacatgacccctagacggcccggaccaaccagaaagcactaccagccttacgctcctcctagagacttcgccgcctatagaagt

SEQ ID NO: 893 - DNA, 606 bp, synthetic construct
  source 1..606: mol_type = other DNA
aacaaaattcttgtgaagcagtccccaatgctcgtcgcctatgataatgccgtgaatctgtcctgcaaatactcctacaatctgtttagccgcgagtttagggcctcactgcacaagggccttgacagcgccgtggaagtctgtgtggtctatggaaattactcccagcaactgcaagtgtactctaagacggggttcaactgtgatggaaaactgggaaacgagtccgtgacgttttacctccaaaatctctatgtcaatcaaacggacatctatttctgcaaaattgaagtcatgtatcctccgccgtacctcgataacgagaaaagcaatgggacgatcattcacgtcaagggaaaacatctctgccccagtcctctgttccctgggccttccaaaccattttgggttctcgtcgtcgtcggcggagtcctggcttgttattctctgcttgtgacagtcgcctttatcatattctgggtccgctccaagagaagcagactgctccactccgattatatgaatatgacacccaggcggccagggcctacacggaaacactatcaaccctacgctccacctcgggatttcgctgcctacagatca

SEQ ID NO: 894 - DNA, 747 bp, synthetic construct
  source 1..747: mol_type = other DNA
ctgcattgcgtgggcgacacataccccagcaacgacagatgctgccacgaatgcagacccggcaatggcatggtgtccagatgcagcagatcccagaacaccgtgtgcagaccttgcggccctggcttctacaacgacgtggtgtctagcaagccctgcaagccttgcacctggtgtaacctgagaagcggcagcgagagaaagcagctgtgtaccgccacacaggataccgtgtgccggtgtagagctggcacacagcctctggacagctacaaacctggcgtggactgtgccccttgtcctcctggacactttagccctggcgacaaccaggcttgcaaaccctggaccaactgtaccctggccggcaagcacacactgcaacctgccagcaatagcagcgacgccatctgcgaggacagagatcctcctgccacacagccccaagagacacaaggacctccagccagacctatcaccgtgcagcctacagaagcctggcctagaacaagccagggacctagcaccagacctgtggaagttcctggtggcagagccgtggccgccattcttggtcttggactggtgctgggactgctcggacctctggctattctgctggccctgtacctgctgagaagggaccaaagactgcctcctgacgctcacaaacctccaggcggaggcagcttcagaacccctatccaagaggaacaggctgacgcccacagcaccctggcaaaaatt

SEQ ID NO: 895 - DNA, 747 bp, synthetic construct
  source 1..747: mol_type = other DNA
ctgcactgtgtcggcgacacctatccatccaacgatcggtgctgccatgagtgccggcctggcaacggaatggtgtctcgatgttctcggagtcagaataccgtctgtaggccatgcggacccggcttttacaatgatgtcgtgtcctccaaaccttgcaagccatgtacttggtgcaatctgcggagcggctctgagcggaaacagctgtgcactgctacccaggacacagtgtgtagatgcagagccggaactcagcccctggactcttataagcccggcgttgactgcgctccatgtccaccagggcacttttccccaggcgacaatcaagcctgtaaaccgtggacaaattgcacactggccgggaaacacaccttgcagccagccagcaattcctccgatgccatctgtgaagatcgggacccaccagccactcagcctcaagaaactcaggggcctcctgctaggcccattacagtgcaacctaccgaggcttggccccggacatctcagggaccttctacaaggccagtggaagtgccaggcggtagagctgtggctgctatccttggattgggcctcgttctcggactgttgggaccacttgcaatcctgctggctctctatctgctgcggcgggatcagagactccctccagatgctcataagccacctggcggcggatctttcaggaccccaattcaagaagaacaagccgacgctcactctaccctggctaagatc

SEQ ID NO: 896 - DNA, 1038 bp, synthetic construct
  source 1..1038: mol_type = other DNA
aagggctgtcagggctctgccgatcacgtggtgtctatcagcggagtgcctctccagctccagcctaacagcatccagaccaaggtggactctatcgcctggaagaagctgctgcccagccagaatggcttccaccacatcctgaagtgggagaacggcagcctgcctagcaacaccagcaacgacagattcagcttcatcgtgaagaacctgagcctgctgattaaggccgctcagcagcaggatagcggcctgtactgtctggaagtgaccagcatcagcggcaaggtgcagaccgccacctttcaggtgttcgtgttcgacaaggtggaaaagccccggctgcaaggccagggcaagatccttgatagaggcagatgccaggtggccctgagctgtctggtttccagagatggcaacgtgtcctacgcctggtacagaggcagcaagctgatccagacagccggcaacctgacctacctggacgaggaagtggacatcaacggcacccacacctacacctgtaatgtgtctaaccccgtgtcctgggagagccacacactgaatctgacccaggactgccagaacgcccaccaagagttcagattctggcccttcctggtcatcatcgtgatcctgagcgccctgttcctgggcaccctggcctgtttttgcgtgtggcgcagaaagcgcaaagagaagcagagcgagacaagccccaaagagttcctgaccatctacgaggacgtgaaggatctgaaaacccggcggaaccacgaacaagagcagacctttcctggcggcggaagcaccatctacagcatgatccagagccagagcagcgcccctacaagccaagagccagcctacacactgtactccctgatccagcctagcagaaagagcggcagccggaagagaaatcacagccccagcttcaacagcacgatctacgaagtgatcggaaagtcccagcctaaggctcagaaccccgccagactgagccggaaagagctggaaaacttcgacgtgtacagc

SEQ ID NO: 897 - DNA, 1038 bp, synthetic construct
  source 1..1038: mol_type = other DNA
aaaggatgccagggaagcgccgaccatgtggtgtcaatttctggcgtgcccctgcaactccagccaaactctattcagaccaaagtcgatagcattgcctggaaaaaattgctgccctctcagaacgggtttcaccacattctcaaatgggaaaatggctctctgccctccaacacctccaacgatcggtttagctttatcgtcaagaatctgtccctgctcatcaaagcagcccagcagcaagactccggcctgtattgcctcgaagtcacctccatctccgggaaagtgcagacagctacattccaagtgttcgtctttgataaggtcgagaagcctagactccaaggacaggggaagattctggacagaggacggtgtcaggtggcactgtcttgccttgtcagccgcgacggcaatgtgtcttatgcttggtatcggggctccaagctgattcaaaccgctgggaatctgacatacctcgatgaagaggttgacatcaatgggacgcacacgtatacttgcaatgtctccaatcctgtcagctgggagtctcataccctgaacctgacacaggattgtcaaaatgcacatcaagagttccggttttggccgtttcttgtgattatcgtgattctgtctgccctcttcctcggaactctggcttgcttctgtgtctggcggcgcaaacggaaagagaaacagtctgagacttccccgaaagagtttctcacgatatacgaagatgtcaaggacctcaagacccgccgcaaccatgagcaagaacagacattcccaggcggaggctccacaatctactccatgattcagtcccagtctagcgccccaacctctcaagagcctgcttataccctgtacagtctgattcagccctccagaaagtccggctctcggaagaggaaccactctcctagcttcaactccaccatatatgaagtcattggcaagtctcagcccaaagcacagaatcctgccaggctgagcagaaaagaacttgagaatttcgacgtctactcc

SEQ ID NO: 898 - DNA, 804 bp, synthetic construct
  source 1..804: mol_type = other DNA
acaccagccgctcctccaaaggccgtgctgaaactggaaccccagtggatcaacgtgctgcaagaggacagcgtgaccctgacctgtagaggcacacacagccctgagagcgacagcatccagtggttccacaacggcaatctgatccccacacacacccagcctagctacagattcaaggccaacaacaacgacagcggcgagtacacctgtcagaccggccagacaagcctgagcgatcctgtgcatctgaccgtgctgtctgagtggctggtgctgcagacaccccacctggaatttcaagagggcgagacaatcgtgctgcggtgccacagctggaaggacaagcctctggtcaaagtgacattcttccagaacgggaagtccaagaagttcagcagaagcgaccccaacttcagcatccctcaggccaatcacagccactccggcgattaccactgcaccggcaatatcggctacaccctgtacagcagcaagcccgtgaccatcacagtgcaggcccctagcagtagccctatgggaatcatcgtggccgtggtcacaggcattgccgtggctgctattgtggctgcagtggtggccctgatctactgccggaagaagagaatctctgccctgcctggctaccccgagtgtagagagatgggagagacactgcccgagaagcccgccaatcctaccaatcctgacgaggccgacaaagtgggagccgagaacaccatcacctacagcctgctgatgcaccccgacgcactggaagaacccgacgaccagaatagaatc

SEQ ID NO: 899 - DNA, 804 bp, synthetic construct
  source 1..804: mol_type = other DNA
actccagctgctccacctaaagctgtcctgaagctcgaacctcaatggattaacgtcctccaagaagattctgtcaccctgacatgccggggcacccactctccagagtctgattccattcagtggtttcataatgggaacctgattccgactcacacgcagcccagctatcggtttaaagctaacaacaatgactccggggagtatacttgccagacaggacagaccagcctgtctgacccagtgcacctgacagttctgagcgaatggctcgtcctgcagacccctcatcttgagttccaagagggcgaaaccattgtcctgagatgccactcctggaaagataagccccttgtgaaagtcacattttttcagaatggcaagagcaagaagttttctcggagcgatccgaatttcagtattccccaggccaaccactctcacagcggagactatcactgtacaggcaacatcgggtatacactctacagctctaagcccgtcacaattaccgttcaggctcccagcagctccccaatgggcattattgtggccgtcgtgaccggaattgctgtggccgcaatcgtggcagctgtcgtcgctctgatctattgcagaaagaagcggatcagcgccctgccagggtatcctgagtgccgcgaaatgggcgaaactctgcctgagaaacctgctaaccccacaaatcccgatgaagctgacaaagtcggcgctgaaaacacgatcacatactccctgctcatgcatcctgacgctcttgaggaacctgacgatcagaaccggatc

SEQ ID NO: 900 - DNA, 1080 bp, synthetic construct
  source 1..1080: mol_type = other DNA
caggtggtggataccaccaaggccgtgattaccctccagcctccttgggtgtccgtgttccaagaggaaaccgtgacactgcactgcgaggtgctgcatctgcctggctctagcagcacccagtggtttctgaatggcaccgccacacagaccagcacacccagctacagaatcaccagcgccagcgtgaacgacagcggcgagtacagatgccagagaggactgagcggcagaagcgaccccattcagctggaaatccacagaggctggctgctgctccaggtgtccagcagagtgtttacagagggcgagcccctggctctgagatgtcacgcctggaaggacaagctggtgtacaacgtgctgtactaccggaacggcaaagccttcaagttcttccactggaacagcaacctgaccatcctcaagaccaacatcagccacaacggcacctaccactgtagcggcatgggcaagcacagatacacaagcgccggcatcagcgtgaccgtgaaagagctgtttcccgctcctgtgctgaacgcctctgtgacaagtccactgctggaaggcaaccttgtgaccctgagctgcgagacaaagctgctgctgcaaagacctggcctccagctgtacttcagcttctacatgggcagcaagaccctgcggggcagaaataccagctccgagtaccagatcctgaccgccagaagagaggacagcggcctgtattggtgcgaagccgccaccgaggatggcaatgtgctgaagagaagccccgagctggaactccaggtgctgggactgcaactgcctacacctgtgtggttccacgtgctgttttacctggccgtgggcatcatgtttctggtcaacaccgtcctgtgggtcaccatcagaaaagagctgaagcggaagaagaagtgggacctcgaaatcagcctggactccggccacgaaaagaaagtgatctccagcctgcaagaggaccggcacctggaagaggaactgaagtgccaagagcagaaagaggaacagctgcaagaaggcgtgcaccgcaaagaacctcaaggcgctaca

SEQ ID NO: 901 - DNA, 1080 bp, synthetic construct
  source 1..1080: mol_type = other DNA
caagtggtggacacaacaaaagccgtcatcaccctgcaaccaccttgggtttcagtctttcaagaagagacagttaccctgcactgtgaagtcctgcacttgcccggaagcagctccacacagtggttcctcaacggcacagctacccagacaagcaccccttcctaccggatcacatctgcctccgtgaacgattccggcgagtataggtgtcagaggggcctgtctggccgcagcgatcctatccagcttgagattcatcgtggatggttgctcctccaagtgtcctccagggtgttcaccgaaggcgaacctctggcactgaggtgccatgcttggaaagataagctcgtctacaatgtcctctactaccgcaatggcaaggcttttaagttttttcattggaactctaatctcacgatcctgaaaacgaacatctcccacaatgggacataccactgctctggcatgggaaaacatcggtacacctctgccggcatctctgtcacagtcaaagaactgttccctgcaccagtcctgaacgcttccgtgacctctccactgcttgagggaaatctggtcaccctgtcctgcgaaactaagttgctgcttcagaggcccggactccagctctacttttcattctatatgggctctaagaccctgagaggccggaacaccagcagcgaatatcagattctgacagctcggcgcgaggactccgggctctattggtgtgaagctgctacagaggacggaaacgtgctgaaacggtcccctgaactggaactgcaagtcctgggccttcagctgccaactccagtgtggtttcatgtcctgttctatctggctgtggggattatgttccttgtgaataccgtgctctgggttaccattcggaaagaactcaagcgcaagaaaaaatgggatcttgagataagcctggacagcgggcatgagaagaaagtcatcagttcccttcaagaggacagacatctcgaagaggaactcaaatgtcaagaacaaaaagaagaacaactccaagagggtgtccatcggaaagagccacagggcgctaca

SEQ ID NO: 902 - DNA, 27 bp, synthetic construct
  source 1..27: mol_type = other DNA
ggggggggggggggggggggggggggg

SEQ ID NO: 903 - DNA, 27 bp, synthetic construct
  source 1..27: mol_type = other DNA
ggggggggggggggggggggggggggg

SEQ ID NO: 904 - DNA, 675 bp, synthetic construct
  source 1..675: mol_type = other DNA
atgtaccggatgcagctgctgagctgtatcgccctgtctctggccctggtcacaaatagcgcccctaccagcagcagcaccaagaaaacccagctgcaactggaacacctcctgctggacctccagatgatcctgaacggcatcaacaactacaagaaccccaagctgaccgccatgctgaccaagaagttctacatgcccaagaaggccaccgagctgaagcacctccagtgcctggaagaggaactgaagcccctggaagaagtgctgaatctggcccagagcaagaacttccacctgaggccaagggacctgatctccaacatcaacgtgatcgtgctggaactgaaaggcagcgagacaaccttcatgtgcgagtacgccgacgagacagctaccatcgtggaatttctgaatcggtggatcaccttctgcgccagcatcatcagcaccctgacaaagatcgaagtgatgtaccctcctccttacctggacaacgagaagtccaacggcaccatcatccacgtgaagggcaagcacctgtgtccttctccactgttccccggacctagcaagcctttctgggtgctcgttgttgttggcggcgtgctggcctgttacagcctgctggttaccgtggccttcatcatcttttgggtccgaagcaagcggagc

SEQ ID NO: 905 - DNA, 675 bp, synthetic construct
  source 1..675: mol_type = other DNA
atgtaccggatgcagctgctgagctgtatcgccctgtctctggccctggtcacaaatagcgcccctaccagcagcagcaccaagaaaacccagctgcaactggaacacctcctgctggacctccagatgatcctgaacggcatcaacaactacaagaaccccaagctgaccgagatgctgaccgccaagttctacatgcccaagaaggccaccgagctgaagcacctccagtgcctggaagaggaactgaagcccctggaagaagtgctgaatctggcccagagcaagaacttccacctgaggccaagggacctgatctccaacatcaacgtgatcgtgctggaactgaaaggcagcgagacaaccttcatgtgcgagtacgccgacgagacagctaccatcgtggaatttctgaatcggtggatcaccttctgccagagcatcatcagcaccctgacaaagatcgaagtgatgtaccctcctccttacctggacaacgagaagtccaacggcaccatcatccacgtgaagggcaagcacctgtgtccttctccactgttccccggacctagcaagcctttctgggtgctcgttgttgttggcggcgtgctggcctgttacagcctgctggttaccgtggccttcatcatcttttgggtccgaagcaagcggagc

SEQ ID NO: 906 - DNA, 675 bp, synthetic construct
  source 1..675: mol_type = other DNA
atgtaccggatgcagctgctgagctgtatcgccctgtctctggccctggtcacaaatagcgcccctaccagcagcagcaccaagaaaacccagctgcaactggaacacctcctgctggacctccagatgatcctgaacggcatcaacaactacaagaaccccaagctgaccgagatgctgaccgccaagttctacatgcccaagaaggccaccgagctgaagcacctccagtgcctggaagaggaactgaagcccctggaagaagtgctgaatctggcccagagcaagaacttccacctgaggccaagggacctgatctccaacatcaacgtggccgtgctggaactgaaaggcagcgagacaaccttcatgtgcgagtacgccgacgagacagctaccatcgtggaatttctgaatcggtggatcaccttctgccagagcatcatcagcaccctgacaaagatcgaagtgatgtaccctcctccttacctggacaacgagaagtccaacggcaccatcatccacgtgaagggcaagcacctgtgtccttctccactgttccccggacctagcaagcctttctgggtgctcgttgttgttggcggcgtgctggcctgttacagcctgctggttaccgtggccttcatcatcttttgggtccgaagcaagcggagc

SEQ ID NO: 907 - DNA, 675 bp, synthetic construct
  source 1..675: mol_type = other DNA
atgtaccggatgcagctgctgagctgtatcgccctgtctctggccctggtcacaaatagcgcccctgccagcagcagcaccaagaaaacccagctgcaactggaacacctcctgctggacctccagatgatcctgaacggcatcaacaactacaagaaccccaagctgacccggatgctgaccgccaagttcgccatgcccaagaaggccaccgagctgaagcacctccagtgcctggaagaggaactgaagcccctggaagaagtgctgaatggggcccagagcaagaacttccacctgaggccaagggacctgatctccaacatcaacgtgatcgtgctggaactgaaaggcagcgagacaaccttcatgtgcgagtacgccgacgagacagctaccatcgtggaatttctgaatcggtggatcaccttcggccagagcatcatcagcaccctgacaaagatcgaagtgatgtaccctcctccttacctggacaacgagaagtccaacggcaccatcatccacgtgaagggcaagcacctgtgtccttctccactgttccccggacctagcaagcctttctgggtgctcgttgttgttggcggcgtgctggcctgttacagcctgctggttaccgtggccttcatcatcttttgggtccgaagcaagcggagc

SEQ ID NO: 908 - DNA, 618 bp, synthetic construct
  source 1..618: mol_type = other DNA
atgtaccggatgcagctgctgagctgtatcgccctgtctctggccctggtcacaaatagcaactgggttaacgtgatctccgacctgaagaagatcgaggacctgatccagtccatgcacatcgacgccacactgtacaccgagagcgacgtgcaccctagctgtaaagtgaccgccatgaagtgctttctgctggaactgcaagtgatctccctggaaagcggcgacgccagcatccacgacaccgtgaagaacctgattatcctggctaacaacagcctgagcagcaacggcaacgtgaccgagtccggctgtaaagagtgcgaggaactggaagagaagaatatcaaagagttcctccagagcttcgtgcacatcgtgcagatgttcatcaacaccagcaagatcgaagtgatgtaccctcctccttacctggacaacgagaagtccaacggcaccatcatccacgtgaagggcaagcacctgtgtccttctccactgttccccggacctagcaagcctttctgggtgctcgttgttgttggcggcgtgctggcctgttacagcctgctggttaccgtggccttcatcatcttttgggtccgaagcaagcggagc

SEQ ID NO: 909 - DNA, 618 bp, synthetic construct
  source 1..618: mol_type = other DNA
atgtaccggatgcagctgctgagctgtatcgccctgtctctggccctggtcacaaatagcaactgggttaacgtgatctccagcctgaagaagatcgaggacctgatccagtccatgcacatcgacgccacactgtacaccgagagcgacgtgcaccctagctgtaaagtgaccgccatgaagtgctttctgctggaactgcaagtgatctccctggaaagcggcgacgccagcatccacgacaccgtggaaaacctgattatcctggctaacaacagcctgagcagcaacggcaacgtgaccgagtccggctgtaaagagtgcgaggaactggaagagaagaatatcaaagagttcctccagagcttcgtgcacatcgtgcagatgttcatcaacaccagcaagatcgaagtgatgtaccctcctccttacctggacaacgagaagtccaacggcaccatcatccacgtgaagggcaagcacctgtgtccttctccactgttccccggacctagcaagcctttctgggtgctcgttgttgttggcggcgtgctggcctgttacagcctgctggttaccgtggccttcatcatcttttgggtccgaagcaagcggagc

SEQ ID NO: 910 - DNA, 618 bp, synthetic construct
  source 1..618: mol_type = other DNA
atgtaccggatgcagctgctgagctgtatcgccctgtctctggccctggtcacaaatagcaactgggttaacgtgatctccgacctgaagaagatcgaggacctgatccagtccatgcacatcgacgccacactgtacaccgagagcgacgtgcaccctagctgtaaagtgaccgccatgaagtgctttctgctggaactgcaagtgatctccctggaaagcggcgacgccagcatccacgacaccgtggaaaacctgattatccgggctaacaacagcctgagcagcaacggcaacgtgaccgagtccggctgtaaagagtgcgaggaactggaagagaagaatatcaaagagttcctccagagcttcgtgcacatcgtgcagatgttcatcaacaccagcaagatcgaagtgatgtaccctcctccttacctggacaacgagaagtccaacggcaccatcatccacgtgaagggcaagcacctgtgtccttctccactgttccccggacctagcaagcctttctgggtgctcgttgttgttggcggcgtgctggcctgttacagcctgctggttaccgtggccttcatcatcttttgggtccgaagcaagcggagc

SEQ ID NO: 911 - DNA, 459 bp, synthetic construct
  source 1..459: mol_type = other DNA
atgtaccggatgcagctgctgagctgtatcgccctgtctctggccctggtcacaaatagcgcccctaccagcagcagcaccaagaaaacccagctgcaactggaacacctcctgctggacctccagatgatcctgaacggcatcaacaactacaagaaccccaagctgacccggatgctgaccttcaagttctacatgcccaagaaggccaccgagctgaagcacctccagtgcctggaagaggaactgaagcccctggaagaagtgctgaatctggcccagagcaagaacttccacctgaggccaagggacctgatctccaacatcaacgtgatcgtgctggaactgaaaggcagcgagacaaccttcatgtgcgagtacgccgacgagacagctaccatcgtggaatttctgaatcggtggatcaccttctgccagagcatcatcagcaccctgaca

SEQ ID NO: 912 - DNA, 459 bp, synthetic construct
  source 1..459: mol_type = other DNA
atgtaccggatgcagctgctgagctgtatcgccctgtctctggccctggtcacaaatagcgcccctaccagcagcagcaccaagaaaacccagctgcaactggaacacctcctgctggacctccagatgatcctgaacggcatcaacaactacaagaaccccaagctgaccgccatgctgaccaagaagttctacatgcccaagaaggccaccgagctgaagcacctccagtgcctggaagaggaactgaagcccctggaagaagtgctgaatctggcccagagcaagaacttccacctgaggccaagggacctgatctccaacatcaacgtgatcgtgctggaactgaaaggcagcgagacaaccttcatgtgcgagtacgccgacgagacagctaccatcgtggaatttctgaatcggtggatcaccttctgcgccagcatcatcagcaccctgaca

SEQ ID NO: 913 - DNA, 459 bp, synthetic construct
  source 1..459: mol_type = other DNA
atgtaccggatgcagctgctgagctgtatcgccctgtctctggccctggtcacaaatagcgcccctaccagcagcagcaccaagaaaacccagctgcaactggaacacctcctgctggacctccagatgatcctgaacggcatcaacaactacaagaaccccaagctgaccgagatgctgaccgccaagttctacatgcccaagaaggccaccgagctgaagcacctccagtgcctggaagaggaactgaagcccctggaagaagtgctgaatctggcccagagcaagaacttccacctgaggccaagggacctgatctccaacatcaacgtgatcgtgctggaactgaaaggcagcgagacaaccttcatgtgcgagtacgccgacgagacagctaccatcgtggaatttctgaatcggtggatcaccttctgccagagcatcatcagcaccctgaca

SEQ ID NO: 914 - DNA, 459 bp, synthetic construct
  source 1..459: mol_type = other DNA
atgtaccggatgcagctgctgagctgtatcgccctgtctctggccctggtcacaaatagcgcccctaccagcagcagcaccaagaaaacccagctgcaactggaacacctcctgctggacctccagatgatcctgaacggcatcaacaactacaagaaccccaagctgaccgagatgctgaccgccaagttctacatgcccaagaaggccaccgagctgaagcacctccagtgcctggaagaggaactgaagcccctggaagaagtgctgaatctggcccagagcaagaacttccacctgaggccaagggacctgatctccaacatcaacgtggccgtgctggaactgaaaggcagcgagacaaccttcatgtgcgagtacgccgacgagacagctaccatcgtggaatttctgaatcggtggatcaccttctgccagagcatcatcagcaccctgaca

SEQ ID NO: 915 - DNA, 459 bp, synthetic construct
  source 1..459: mol_type = other DNA
atgtaccggatgcagctgctgagctgtatcgccctgtctctggccctggtcacaaatagcgcccctgccagcagcagcaccaagaaaacccagctgcaactggaacacctcctgctggacctccagatgatcctgaacggcatcaacaactacaagaaccccaagctgacccggatgctgaccgccaagttcgccatgcccaagaaggccaccgagctgaagcacctccagtgcctggaagaggaactgaagcccctggaagaagtgctgaatggggcccagagcaagaacttccacctgaggccaagggacctgatctccaacatcaacgtgatcgtgctggaactgaaaggcagcgagacaaccttcatgtgcgagtacgccgacgagacagctaccatcgtggaatttctgaatcggtggatcaccttcggccagagcatcatcagcaccctgaca

SEQ ID NO: 916 - DNA, 486 bp, synthetic construct
  source 1..486: mol_type = other DNA
atgagaatcagcaagccccacctgagatccatcagcatccagtgctacctgtgcctgctgctgaacagccactttctgacagaggccggcatccacgtgttcatcctgggctgtttttctgccggcctgcctaagaccgaggccaactgggttaacgtgatctccgacctgaagaagatcgaggacctgatccagtccatgcacatcgacgccacactgtacaccgagagcgacgtgcaccctagctgtaaagtgaccgccatgaagtgctttctgctggaactgcaagtgatctccctggaaagcggcgacgccagcatccacgacaccgtggaaaacctgattatcctggctaacaacagcctgagcagcaacggcaacgtgaccgagtccggctgtaaagagtgcgaggaactggaagagaagaatatcaaagagttcctccagagcttcgtgcacatcgtgcagatgttcatcaacaccagc

SEQ ID NO: 917 - DNA, 402 bp, synthetic construct
  source 1..402: mol_type = other DNA
atgtaccggatgcagctgctgagctgtatcgccctgtctctggccctggtcacaaatagcaactgggttaacgtgatctccgacctgaagaagatcgaggacctgatccagtccatgcacatcgacgccacactgtacaccgagagcgacgtgcaccctagctgtaaagtgaccgccatgaagtgctttctgctggaactgcaagtgatctccctggaaagcggcgacgccagcatccacgacaccgtgaagaacctgattatcctggctaacaacagcctgagcagcaacggcaacgtgaccgagtccggctgtaaagagtgcgaggaactggaagagaagaatatcaaagagttcctccagagcttcgtgcacatcgtgcagatgttcatcaacaccagc

SEQ ID NO: 918 - DNA, 402 bp, synthetic construct
  source 1..402: mol_type = other DNA
atgtaccggatgcagctgctgagctgtatcgccctgtctctggccctggtcacaaatagcaactgggttaacgtgatctccagcctgaagaagatcgaggacctgatccagtccatgcacatcgacgccacactgtacaccgagagcgacgtgcaccctagctgtaaagtgaccgccatgaagtgctttctgctggaactgcaagtgatctccctggaaagcggcgacgccagcatccacgacaccgtggaaaacctgattatcctggctaacaacagcctgagcagcaacggcaacgtgaccgagtccggctgtaaagagtgcgaggaactggaagagaagaatatcaaagagttcctccagagcttcgtgcacatcgtgcagatgttcatcaacaccagc

SEQ ID NO: 919 - DNA, 402 bp, synthetic construct
  source 1..402: mol_type = other DNA
atgtaccggatgcagctgctgagctgtatcgccctgtctctggccctggtcacaaatagcaactgggttaacgtgatctccgacctgaagaagatcgaggacctgatccagtccatgcacatcgacgccacactgtacaccgagagcgacgtgcaccctagctgtaaagtgaccgccatgaagtgctttctgctggaactgcaagtgatctccctggaaagcggcgacgccagcatccacgacaccgtggaaaacctgattatccgggctaacaacagcctgagcagcaacggcaacgtgaccgagtccggctgtaaagagtgcgaggaactggaagagaagaatatcaaagagttcctccagagcttcgtgcacatcgtgcagatgttcatcaacaccagc

SEQ ID NO: 920 - DNA, 534 bp, synthetic construct
  source 1..534: mol_type = other DNA
atggccttaccagtgaccgccttgctcctgccgctggccttgctgctccacgccgccaggccgtacttcggcaagctggaaagcaagctgtccgtgattcggaacctgaacgaccaggtgctgttcatcgaccagggcaacagacccctgttcgaggacatgaccgacagcgactgtagagacaacgcccctcggaccatcttcatcatcagcatgtacaaggacagccagcctagaggcatggccgtgaccatctctgtgaagtgcgagaagatcagcaccctgagctgcgagaacaagatcatcagcttcaaagagatgaacccgccggacaacatcaaggacaccaagagcgacatcatattcttccagcggagcgtgcccggccacgacaacaagatgcagtttgagagcagcagctacgagggctacttcctggcctgcgagaaagagcgggacctgttcaagctgatcctgaagaaagaggacgaactgggcgaccgcagcatcatgttcaccgtgcagaacgaggac

SEQ ID NO: 921 - DNA, 699 bp, synthetic construct
  source 1..699: mol_type = other DNA
atgtaccggatgcagctgctgagctgtatcgccctgtctctggccctggtcacaaatagcgcccctaccagcagcagcaccaagaaaacccagctgcaactggaacacctcctgctggacctccagatgatcctgaacggcatcaacaactacaagaaccccaagctgacccggatgctgaccttcaagttctacatgcccaagaaggccaccgagctgaagcacctccagtgcctggaagaggaactgaagcccctggaagaagtgctgaatctggcccagagcaagaacttccacctgaggccaagggacctgatctccaacatcaacgtgatcgtgctggaactgaaaggcagcgagacaaccttcatgtgcgagtacgccgacgagacagctaccatcgtggaatttctgaatcggtggatcaccttctgccagagcatcatcagcaccctgacacatatgttgcagatggctgggcagtgctcccaaaatgaatattttgacagtttgttgcatgcttgcataccttgtcaacttcgatgttcttctaatactcctcctctaacatgtcagcgttattgtaatgcaagtgtgaccaattcagtgaaaggaacgaatgcgattctctggacctgtttgggactgagcttaataatttctttggcagttttcgtgctaatgtttttgctaaggaag

SEQ ID NO: 922 - DNA, 699 bp, synthetic construct
  source 1..699: mol_type = other DNA
atgtaccggatgcagctgctgagctgtatcgccctgtctctggccctggtcacaaatagcgcccctaccagcagcagcaccaagaaaacccagctgcaactggaacacctcctgctggacctccagatgatcctgaacggcatcaacaactacaagaaccccaagctgaccgccatgctgaccaagaagttctacatgcccaagaaggccaccgagctgaagcacctccagtgcctggaagaggaactgaagcccctggaagaagtgctgaatctggcccagagcaagaacttccacctgaggccaagggacctgatctccaacatcaacgtgatcgtgctggaactgaaaggcagcgagacaaccttcatgtgcgagtacgccgacgagacagctaccatcgtggaatttctgaatcggtggatcaccttctgcgccagcatcatcagcaccctgacacatatgttgcagatggctgggcagtgctcccaaaatgaatattttgacagtttgttgcatgcttgcataccttgtcaacttcgatgttcttctaatactcctcctctaacatgtcagcgttattgtaatgcaagtgtgaccaattcagtgaaaggaacgaatgcgattctctggacctgtttgggactgagcttaataatttctttggcagttttcgtgctaatgtttttgctaaggaag

SEQ ID NO: 923 - DNA, 699 bp, synthetic construct
  source 1..699: mol_type = other DNA
atgtaccggatgcagctgctgagctgtatcgccctgtctctggccctggtcacaaatagcgcccctaccagcagcagcaccaagaaaacccagctgcaactggaacacctcctgctggacctccagatgatcctgaacggcatcaacaactacaagaaccccaagctgaccgagatgctgaccgccaagttctacatgcccaagaaggccaccgagctgaagcacctccagtgcctggaagaggaactgaagcccctggaagaagtgctgaatctggcccagagcaagaacttccacctgaggccaagggacctgatctccaacatcaacgtgatcgtgctggaactgaaaggcagcgagacaaccttcatgtgcgagtacgccgacgagacagctaccatcgtggaatttctgaatcggtggatcaccttctgccagagcatcatcagcaccctgacacatatgttgcagatggctgggcagtgctcccaaaatgaatattttgacagtttgttgcatgcttgcataccttgtcaacttcgatgttcttctaatactcctcctctaacatgtcagcgttattgtaatgcaagtgtgaccaattcagtgaaaggaacgaatgcgattctctggacctgtttgggactgagcttaataatttctttggcagttttcgtgctaatgtttttgctaaggaag

SEQ ID NO: 924 - DNA, 699 bp, synthetic construct
  source 1..699: mol_type = other DNA
atgtaccggatgcagctgctgagctgtatcgccctgtctctggccctggtcacaaatagcgcccctaccagcagcagcaccaagaaaacccagctgcaactggaacacctcctgctggacctccagatgatcctgaacggcatcaacaactacaagaaccccaagctgaccgagatgctgaccgccaagttctacatgcccaagaaggccaccgagctgaagcacctccagtgcctggaagaggaactgaagcccctggaagaagtgctgaatctggcccagagcaagaacttccacctgaggccaagggacctgatctccaacatcaacgtggccgtgctggaactgaaaggcagcgagacaaccttcatgtgcgagtacgccgacgagacagctaccatcgtggaatttctgaatcggtggatcaccttctgccagagcatcatcagcaccctgacacatatgttgcagatggctgggcagtgctcccaaaatgaatattttgacagtttgttgcatgcttgcataccttgtcaacttcgatgttcttctaatactcctcctctaacatgtcagcgttattgtaatgcaagtgtgaccaattcagtgaaaggaacgaatgcgattctctggacctgtttgggactgagcttaataatttctttggcagttttcgtgctaatgtttttgctaaggaag

SEQ ID NO: 925 - DNA, 699 bp, synthetic construct
  source 1..699: mol_type = other DNA
atgtaccggatgcagctgctgagctgtatcgccctgtctctggccctggtcacaaatagcgcccctgccagcagcagcaccaagaaaacccagctgcaactggaacacctcctgctggacctccagatgatcctgaacggcatcaacaactacaagaaccccaagctgacccggatgctgaccgccaagttcgccatgcccaagaaggccaccgagctgaagcacctccagtgcctggaagaggaactgaagcccctggaagaagtgctgaatggggcccagagcaagaacttccacctgaggccaagggacctgatctccaacatcaacgtgatcgtgctggaactgaaaggcagcgagacaaccttcatgtgcgagtacgccgacgagacagctaccatcgtggaatttctgaatcggtggatcaccttcggccagagcatcatcagcaccctgacacatatgttgcagatggctgggcagtgctcccaaaatgaatattttgacagtttgttgcatgcttgcataccttgtcaacttcgatgttcttctaatactcctcctctaacatgtcagcgttattgtaatgcaagtgtgaccaattcagtgaaaggaacgaatgcgattctctggacctgtttgggactgagcttaataatttctttggcagttttcgtgctaatgtttttgctaaggaag

SEQ ID NO: 926 - DNA, 726 bp, synthetic construct
  source 1..726: mol_type = other DNA
atgagaatcagcaagccccacctgagatccatcagcatccagtgctacctgtgcctgctgctgaacagccactttctgacagaggccggcatccacgtgttcatcctgggctgtttttctgccggcctgcctaagaccgaggccaactgggttaacgtgatctccgacctgaagaagatcgaggacctgatccagtccatgcacatcgacgccacactgtacaccgagagcgacgtgcaccctagctgtaaagtgaccgccatgaagtgctttctgctggaactgcaagtgatctccctggaaagcggcgacgccagcatccacgacaccgtggaaaacctgattatcctggctaacaacagcctgagcagcaacggcaacgtgaccgagtccggctgtaaagagtgcgaggaactggaagagaagaatatcaaagagttcctccagagcttcgtgcacatcgtgcagatgttcatcaacaccagccatatgttgcagatggctgggcagtgctcccaaaatgaatattttgacagtttgttgcatgcttgcataccttgtcaacttcgatgttcttctaatactcctcctctaacatgtcagcgttattgtaatgcaagtgtgaccaattcagtgaaaggaacgaatgcgattctctggacctgtttgggactgagcttaataatttctttggcagttttcgtgctaatgtttttgctaaggaag

SEQ ID NO: 927 - DNA, 726 bp, synthetic construct
  source 1..726: mol_type = other DNA
atgagaatcagcaagccccacctgagatccatcagcatccagtgctacctgtgcctgctgctgaacagccactttctgacagaggccggcatccacgtgttcatcctgggctgtttttctgccggcctgcctaagaccgaggccaactgggttaacgtgatctccgacctgaagaagatcgaggacctgatccagtccatgcacatcgacgccacactgtacaccgagagcgacgtgcaccctagctgtaaagtgaccgccatgaagtgctttctgctggaactgcaagtgatctccctggaaagcggcgacgccagcatccacgacaccgtgaagaacctgattatcctggctaacaacagcctgagcagcaacggcaacgtgaccgagtccggctgtaaagagtgcgaggaactggaagagaagaatatcaaagagttcctccagagcttcgtgcacatcgtgcagatgttcatcaacaccagccatatgttgcagatggctgggcagtgctcccaaaatgaatattttgacagtttgttgcatgcttgcataccttgtcaacttcgatgttcttctaatactcctcctctaacatgtcagcgttattgtaatgcaagtgtgaccaattcagtgaaaggaacgaatgcgattctctggacctgtttgggactgagcttaataatttctttggcagttttcgtgctaatgtttttgctaaggaag

SEQ ID NO: 928 - DNA, 1641 bp, synthetic construct
  source 1..1641: mol_type = other DNA
atgtaccggatgcagctgctgagctgtatcgccctgtctctggccctggtcacaaatagcgcccctaccagcagcagcaccaagaaaacccagctgcaactggaacacctcctgctggacctccagatgatcctgaacggcatcaacaactacaagaaccccaagctgacccggatgctgaccttcaagttctacatgcccaagaaggccaccgagctgaagcacctccagtgcctggaagaggaactgaagcccctggaagaagtgctgaatctggcccagagcaagaacttccacctgaggccaagggacctgatctccaacatcaacgtgatcgtgctggaactgaaaggcagcgagacaaccttcatgtgcgagtacgccgacgagacagctaccatcgtggaatttctgaatcggtggatcaccttctgccagagcatcatcagcaccctgacacatatgttcccacaggatcgacccttcgaggacacctgtcatggaaaccccagccactactatgacaaggctgtcaggaggtgctgttaccgctgccccatggggctgttcccgacacagcagtgcccacagaggcctactgactgcaggaagcagtgtgagcctgactactacctggatgaggccgaccgctgtacagcctgcgtgacttgttctcgagacgacctcgtggagaagacgccgtgtgcatggaactcctcccgtgtctgcgaatgtcgacccggcatgttctgttccacgtctgccgtcaactcctgtgcccgctgcttcttccattctgtctgtccggcagggatgattgtcaagttcccaggcacggcgcagaagaacacggtctgtgagccggcttccccaggggtcagccctgcctgtgccagcccagagaactgcaaggaaccctccagtggcaccatcccccaggccaagcccaccccggtgtccccagcaacctccagtgccagcaccatgcctgtaagagggggcacccgcctcgcccaggaagctgcttctaaactgacgagggctcccgactctccctcctctgtgggaaggcctagttcagatccaggtctgtccccaacacagccatgcccagaggggtctggtgattgcagaaagcagtgtgagcccgactactacctggacgaggccggccgctgcacggcctgcgtgagctgttctcgagatgaccttgtggagaagacgccatgtgcatggaactcctcccgcacctgcgaatgtcgacctggcatgatctgtgccacatcagccaccaactcctgtgcccgctgtgtcccctacccaatctgtgcagcagagacggtcaccaagccccaggatatggctgagaaggacaccacctttgaggcgccacccctggggacccagccggactgcaaccccaccccagagaatggcgaggcgcctgccagcaccagccccactcagagcttgctggtggactcccaggccagtaagacgctgcccatcccaaccagcgctcccgtcgctctctcctccacggggaagcccgttctggatgcagggccagtgctcttctgggtgatcctggtgttggttgtggtggtcggctccagcgccttcctcctgtgccaccggagg

SEQ ID NO: 929 - DNA, 29 bp, synthetic construct
  source 1..29: mol_type = other DNA
ggggggggggggggggggggggggggggg

SEQ ID NO: 930 - DNA, 669 bp, synthetic construct
  source 1..669: mol_type = other DNA
cagagcttcggcctgctggaccccaagctgtgctacctgctggatggcatcctgttcatctacggcgtgatcctgaccgccctgttcctgagagtgagattcagcagaagcgccgacgcccctgcctaccagcagggacagaaccaactgtacaacgagctgaacctgggcagacgggaagagtacgacgtgctggacagacggagaggcagggaccctgagatgggcggaaagccccagcggagaagaaacccccaggaaggactgtataacgaactccagagagacagaatggccgaagcctacagcgagatcggcatgagaggcgagcggagaagaggcaagggccacgatggcctgtaccagggcctgagcaccgccaccagagacacctatgacgccctgcacatgcaggccctgcctccaagagaattcggtggatctggattcaatgtgctgatggtgcacagaagaagccacaccggcgagaggcccttccagtgtaatcagtgcggagccagcttcacccagagaggcaatctgctgcggcacatcagactgcacacaggcgagcggcctttcagatgccacctgtgcaattacgcctgccagagaagagatgccctgaccgcctctgccgaggccagacatattagagccgaaatgggc

SEQ ID NO: 931 - DNA, 666 bp, synthetic construct
  source 1..666: mol_type = other DNA
cagagttttgggttgttggaccctaaattgtgctatctgttggacggaatcctgttcatttacggagtgatcctgaccgcattgttcctgcgggttagattttccagatccgcagacgcacccgcttaccaacaagggcagaaccaactctacaatgaacttaatttggggcggagggaagagtacgacgttctggacagaaggaggggacgagatcccgagatgggcggaagacctcagcgaaggagaaatccgcaagaggggctttataacgaactccagagagatagaatggcagaagcctatagtgagattgggatgagaggagaaaggaggaggggtagaggtcacgatgggttgtaccaaggattgagcacagccactagagatacctatgatgcgctccacatgcaggccctgccgccaagagggcccggaggcagctttaacgttctgatggtccaccgccgcagccatacaggcgaaagacctttccaatgcaaccagtgcggggcctcttttacccagaggggaaacctgctgagacacattcggctgcacaccggggaaagacccttcaggtgtcacctgtgtaactatgcctgtcagcggcgggatgctctgacagcttctgctgaagcccgccacatcagagctgagatggga

SEQ ID NO: 932 - DNA, 429 bp, synthetic construct
  source 1..429: mol_type = other DNA
cagagcttcggcctgctggaccccaagctgtgctacctgctggatggcatcctgttcatctacggcgtgatcctgaccgccctgttcctgagagtgagattcagcagaagcgccgacgcccctgcctaccagcagggacagaaccaactgtacaacgagctgaacctgggcagacgggaagagtacgacgtgctggacagacggagaggcagggaccctgagatgggcggaaagccccagcggagaagaaacccccaggaaggactgtataacgaactccagagagacagaatggccgaagcctacagcgagatcggcatgagaggcgagcggagaagaggcaagggccacgatggcctgtaccagggcctgagcaccgccaccagagacacctatgacgccctgcacatgcaggccctgcctccaaga

SEQ ID NO: 933 - DNA, 429 bp, synthetic construct
  source 1..429: mol_type = other DNA
cagagttttgggttgttggaccctaaattgtgctatctgttggacggaatcctgttcatttacggagtgatcctgaccgcattgttcctgcgggttagattttccagatccgcagacgcacccgcttaccaacaagggcagaaccaactctacaatgaacttaatttggggcggagggaagagtacgacgttctggacagaaggaggggacgagatcccgagatgggcggaagacctcagcgaaggagaaatccgcaagaggggctttataacgaactccagagagatagaatggcagaagcctatagtgagattgggatgagaggagaaaggaggaggggtagaggtcacgatgggttgtaccaaggattgagcacagccactagagatacctatgatgcgctccacatgcaggccctgccgccaaga

SEQ ID NO: 934 - DNA, 234 bp, synthetic construct
  source 1..234: mol_type = other DNA
ggtggatctggattcaatgtgctgatggtgcacagaagaagccacaccggcgagaggcccttccagtgtaatcagtgcggagccagcttcacccagagaggcaatctgctgcggcacatcagactgcacacaggcgagcggcctttcagatgccacctgtgcaattacgcctgccagagaagagatgccctgaccgcctctgccgaggccagacatattagagccgaaatgggc

SEQ ID NO: 935 - DNA, 231 bp, synthetic construct
  source 1..231: mol_type = other DNA
ggaggcagctttaacgttctgatggtccaccgccgcagccatacaggcgaaagacctttccaatgcaaccagtgcggggcctcttttacccagaggggaaacctgctgagacacattcggctgcacaccggggaaagacccttcaggtgtcacctgtgtaactatgcctgtcagcggcgggatgctctgacagcttctgctgaagcccgccacatcagagctgagatggga

SEQ ID NO: 936 - DNA, 231 bp, synthetic construct; identical to SEQ ID NO: 935
  source 1..231: mol_type = other DNA

SEQ ID NO: 937 - DNA, 327 bp, synthetic construct
  source 1..327: mol_type = other DNA
ggaggaggcgtccaagtcgaaaccattagtcccggcgatggcagaacatttcctaaaaggggacaaacatgtgtcgtccattatacaggcatgttggaggacggcaaaaaggtggacagtagtagagatcgcaataaacctttcaaattcatgttgggaaaacaagaagtcattaggggatgggaggagggcgtggctcaaatgtccgtcggccaacgcgctaagctcaccatcagccccgactacgcatacggcgctaccggacatcccggaattattccccctcacgctaccttggtgtttgacgtcgaactgttgaagctcggg

SEQ ID NO: 938 - DNA, 444 bp, synthetic construct
  source 1..444: mol_type = other DNA
ctgggagagcctcagctgtgctatatcctggacgccatcctgtttctgtacggcatcgtgctgaccctgctgtactgcggtggatctggattcaatgtgctgatggtgcacagaagaagccacaccggcgagaggcccttccagtgtaatcagtgcggagccagcttcacccagagaggcaatctgctgcggcacatcagactgcacacaggcgagcggcctttcagatgccacctgtgcaattacgcctgccagagaagagatgccctgaccgcctctgccgaggccagacatattagagccgaaatgggctctggccggctgaagatccaagtgcggaaggccgccatcaccagctacgagaaatccgacggcgtgtacaccggcctgagcaccagaaatcaagagacatacgagacactgaagcacgaaaagcctccacaa

SEQ ID NO: 939 - DNA, 435 bp, synthetic construct
  source 1..435: mol_type = other DNA
ctcggagaaccacagctctgttacattctggatgctatcctgttcctctatgggatcgtcctgacactcctgtattgcggaggcagctttaacgttctgatggtccaccgccgcagccatacaggcgaaagacctttccaatgcaaccagtgcggggcctcttttacccagaggggaaacctgctgagacacattcggctgcacaccggggaaagacccttcaggtgtcacctgtgtaactatgcctgtcagcggcgggatgctctgacagcttctgctgaagcccgccacatcagagctgagatgggaagactcaaaattcaagttcgcaaagccgccattacctcttacgagaagagtgatggggtgtacacaggactgtctacccggaatcaagaaacctacgaaaccctcaaacatgagaagccacctcag

SEQ ID NO: 940 - DNA, 666 bp, synthetic construct
  source 1..666: mol_type = other DNA
cagagcttcggcctgctggaccccaagctgtgctacctgctggatggcatcctgttcatctacggcgtgatcctgaccgccctgttcctgagagtgagattcagcagaagcgccgacgcccctgcctaccagcagggacagaaccaactgtacaacgagctgaacctgggcagacgggaagagtacgacgtgctggacagacggagaggcagggaccctgagatgggcggaaagccccagcggagaagaaacccccaggaaggactgtataacgaactccagagagacagaatggccgaagcctacagcgagatcggcatgagaggcgagcggagaagaggcaagggccacgatggcctgtaccagggcctgagcaccgccaccagagacacctatgacgccctgcacatgcaggccctgcctccaagagaattcggaggcagctttaacgttctgatggtccaccgccgcagccatacaggcgaaagacctttccaatgcaaccagtgcggggcctcttttacccagaggggaaacctgctgagacacattcggctgcacaccggggaaagacccttcaggtgtcacctgtgtaactatgcctgtcagcggcgggatgctctgacagcttctgctgaagcccgccacatcagagctgagatggga

SEQ ID NO: 941 - DNA, 762 bp, synthetic construct
  source 1..762: mol_type = other DNA
cagagttttgggttgttggaccctaaattgtgctatctgttggacggaatcctgttcatttacggagtgatcctgaccgcattgttcctgcgggttagattttccagatccgcagacgcacccgcttaccaacaagggcagaaccaactctacaatgaacttaatttggggcggagggaagagtacgacgttctggacagaaggaggggacgagatcccgagatgggcggaagacctcagcgaaggagaaatccgcaagaggggctttataacgaactccagagagatagaatggcagaagcctatagtgagattgggatgagaggagaaaggaggaggggtagaggtcacgatgggttgtaccaaggattgagcacagccactagagatacctatgatgcgctccacatgcaggccctgccgccaagagggcccggaggaggcgtccaagtcgaaaccattagtcccggcgatggcagaacatttcctaaaaggggacaaacatgtgtcgtccattatacaggcatgttggaggacggcaaaaaggtggacagtagtagagatcgcaataaacctttcaaattcatgttgggaaaacaagaagtcattaggggatgggaggagggcgtggctcaaatgtccgtcggccaacgcgctaagctcaccatcagccccgactacgcatacggcgctaccggacatcccggaattattccccctcacgctaccttggtgtttgacgtcgaactgttgaagctcggg

SEQ ID NO: 942 - DNA, 29 bp, synthetic construct
  source 1..29: mol_type = other DNA
ggggggggggggggggggggggggggggg

SEQ ID NO: 943 - DNA, 336 bp, synthetic construct
  source 1..336: mol_type = other DNA
agagtgaagttcagcagaagcgccgacgcccctgcctaccagcagggacagaaccaactgtacaacgagctgaacctgggcagacgggaagagtacgacgtgctggacaagcggagaggcagggaccctgagatgggcggaaagccccggagaaagaacccccaggaaggactgtataacgaactccagaaagacaagatggccgaagcctacagcgagatcggcatgaagggcgagcggagaagaggcaagggccacgatggcctgtaccagggcctgagcaccgccaccaaggacacctatgacgccctgcacatgcaggccctgcctccaaga

SEQ ID NO: 944 - DNA, 336 bp, synthetic construct
  source 1..336: mol_type = other DNA
cgggttaagttttccagatccgcagacgcacccgcttaccaacaagggcagaaccaactctacaatgaacttaatttggggcggagggaagagtacgacgttctggacaaaaggaggggacgagatcccgagatgggcggaaagcctcgaaggaagaatccgcaagaggggctttataacgaactccagaaagataaaatggcagaagcctatagtgagattgggatgaagggagaaaggaggaggggtaaaggtcacgatgggttgtaccaaggattgagcacagccactaaagatacctatgatgcgctccacatgcaggccctgccgccaaga

SEQ ID NO: 945 - DNA, 714 bp, synthetic construct
  source 1..714: mol_type = other DNA
atccagaaccctgatcctgccgtgtaccagctgcgggatagcaagagcagcgacaagagcgtgtgtctgttcaccgacttcgacagccagaccaacgtgtcccagagcaaggactccgacgtgtacatcaccgataagaccgtgctggacatgcggagcatggacttcaagagcaactccgccgtggcctggtccaacaagtccgatttcgcctgcgccaacgccttcaacaacagcattatccccgaggacacattcttcccaagccccgagagcagctgcggtacccagagttttgggttgttggaccctaaattgtgctatctgttggacggaatcctgttcatttacggagtgatcctgaccgcattgttcctgcgggttaagttttccagatccgcagacgcacccgcttaccaacaagggcagaaccaactctacaatgaacttaatttggggcggagggaagagtacgacgttctggacaaaaggaggggacgagatcccgagatgggcggaaagcctcgaaggaagaatccgcaagaggggctttataacgaactccagaaagataaaatggcagaagcctatagtgagattgggatgaagggagaaaggaggaggggtaaaggtcacgatgggttgtaccaaggattgagcacagccactaaagatacctatgatgcgctccacatgcaggccctgccgccaaga

SEQ ID NO: 946 - DNA, 825 bp, synthetic construct
  source 1..825: mol_type = other DNA
gaggacctgaagaacgtgttcccacctgaggtggccgtgttcgagcctagcgaggccgagatcagccacacccagaaagccaccctcgtgtgcctggctaccggcttctaccccgaccatgtggaactgtcttggtgggtcaacggcaaagaggtgcacagcggcgtgtctaccgacccccagccactgaaagaacagcccgccctgaacgacagccggtactgcctgagcagcagactgagagtgtccgccaccttctggcagaacccccggaaccacttcagatgccaggtgcagttctacggcctgagcgagaacgacgagtggacccaggacagagccaagcccgtgacccagatcgtgtctgccgaagcctggggcagagccgattgcggatcccagagcttcggcctgctggaccccaagctgtgctacctgctggatggcatcctgttcatctacggcgtgatcctgaccgccctgttcctgagagtgaagttcagcagaagcgccgacgcccctgcctaccagcagggacagaaccaactgtacaacgagctgaacctgggcagacgggaagagtacgacgtgctggacaagcggagaggcagggaccctgagatgggcggaaagccccggagaaagaacccccaggaaggactgtataacgaactccagaaagacaagatggccgaagcctacagcgagatcggcatgaagggcgagcggagaagaggcaagggccacgatggcctgtaccagggcctgagcaccgccaccaaggacacctatgacgccctgcacatgcaggccctgcctccaaga

SEQ ID NO: 947 - DNA, 426 bp, synthetic construct
  source 1..426: mol_type = other DNA
cagagcttcggcctgctggaccccaagctgtgctacctgctggatggcatcctgttcatctacggcgtgatcctgaccgccctgttcctgagagtgaagttcagcagaagcgccgacgcccctgcctaccagcagggacagaaccaactgtacaacgagctgaacctgggcagacgggaagagtacgacgtgctggacaagcggagaggcagggaccctgagatgggcggaaagccccggagaaagaacccccaggaaggactgtataacgaactccagaaagacaagatggccgaagcctacagcgagatcggcatgaagggcgagcggagaagaggcaagggccacgatggcctgtaccagggcctgagcaccgccaccaaggacacctatgacgccctgcacatgcaggccctgcctccaaga

SEQ ID NO: 948 - DNA, 426 bp, synthetic construct; identical to SEQ ID NO: 947
  source 1..426: mol_type = other DNA

SEQ ID NO: 949 - DNA, 336 bp, synthetic construct; identical to SEQ ID NO: 944
  source 1..336: mol_type = other DNA

SEQ ID NO: 950 - DNA, 426 bp, synthetic construct
  source 1..426: mol_type = other DNA
cagagttttgggttgttggaccctaaattgtgctatctgttggacggaatcctgttcatttacggagtgatcctgaccgcattgttcctgcgggttaagttttccagatccgcagacgcacccgcttaccaacaagggcagaaccaactctacaatgaacttaatttggggcggagggaagagtacgacgttctggacaaaaggaggggacgagatcccgagatgggcggaaagcctcgaaggaagaatccgcaagaggggctttataacgaactccagaaagataaaatggcagaagcctatagtgagattgggatgaagggagaaaggaggaggggtaaaggtcacgatgggttgtaccaaggattgagcacagccactaaagatacctatgatgcgctccacatgcaggccctgccgccaaga

SEQ ID NO: 951 - DNA, 549 bp, synthetic construct
  source 1..549: mol_type = other DNA
cagagcttcggcctgctggaccccaagctgtgctacctgctggatggcatcctgttcatctacggcgtgatcctgaccgccctgttcctgaggagtaagaggagcaggctcctgcacagtgactacatgaacatgactccacgccgccccggacccacccgcaagcattaccagccctatgccccaccacgcgacttcgcagcctatcgctccagagtgaagttcagcagaagcgccgacgcccctgcctaccagcagggacagaaccaactgtacaacgagctgaacctgggcagacgggaagagtacgacgtgctggacaagcggagaggcagggaccctgagatgggcggaaagccccggagaaagaacccccaggaaggactgtataacgaactccagaaagacaagatggccgaagcctacagcgagatcggcatgaagggcgagcggagaagaggcaagggccacgatggcctgtaccagggcctgagcaccgccaccaaggacacctatgacgccctgcacatgcaggccctgcctccaaga

SEQ ID NO: 952 - DNA, 552 bp, synthetic construct
  source 1..552: mol_type = other DNA
cagagcttcggcctgctggaccccaagctgtgctacctgctggatggcatcctgttcatctacggcgtgatcctgaccgccctgttcctgaaacggggcagaaagaaactcctgtatatattcaaacaaccatttatgagaccagtacaaactactcaagaggaagatggctgtagctgccgatttccagaagaagaagaaggaggatgtgaactgagagtgaagttcagcagaagcgccgacgcccctgcctaccagcagggacagaaccaactgtacaacgagctgaacctgggcagacgggaagagtacgacgtgctggacaagcggagaggcagggaccctgagatgggcggaaagccccggagaaagaacccccaggaaggactgtataacgaactccagaaagacaagatggccgaagcctacagcgagatcggcatgaagggcgagcggagaagaggcaagggccacgatggcctgtaccagggcctgagcaccgccaccaaggacacctatgacgccctgcacatgcaggccctgcctccaaga

SEQ ID NO: 953 - DNA, 549 bp, synthetic construct
  source 1..549: mol_type = other DNA
cagagttttgggttgttggaccctaaattgtgctatctgttggacggaatcctgttcatttacggagtgatcctgaccgcattgttcctgaggagcaagcggtcacggctgctccacagcgattacatgaatatgacaccacgaagaccgggtcctactcgcaaacactaccaaccctacgcacctccccgcgactttgcagcgtaccgatctcgggttaagttttccagatccgcagacgcacccgcttaccaacaagggcagaaccaactctacaatgaacttaatttggggcggagggaagagtacgacgttctggacaaaaggaggggacgagatcccgagatgggcggaaagcctcgaaggaagaatccgcaagaggggctttataacgaactccagaaagataaaatggcagaagcctatagtgagattgggatgaagggagaaaggaggaggggtaaaggtcacgatgggttgtaccaaggattgagcacagccactaaagatacctatgatgcgctccacatgcaggccctgccgccaaga

SEQ ID NO: 954 - DNA, 549 bp, synthetic construct; identical to SEQ ID NO: 953
  source 1..549: mol_type = other DNA

SEQ ID NO: 955 - DNA, 990 bp, synthetic construct
  source 1..990: mol_type = other DNA
cagagcttcggcctgctggaccccaagctgtgctacctgctggatggcatcctgttcatctacggcgtgatcctgaccgccctgttcctgcacagacgggcctgtcggaagcggatcagacagaaactgcacctgtgctaccccgtgcagaccagccagcctaaactggaactggtggacagcagacccagaagaagcagcacccagctgagaagcggagcctctgtgacagaacctgtggccgaagaacggggcctgatgtctcagcctctgatggaaacctgccactctgtgggagccgcctaccttgagtctctgcccctgcaagatgcctctcctgctggcggaccaagctctccaagggatctgcctgagcctagagtgtccaccgagcacaccaacaacaagatcgagaaaatctacattatgaaggccgacaccgtgatcgtgggcaccgtgaaagctgagttgcccgaaggcagaggactggccggacctgctgaacctgagctggaagaagaactggaagccgatcacacccctcactaccccgagcaagaaaccgaacctcctctgggcagctgctccgatgtgatgctgtccgttgaggaagagggcaaagaggaccctctgcctacagccgcttctggaaaaagagtgaagttcagcagaagcgccgacgcccctgcctaccagcagggacagaaccaactgtacaacgagctgaacctgggcagacgggaagagtacgacgtgctggacaagcggagaggcagggaccctgagatgggcggaaagccccggagaaagaacccccaggaaggactgtataacgaactccagaaagacaagatggccgaagcctacagcgagatcggcatgaagggcgagcggagaagaggcaagggccacgatggcctgtaccagggcctgagcaccgccaccaaggacacctatgacgccctgcacatgcaggccctgcctccaaga

SEQ ID NO: 956 - DNA, 990 bp, synthetic construct
  source 1..990: mol_type = other DNA
cagagttttgggttgttggaccctaaattgtgctatctgttggacggaatcctgttcatttacggagtgatcctgaccgcattgttcctgcatagaagggcctgtagaaagagaatccggcaaaagctgcatctctgttatcctgtgcagacctctcagcccaagttggagctggtggatagccggcctagacggtctagtacacagctgagatccggggccagtgtgactgaaccagttgctgaggaacgcggactgatgagccagccactcatggaaacatgtcacagcgtgggcgctgcctatctcgaaagcctgcctctccaagacgcttctccggcaggcggtccatcttctcctcgggatcttcccgagccacgggtgtccacagaacatacaaacaacaaaattgagaaaatctatattatgaaggctgatacggtcatcgtcgggacagtgaaagccgaactgcctgaaggacgtggccttgctggaccagccgaaccagaactcgaagaggaacttgaggccgaccatacaccacactatcctgagcaagagacagagccaccactgggctcttgcagcgacgtgatgctgagtgtggaagaggaaggcaaagaagatcccctgccaaccgctgcctctggcaaacgggttaagttttccagatccgcagacgcacccgcttaccaacaagggcagaaccaactctacaatgaacttaatttggggcggagggaagagtacgacgttctggacaaaaggaggggacgagatcccgagatgggcggaaagcctcgaaggaagaatccgcaagaggggctttataacgaactccagaaagataaaatggcagaagcctatagtgagattgggatgaagggagaaaggaggaggggtaaaggtcacgatgggttgtaccaaggattgagcacagccactaaagatacctatgatgcgctccacatgcaggccctgccgccaaga

SEQ ID NO: 957 - DNA, 483 bp, synthetic construct
  source 1..483: mol_type = other DNA
cagagcttcggcctgctggaccccaagctgtgctacctgctggatggcatcctgttcatctacggcgtgatcctgaccgccctgttcctgcacctgtgctgtagaagaaggcgggccagactgcggtttatgaagcagttctacaagagagtgaagttcagcagaagcgccgacgcccctgcctaccagcagggacagaaccaactgtacaacgagctgaacctgggcagacgggaagagtacgacgtgctggacaagcggagaggcagggaccctgagatgggcggaaagccccggagaaagaacccccaggaaggactgtataacgaactccagaaagacaagatggccgaagcctacagcgagatcggcatgaagggcgagcggagaagaggcaagggccacgatggcctgtaccagggcctgagcaccgccaccaaggacacctatgacgccctgcacatgcaggccctgcctccaaga

SEQ ID NO: 958 - DNA, 522 bp, synthetic construct
  source 1..522: mol_type = other DNA
cagagttttgggttgttggaccctaaattgtgctatctgttggacggaatcctgttcatttacggagtgatcctgaccgcattgttcctgctgtactgcaaccaccggaacaggcggagagtgtgcaagtgccctagacctgtggtcaagagcggcgacaagcctagcctgagcgccagatatgttcgggttaagttttccagatccgcagacgcacccgcttaccaacaagggcagaaccaactctacaatgaacttaatttggggcggagggaagagtacgacgttctggacaaaaggaggggacgagatcccgagatgggcggaaagcctcgaaggaagaatccgcaagaggggctttataacgaactccagaaagataaaatggcagaagcctatagtgagattgggatgaagggagaaaggaggaggggtaaaggtcacgatgggttgtaccaaggattgagcacagccactaaagatacctatgatgcgctccacatgcaggccctgccgccaaga

SEQ ID NO: 959 - DNA, 546 bp, synthetic construct
  source 1..546: mol_type = other DNA
cagagcttcggcctgctggaccccaagctgtgctacctgctggatggcatcctgttcatctacggcgtgatcctgaccgccctgttcctgtgcgtgcggtgcagacaccggcggagacaggccgagagaatgagccagatcaagagactgctgtccgagaagaaaacctgccagtgcccccacagattccagaaaacatgcagccccatcagagtgaagttcagcagaagcgccgacgcccctgcctaccagcagggacagaaccaactgtacaacgagctgaacctgggcagacgggaagagtacgacgtgctggacaagcggagaggcagggaccctgagatgggcggaaagccccggagaaagaacccccaggaaggactgtataacgaactccagaaagacaagatggccgaagcctacagcgagatcggcatgaagggcgagcggagaagaggcaagggccacgatggcctgtaccagggcctgagcaccgccaccaaggacacctatgacgccctgcacatgcaggccctgcctccaaga

SEQ ID NO: 960 - DNA, 546 bp, synthetic construct
  source 1..546: mol_type = other DNA
cagagttttgggttgttggaccctaaattgtgctatctgttggacggaatcctgttcatttacggagtgatcctgaccgcattgttcctgtgtgtgaggtgccgccatcgacggaggcaggcagaaagaatgtcccagataaagcggttgcttagtgaaaagaaaacctgccagtgtcctcaccgattccagaagacgtgctcccccattcgggttaagttttccagatccgcagacgcacccgcttaccaacaagggcagaaccaactctacaatgaacttaatttggggcggagggaagagtacgacgttctggacaaaaggaggggacgagatcccgagatgggcggaaagcctcgaaggaagaatccgcaagaggggctttataacgaactccagaaagataaaatggcagaagcctatagtgagattgggatgaagggagaaaggaggaggggtaaaggtcacgatgggttgtaccaaggattgagcacagccactaaagatacctatgatgcgctccacatgcaggccctgccgccaaga

SEQ ID NO: 961 - DNA, 666 bp, synthetic construct
  source 1..666: mol_type = other DNA
cagagcttcggcctgctggaccccaagctgtgctacctgctggatggcatcctgttcatctacggcgtgatcctgaccgccctgttcctgagagtgagattcagcagaagcgccgacgcccctgcctaccagcagggacagaaccaactgtacaacgagctgaacctgggcagacgggaagagtacgacgtgctggacagacggagaggcagggaccctgagatgggcggaaagccccggagaagaaacccccaggaaggactgtataacgaactccagagagacagaatggccgaagcctacagcgagatcggcatgagaggcgagcggagaagaggcaagggccacgatggcctgtaccagggcctgagcaccgccaccagagacacctatgacgccctgcacatgcaggccctgcctccaagagaattcggtggatctggattcaatgtgctgatggtgcacagaagaagccacaccggcgagaggcccttccagtgtaatcagtgcggagccagcttcacccagagaggcaatctgctgcggcacatcagactgcacacaggcgagcggcctttcagatgccacctgtgcaattacgcctgccagagaagagatgccctgaccgcctctgccgaggccagacatattagagccgaaatgggc

SEQ ID NO: 962 - DNA, 663 bp, synthetic construct
  source 1..663: mol_type = other DNA
cagagttttgggttgttggaccctaaattgtgctatctgttggacggaatcctgttcatttacggagtgatcctgaccgcattgttcctgcgggttagattttccagatccgcagacgcacccgcttaccaacaagggcagaaccaactctacaatgaacttaatttggggcggagggaagagtacgacgttctggacagaaggaggggacgagatcccgagatgggcggaagacctcgaaggagaaatccgcaagaggggctttataacgaactccagagagatagaatggcagaagcctatagtgagattgggatgagaggagaaaggaggaggggtagaggtcacgatgggttgtaccaaggattgagcacagccactagagatacctatgatgcgctccacatgcaggccctgccgccaagagggcccggaggcagctttaacgttctgatggtccaccgccgcagccatacaggcgaaagacctttccaatgcaaccagtgcggggcctcttttacccagaggggaaacctgctgagacacattcggctgcacaccggggaaagacccttcaggtgtcacctgtgtaactatgcctgtcagcggcgggatgctctgacagcttctgctgaagcccgccacatcagagctgagatggga

SEQ ID NO: 963 - DNA, 426 bp, synthetic construct
  source 1..426: mol_type = other DNA
cagagcttcggcctgctggaccccaagctgtgctacctgctggatggcatcctgttcatctacggcgtgatcctgaccgccctgttcctgagagtgagattcagcagaagcgccgacgcccctgcctaccagcagggacagaaccaactgtacaacgagctgaacctgggcagacgggaagagtacgacgtgctggacagacggagaggcagggaccctgagatgggcggaaagccccggagaagaaacccccaggaaggactgtataacgaactccagagagacagaatggccgaagcctacagcgagatcggcatgagaggcgagcggagaagaggcaagggccacgatggcctgtaccagggcctgagcaccgccaccagagacacctatgacgccctgcacatgcaggccctgcctccaaga

SEQ ID NO: 964 - DNA, 426 bp, synthetic construct
  source 1..426: mol_type = other DNA
cagagttttgggttgttggaccctaaattgtgctatctgttggacggaatcctgttcatttacggagtgatcctgaccgcattgttcctgcgggttagattttccagatccgcagacgcacccgcttaccaacaagggcagaaccaactctacaatgaacttaatttggggcggagggaagagtacgacgttctggacagaaggaggggacgagatcccgagatgggcggaagacctcgaaggagaaatccgcaagaggggctttataacgaactccagagagatagaatggcagaagcctatagtgagattgggatgagaggagaaaggaggaggggtagaggtcacgatgggttgtaccaaggattgagcacagccactagagatacctatgatgcgctccacatgcaggccctgccgccaaga

SEQ ID NO: 965 - DNA, 663 bp, synthetic construct
  source 1..663: mol_type = other DNA
cagagcttcggcctgctggaccccaagctgtgctacctgctggatggcatcctgttcatctacggcgtgatcctgaccgccctgttcctgagagtgagattcagcagaagcgccgacgcccctgcctaccagcagggacagaaccaactgtacaacgagctgaacctgggcagacgggaagagtacgacgtgctggacagacggagaggcagggaccctgagatgggcggaaagccccggagaagaaacccccaggaaggactgtataacgaactccagagagacagaatggccgaagcctacagcgagatcggcatgagaggcgagcggagaagaggcaagggccacgatggcctgtaccagggcctgagcaccgccaccagagacacctatgacgccctgcacatgcaggccctgcctccaagagaattcggaggcagctttaacgttctgatggtccaccgccgcagccatacaggcgaaagacctttccaatgcaaccagtgcggggcctcttttacccagaggggaaacctgctgagacacattcggctgcacaccggggaaagacccttcaggtgtcacctgtgtaactatgcctgtcagcggcgggatgctctgacagcttctgctgaagcccgccacatcagagctgagatggga

SEQ ID NO: 966 - DNA, 759 bp, synthetic construct
  source 1..759: mol_type = other DNA
cagagttttgggttgttggaccctaaattgtgctatctgttggacggaatcctgttcatttacggagtgatcctgaccgcattgttcctgcgggttagattttccagatccgcagacgcacccgcttaccaacaagggcagaaccaactctacaatgaacttaatttggggcggagggaagagtacgacgttctggacagaaggaggggacgagatcccgagatgggcggaagacctcgaaggagaaatccgcaagaggggctttataacgaactccagagagatagaatggcagaagcctatagtgagattgggatgagaggagaaaggaggaggggtagaggtcacgatgggttgtaccaaggattgagcacagccactagagatacctatgatgcgctccacatgcaggccctgccgccaagagggcccggaggaggcgtccaagtcgaaaccattagtcccggcgatggcagaacatttcctaaaaggggacaaacatgtgtcgtccattatacaggcatgttggaggacggcaaaaaggtggacagtagtagagatcgcaataaacctttcaaattcatgttgggaaaacaagaagtcattaggggatgggaggagggcgtggctcaaatgtccgtcggccaacgcgctaagctcaccatcagccccgactacgcatacggcgctaccggacatcccggaattattccccctcacgctaccttggtgtttgacgtcgaactgttgaagctcggg

SEQ ID NO: 967 - DNA, 4152 bp, synthetic construct
  source 1..4152: mol_type = other DNA
atggccttaccagtgaccgccttgctcctgccgctggccttgctgctccacgccgccaggccggacatccagatgacacagagccctagcagcctgtctgccagcgtgggagacagagtgaccatcacatgcaaggccagcgaccacatcaacaactggctggcctggtatcagcagaagcctggacaggcccctaagctgctgatctacggcgctaccacactggaaacaggcgtgcccagcagattttctggcagcggctctggcaccgactacaccctgacaatatccagcctccagcctgaggacttcgccacctactactgtcagcagagctggaacaccccttggacattcggccagggcaccaagctggaaatcaagagactcgaggacctgaagaacgtgttcccacctgaggtggccgtgttcgagcctagcgaggccgagatcagccacacccagaaagccaccctcgtgtgcctggctaccggcttctaccccgaccatgtggaactgtcttggtgggtcaacggcaaagaggtgcacagcggcgtgtctaccgacccccagccactgaaagaacagcccgccctgaacgacagccggtactgcctgagcagcagactgagagtgtccgccaccttctggcagaacccccggaaccacttcagatgccaggtgcagttctacggcctgagcgagaacgacgagtggacccaggacagagccaagcccgtgacccagatcgtgtctgccgaagcctggggcagagccgattgcggatcccagagcttcggcctgctggaccccaagctgtgctacctgctggatggcatcctgttcatctacggcgtgatcctgaccgccctgttcctgagagtgaagttcagcagaagcgccgacgcccctgcctaccagcagggacagaaccaactgtacaacgagctgaacctgggcagacgggaagagtacgacgtgctggacaagcggagaggcagggaccctgagatgggcggaaagccccggagaaagaacccccaggaaggactgtataacgaactccagaaagacaagatggccgaagcctacagcgagatcggcatgaagggcgagcggagaagaggcaagggccacgatggcctgtaccagggcctgagcaccgccaccaaggacacctatgacgccctgcacatgcaggccctgcctccaagaagggccaagcgatctggatctggagcaacaaacttctcactactcaaacaagcaggtgacgtggaggagaatcccgggcctactagtatggactggatttggcgcatccttttccttgtcggcgctgctaccggcgcgcattccttcgaacaagttcagcttcaacagcctggcgctgagctggtcaaacctggcgcttctgtgaagatgagctgcaaagccagcggctacgccttcagcagctactggatcaactggatgaagcagaaacccggccagggactcgaatggatcggccaaatctatcccggcgacggcgacaccaactacaacggcaagttcaagggcagagccacactgaccgccgatacctctagcagcacagcctacatgcagctgagcagcctgaccagcgaagatagcgccgtgtacttctgtgcccggtccatcacaacagtcgtgggctgcgctatggactattggggccagggaacaagcgtgaccgtgtctagtacgcgtatccagaaccctgatcctgccgtgtaccagctgcgggatagcaagagcagcgacaagagcgtgtgtctgttcaccgacttcgacagccagaccaacgtgtcccagagcaaggactccgacgtgtacatcaccgataagaccgtgctggacatgcggagcatggacttcaagagcaactccgccgtggcctggtccaacaagtccgatttcgcctgcgccaacgccttcaacaacagcattatccccgaggacacattcttcccaagccccgagagcagctgcggtaccatcactcaaggtttggcagtgtcaaccatctcatcattctttccacctggctaccaagtgtccttctgcctggtcatggtgctgctgttcgccgtggataccggcctgtacttcagcgtcaagaccaacatccggtccagcaccagagactggaaggaccacaagttcaagtggcggaaggaccctcaggacaagagggccaagcgatctggatctggagcaacaaacttctcactactcaaacaagcaggtgacgtggaggagaatcccgggccttctagaggccatatgtgtcaccagcagctggtcatcagctggttcagcctggtgttcctggcctctcctctggtggctatctgggagctgaagaaagacgtgtacgtggtggaactggactggtatcccgatgctcctggcgagatggtggtgctgacctgcgatacccctgaagaggacggcatcacctggacactggatcagtctagcgaggtgctcggcagcggcaagaccctgaccatccaagtgaaagagtttggcgacgccggccagtacacctgtcacaaaggcggagaagtgctgagccacagcctgctgctgctccacaagaaagaggatggcatttggagcaccgacatcctgaaggaccagaaagagcccaagaacaagaccttcctgagatgcgaggccaagaactacagcggcagattcacctgttggtggctgaccaccatcagcaccgacctgaccttcagcgtgaagtccagcagaggcagcagtgatcctcagggcgttacatgtggcgctgccacactgtctgccgaaagagtgcggggcgacaacaaagaatacgagtacagcgtggaatgccaagaggacagcgcctgtccagccgccgaagagtctctgcctatcgaagtgatggtggacgccgtgcacaagctgaagtacgagaactacacctccagctttttcatccgggacatcatcaagcccgatcctccaaagaatctccagctgaagcctctgaagaacagcagacaggtggaagtgtcctgggagtaccccgacacctggtctacaccccacagctacttcagcctgaccttttgcgtgcaagtgcagggcaagtccaagcgcgagaaaaaggaccgggtgttcaccgacaagaccagcgccaccgtgatctgccggaagaatgccagcatcagcgtcagagcccaggatcggtactacagcagctcttggagcgagtgggccagcgttccatgttctggtggcggaggatctggcggaggtggaagcggcggaggcggatcaagaaatctgcctgtggctacccctgatcctggcatgttcccttgtctgcaccacagccagaacctgctgagagccgtgtccaacatgctccagaaggccagacagacccttgagttctacccctgcaccagcgaggaaatcgaccacgaggacatcaccaaggataagaccagcaccgtggaagcctgcctgcctctggaactgaccaagaacgagagctgcctgaacagccgggaaaccagcttcatcaccaacggcagctgtctggcttccagaaagaccagctttatgatggccctgtgcctgagcagcatctacgaggacctgaagatgtaccaggtcgagttcaagaccatgaacgccaagctgctgatggaccccaagagacagattttcctggaccagaatatgctggccgtgatcgacgagctgatgcaggccctgaacttcaacagcgagacagtgccccagaagtctagcctggaagaacccgacttctacaagaccaagatcaagctgtgcatcctgctgcacgccttcagaatcagagccgtgaccatcgacagagtgatgagctacctgaacgccagcggctctaagatcgaagtgatgtaccctcctccttacctggacaacgagaagtccaacggcaccatcatccacgtgaagggcaagcacctgtgtccttctccactgttccccggacctagcaagcctttctgggtgctcgttgttgttggcggcgtgctggcctgttacagcctgctggttaccgtggccttcatcatcttttgggtccgaagcaagcggagc

SEQ ID NO: 968 - DNA, 1626 bp, synthetic construct
  source 1..1626: mol_type = other DNA
atgtgtcaccagcagctggtcatcagctggttcagcctggtgttcctggcctctcctctggtggctatctgggagctgaagaaagacgtgtacgtggtggaactggactggtatcccgatgctcctggcgagatggtggtgctgacctgcgatacccctgaagaggacggcatcacctggacactggatcagtctagcgaggtgctcggcagcggcaagaccctgaccatccaagtgaaagagtttggcgacgccggccagtacacctgtcacaaaggcggagaagtgctgagccacagcctgctgctgctccacaagaaagaggatggcatttggagcaccgacatcctgaaggaccagaaagagcccaagaacaagaccttcctgagatgcgaggccaagaactacagcggcagattcacctgttggtggctgaccaccatcagcaccgacctgaccttcagcgtgaagtccagcagaggcagcagtgatcctcagggcgttacatgtggcgctgccacactgtctgccgaaagagtgcggggcgacaacaaagaatacgagtacagcgtggaatgccaagaggacagcgcctgtccagccgccgaagagtctctgcctatcgaagtgatggtggacgccgtgcacaagctgaagtacgagaactacacctccagctttttcatccgggacatcatcaagcccgatcctccaaagaatctccagctgaagcctctgaagaacagcagacaggtggaagtgtcctgggagtaccccgacacctggtctacaccccacagctacttcagcctgaccttttgcgtgcaagtgcagggcaagtccaagcgcgagaaaaaggaccgggtgttcaccgacaagaccagcgccaccgtgatctgccggaagaatgccagcatcagcgtcagagcccaggatcggtactacagcagctcttggagcgagtgggccagcgttccatgttctggtggcggaggatctggcggaggtggaagcggcggaggcggatcaagaaatctgcctgtggctacccctgatcctggcatgttcccttgtctgcaccacagccagaacctgctgagagccgtgtccaacatgctccagaaggccagacagacccttgagttctacccctgcaccagcgaggaaatcgaccacgaggacatcaccaaggataagaccagcaccgtggaagcctgcctgcctctggaactgaccaagaacgagagctgcctgaacagccgggaaaccagcttcatcaccaacggcagctgtctggcttccagaaagaccagctttatgatggccctgtgcctgagcagcatctacgaggacctgaagatgtaccaggtcgagttcaagaccatgaacgccaagctgctgatggaccccaagagacagattttcctggaccagaatatgctggccgtgatcgacgagctgatgcaggccctgaacttcaacagcgagacagtgccccagaagtctagcctggaagaacccgacttctacaagaccaagatcaagctgtgcatcctgctgcacgccttcagaatcagagccgtgaccatcgacagagtgatgagctacctgaacgccagcggctct

SEQ ID NO: 969 - DNA, 1842 bp, synthetic construct
  source 1..1842: mol_type = other DNA
atgtgtcaccagcagctggtcatcagctggttcagcctggtgttcctggcctctcctctggtggctatctgggagctgaagaaagacgtgtacgtggtggaactggactggtatcccgatgctcctggcgagatggtggtgctgacctgcgatacccctgaagaggacggcatcacctggacactggatcagtctagcgaggtgctcggcagcggcaagaccctgaccatccaagtgaaagagtttggcgacgccggccagtacacctgtcacaaaggcggagaagtgctgagccacagcctgctgctgctccacaagaaagaggatggcatttggagcaccgacatcctgaaggaccagaaagagcccaagaacaagaccttcctgagatgcgaggccaagaactacagcggcagattcacctgttggtggctgaccaccatcagcaccgacctgaccttcagcgtgaagtccagcagaggcagcagtgatcctcagggcgttacatgtggcgctgccacactgtctgccgaaagagtgcggggcgacaacaaagaatacgagtacagcgtggaatgccaagaggacagcgcctgtccagccgccgaagagtctctgcctatcgaagtgatggtggacgccgtgcacaagctgaagtacgagaactacacctccagctttttcatccgggacatcatcaagcccgatcctccaaagaatctccagctgaagcctctgaagaacagcagacaggtggaagtgtcctgggagtaccccgacacctggtctacaccccacagctacttcagcctgaccttttgcgtgcaagtgcagggcaagtccaagcgcgagaaaaaggaccgggtgttcaccgacaagaccagcgccaccgtgatctgccggaagaatgccagcatcagcgtcagagcccaggatcggtactacagcagctcttggagcgagtgggccagcgttccatgttctggtggcggaggatctggcggaggtggaagcggcggaggcggatcaagaaatctgcctgtggctacccctgatcctggcatgttcccttgtctgcaccacagccagaacctgctgagagccgtgtccaacatgctccagaaggccagacagacccttgagttctacccctgcaccagcgaggaaatcgaccacgaggacatcaccaaggataagaccagcaccgtggaagcctgcctgcctctggaactgaccaagaacgagagctgcctgaacagccgggaaaccagcttcatcaccaacggcagctgtctggcttccagaaagaccagctttatgatggccctgtgcctgagcagcatctacgaggacctgaagatgtaccaggtcgagttcaagaccatgaacgccaagctgctgatggaccccaagagacagattttcctggaccagaatatgctggccgtgatcgacgagctgatgcaggccctgaacttcaacagcgagacagtgccccagaagtctagcctggaagaacccgacttctacaagaccaagatcaagctgtgcatcctgctgcacgccttcagaatcagagccgtgaccatcgacagagtgatgagctacctgaacgccagcggctctaagatcgaagtgatgtaccctcctccttacctggacaacgagaagtccaacggcaccatcatccacgtgaagggcaagcacctgtgtccttctccactgttccccggacctagcaagcctttctgggtgctcgttgttgttggcggcgtgctggcctgttacagcctgctggttaccgtggccttcatcatcttttgggtccgaagcaagcggagc

SEQ ID NO: 970 - DNA, 4395 bp, synthetic construct
  source 1..4395: mol_type = other DNA
atggccttaccagtgaccgccttgctcctgccgctggccttgctgctccacgccgccaggccggaattcaatgctggcgtgacccagacacctaagttccaggtgctgaaaaccggccagagcatgaccctgcaatgcgcccaggacatgaaccatgagtacatgagctggtacagacaggaccccggcatgggcctgagactgatccactactctgtggctatccagaccaccgaccagggcgaagtgcccaatggctacaacgtgtccagaagcaccatcgaggacttcccactgagactgctgtctgccgctcctagccagaccagcgtgtacttttgtgccagcagctacctgggcaacaccggcgagctgttttttggcgagggcagcagactgaccgtgctcgaggacctgaagaacgtgttcccacctgaggtggccgtgttcgagcctagcgaggccgagatcagccacacccagaaagccaccctcgtgtgcctggctaccggcttctaccccgaccatgtggaactgtcttggtgggtcaacggcaaagaggtgcacagcggcgtgtctaccgacccccagccactgaaagaacagcccgccctgaacgacagccggtactgcctgagcagcagactgagagtgtccgccaccttctggcagaacccccggaaccacttcagatgccaggtgcagttctacggcctgagcgagaacgacgagtggacccaggacagagccaagcccgtgacccagatcgtgtctgccgaagcctggggcagagccgattgcggatcccagagcttcggcctgctggaccccaagctgtgctacctgctggatggcatcctgttcatctacggcgtgatcctgaccgccctgttcctgagagtgaagttcagcagaagcgccgacgcccctgcctaccagcagggacagaaccaactgtacaacgagctgaacctgggcagacgggaagagtacgacgtgctggacaagcggagaggcagggaccctgagatgggcggaaagccccagcggagaaagaacccccaggaaggactgtataacgaactccagaaagacaagatggccgaagcctacagcgagatcggcatgaagggcgagcggagaagaggcaagggccacgatggcctgtaccagggcctgagcaccgccaccaaggacacctatgacgccctgcacatgcaggccctgcctccaagaagggccaagcgatctggatctggagcaacaaacttctcactactcaaacaagcaggtgacgtggaggagaatcccgggcctactagtatggactggatttggcgcatccttttccttgtcggcgctgctaccggcgcgcattccttcgaacaagaagtgacacagatccctgccgctctgtctgtgcctgagggcgaaaacctggtgctgaactgctccttcaccgacagcgccatctacaacctccagtggttcaggcaggaccctggaaagggactgacaagcctgctgctgatccagagcagccagagagagcagacctccggcagactgaatgccagcctggataagagcagcggcaggtctaccctgtatatcgccgcttctcagcctggcgatagcgccacatatctgtgtgctgtgcggcctacaagcggcggcagctacatccctacatttggcagaggcaccagcctgatcgtgcacccttatacgcgtatccagaaccctgatcctgccgtgtaccagctgcgggatagcaagagcagcgacaagagcgtgtgtctgttcaccgacttcgacagccagaccaacgtgtcccagagcaaggactccgacgtgtacatcaccgataagaccgtgctggacatgcggagcatggacttcaagagcaactccgccgtggcctggtccaacaagtccgatttcgcctgcgccaacgccttcaacaacagcattatccccgaggacacattcttcccaagccccgagagcagctgcggtacccagagttttgggttgttggaccctaaattgtgctatctgttggacggaatcctgttcatttacggagtgatcctgaccgcattgttcctgcgggttaagttttccagatccgcagacgcacccgcttaccaacaagggcagaaccaactctacaatgaacttaatttggggcggagggaagagtacgacgttctggacaaaaggaggggacgagatcccgagatgggcggaaagcctcagcgaaggaagaatccgcaagaggggctttataacgaactccagaaagataaaatggcagaagcctatagtgagattgggatgaagggagaaaggaggaggggtaaaggtcacgatgggttgtaccaaggattgagcacagccactaaagatacctatgatgcgctccacatgcaggccctgccgccaagacgcgccaagagaagcggatctggcgtgaagcagaccctgaatttcgacctgctgaagctggctggcgacgtggaatccaacccaggcccttctagaggccatatgtgtcaccagcagctggtcatcagctggttcagcctggtgttcctggcctctcctctggtggctatctgggagctgaagaaagacgtgtacgtggtggaactggactggtatcccgatgctcctggcgagatggtggtgctgacctgcgatacccctgaagaggacggcatcacctggacactggatcagtctagcgaggtgctcggcagcggcaagaccctgaccatccaagtgaaagagtttggcgacgccggccagtacacctgtcacaaaggcggagaagtgctgagccacagcctgctgctgctccacaagaaagaggatggcatttggagcaccgacatcctgaaggaccagaaagagcccaagaacaagaccttcctgagatgcgaggccaagaactacagcggcagattcacctgttggtggctgaccaccatcagcaccgacctgaccttcagcgtgaagtccagcagaggcagcagtgatcctcagggcgttacatgtggcgctgccacactgtctgccgaaagagtgcggggcgacaacaaagaatacgagtacagcgtggaatgccaagaggacagcgcctgtccagccgccgaagagtctctgcctatcgaagtgatggtggacgccgtgcacaagctgaagtacgagaactacacctccagctttttcatccgggacatcatcaagcccgatcctccaaagaatctccagctgaagcctctgaagaacagcagacaggtggaagtgtcctgggagtaccccgacacctggtctacaccccacagctacttcagcctgaccttttgcgtgcaagtgcagggcaagtccaagcgcgagaaaaaggaccgggtgttcaccgacaagaccagcgccaccgtgatctgccggaagaatgccagcatcagcgtcagagcccaggatcggtactacagcagctcttggagcgagtgggccagcgttccatgttctggtggcggaggatctggcggaggtggaagcggcggaggcggatcaagaaatctgcctgtggctacccctgatcctggcatgttcccttgtctgcaccacagccagaacctgctgagagccgtgtccaacatgctccagaaggccagacagacccttgagttctacccctgcaccagcgaggaaatcgaccacgaggacatcaccaaggataagaccagcaccgtggaagcctgcctgcctctggaactgaccaagaacgagagctgcctgaacagccgggaaaccagcttcatcaccaacggcagctgtctggcttccagaaagaccagctttatgatggccctgtgcctgagcagcatctacgaggacctgaagatgtaccaggtcgagttcaagaccatgaacgccaagctgctgatggaccccaagagacagattttcctggaccagaatatgctggccgtgatcgacgagctgatgcaggccctgaacttcaacagcgagacagtgccccagaagtctagcctggaagaacccgacttctacaagaccaagatcaagctgtgcatcctgctgcacgccttcagaatcagagccgtgaccatcgacagagtgatgagctacctgaacgccagcggctctaagatcgaagtgatgtaccctcctccttacctggacaacgagaagtccaacggcaccatcatccacgtgaagggcaagcacctgtgtccttctccactgttccccggacctagcaagcctttctgggtgctcgttgttgttggcggcgtgctggcctgttacagcctgctggttaccgtggccttcatcatcttttgggtccgaagcaagcggagc

SEQ ID NO: 971 - DNA, 4377 bp, synthetic construct
  source 1..4377: mol_type = other DNA
atggccttaccagtgaccgccttgctcctgccgctggccttgctgctccacgccgccaggccggaattcgatggcggcattacacagagccccaagtacctgttcagaaaagagggccagaacgtcaccctgagctgcgagcagaacctgaaccacgacgccatgtactggtacagacaggacccaggccagggcctgagactgatctactactcttgggctcagggcgacttccagaagggcgatattgccgagggctacagcgtgtccagagagaagaaagagtcctttccactgaccgtgacaagcgcccagaagaaccctaccgccttctacctgtgtgccagctcttggggagccccttacgagcagtatttcggccctggcaccagactgacagttctcgaggacctgaagaacgtgttcccacctgaggtggccgtgttcgagcctagcgaggccgagatcagccacacccagaaagccaccctcgtgtgcctggctaccggcttctaccccgaccatgtggaactgtcttggtgggtcaacggcaaagaggtgcacagcggcgtgtctaccgacccccagccactgaaagaacagcccgccctgaacgacagccggtactgcctgagcagcagactgagagtgtccgccaccttctggcagaacccccggaaccacttcagatgccaggtgcagttctacggcctgagcgagaacgacgagtggacccaggacagagccaagcccgtgacccagatcgtgtctgccgaagcctggggcagagccgattgcggatcccagagcttcggcctgctggaccccaagctgtgctacctgctggatggcatcctgttcatctacggcgtgatcctgaccgccctgttcctgagagtgaagttcagcagaagcgccgacgcccctgcctaccagcagggacagaaccaactgtacaacgagctgaacctgggcagacgggaagagtacgacgtgctggacaagcggagaggcagggaccctgagatgggcggaaagccccagcggagaaagaacccccaggaaggactgtataacgaactccagaaagacaagatggccgaagcctacagcgagatcggcatgaagggcgagcggagaagaggcaagggccacgatggcctgtaccagggcctgagcaccgccaccaaggacacctatgacgccctgcacatgcaggccctgcctccaagaagggccaagcgatctggatctggagcaacaaacttctcactactcaaacaagcaggtgacgtggaggagaatcccgggcctactagtatggactggatttggcgcatccttttccttgtcggcgctgctaccggcgcgcattccttcgaacaacaaggcgaagaagatccccaggctctgagcatccaagagggcgagaatgccaccatgaactgctcctacaagaccagcatcaacaacctccagtggtacaggcagaacagcggcagaggactggtgcacctgatcctgatccggtccaacgagagagagaagcactccggcagactgagagtgaccctggacaccagcaagaagtccagcagcctgctgattaccgccagcagagccgccgatacagccagctacttttgtgccaccgacggcgatacccctctggtgtttggcaagggcacaagactgagcgtgatcgccaatacgcgtatccagaaccctgatcctgccgtgtaccagctgcgggatagcaagagcagcgacaagagcgtgtgtctgttcaccgacttcgacagccagaccaacgtgtcccagagcaaggactccgacgtgtacatcaccgataagaccgtgctggacatgcggagcatggacttcaagagcaactccgccgtggcctggtccaacaagtccgatttcgcctgcgccaacgccttcaacaacagcattatccccgaggacacattcttcccaagccccgagagcagctgcggtacccagagttttgggttgttggaccctaaattgtgctatctgttggacggaatcctgttcatttacggagtgatcctgaccgcattgttcctgcgggttaagttttccagatccgcagacgcacccgcttaccaacaagggcagaaccaactctacaatgaacttaatttggggcggagggaagagtacgacgttctggacaaaaggaggggacgagatcccgagatgggcggaaagcctcagcgaaggaagaatccgcaagaggggctttataacgaactccagaaagataaaatggcagaagcctatagtgagattgggatgaagggagaaaggaggaggggtaaaggtcacgatgggttgtaccaaggattgagcacagccactaaagatacctatgatgcgctccacatgcaggccctgccgccaagacgcgccaagagaagcggatctggcgtgaagcagaccctgaatttcgacctgctgaagctggctggcgacgtggaatccaacccaggcccttctagaggccatatgtgtcaccagcagctggtcatcagctggttcagcctggtgttcctggcctctcctctggtggctatctgggagctgaagaaagacgtgtacgtggtggaactggactggtatcccgatgctcctggcgagatggtggtgctgacctgcgatacccctgaagaggacggcatcacctggacactggatcagtctagcgaggtgctcggcagcggcaagaccctgaccatccaagtgaaagagtttggcgacgccggccagtacacctgtcacaaaggcggagaagtgctgagccacagcctgctgctgctccacaagaaagaggatggcatttggagcaccgacatcctgaaggaccagaaagagcccaagaacaagaccttcctgagatgcgaggccaagaactacagcggcagattcacctgttggtggctgaccaccatcagcaccgacctgaccttcagcgtgaagtccagcagaggcagcagtgatcctcagggcgttacatgtggcgctgccacactgtctgccgaaagagtgcggggcgacaacaaagaatacgagtacagcgtggaatgccaagaggacagcgcctgtccagccgccgaagagtctctgcctatcgaagtgatggtggacgccgtgcacaagctgaagtacgagaactacacctccagctttttcatccgggacatcatcaagcccgatcctccaaagaatctccagctgaagcctctgaagaacagcagacaggtggaagtgtcctgggagtaccccgacacctggtctacaccccacagctacttcagcctgaccttttgcgtgcaagtgcagggcaagtccaagcgcgagaaaaaggaccgggtgttcaccgacaagaccagcgccaccgtgatctgccggaagaatgccagcatcagcgtcagagcccaggatcggtactacagcagctcttggagcgagtgggccagcgttccatgttctggtggcggaggatctggcggaggtggaagcggcggaggcggatcaagaaatctgcctgtggctacccctgatcctggcatgttcccttgtctgcaccacagccagaacctgctgagagccgtgtccaacatgctccagaaggccagacagacccttgagttctacccctgcaccagcgaggaaatcgaccacgaggacatcaccaaggataagaccagcaccgtggaagcctgcctgcctctggaactgaccaagaacgagagctgcctgaacagccgggaaaccagcttcatcaccaacggcagctgtctggcttccagaaagaccagctttatgatggccctgtgcctgagcagcatctacgaggacctgaagatgtaccaggtcgagttcaagaccatgaacgccaagctgctgatggaccccaagagacagattttcctggaccagaatatgctggccgtgatcgacgagctgatgcaggccctgaacttcaacagcgagacagtgccccagaagtctagcctggaagaacccgacttctacaagaccaagatcaagctgtgcatcctgctgcacgccttcagaatcagagccgtgaccatcgacagagtgatgagctacctgaacgccagcggctctaagatcgaagtgatgtaccctcctccttacctggacaacgagaagtccaacggcaccatcatccacgtgaagggcaagcacctgtgtccttctccactgttccccggacctagcaagcctttctgggtgctcgttgttgttggcggcgtgctggcctgttacagcctgctggttaccgtggccttcatcatcttttgggtccgaagcaagcggagc

SEQ ID NO: 972 - DNA, 4413 bp, synthetic construct
  source 1..4413: mol_type = other DNA
atggccttaccagtgaccgccttgctcctgccgctggccttgctgctccacgccgccaggccggaattcaatgctggcgtgacccagacacctaagttccgggtgctgaaaaccggccagagcatgacactgctgtgcgcccaggacatgaaccatgagtacatgtattggtacagacaggaccccggcatgggcctgagactgatccactattctggctggggcaaagacaccgccaagggcgaagttcccgatggctacaacgtgtcccggctgaagaagcagaacttcctgctgggcctcgaaagcgccgctccatctcagaccagcgtgtacttctgcgccagcaaagttggcccaggccagcacaatagccctctgcactttggcaacggcaccagactgacagtgacactcgaggacctgaagaacgtgttcccacctgaggtggccgtgttcgagcctagcgaggccgagatcagccacacccagaaagccaccctcgtgtgcctggctaccggcttctaccccgaccatgtggaactgtcttggtgggtcaacggcaaagaggtgcacagcggcgtgtctaccgacccccagccactgaaagaacagcccgccctgaacgacagccggtactgcctgagcagcagactgagagtgtccgccaccttctggcagaacccccggaaccacttcagatgccaggtgcagttctacggcctgagcgagaacgacgagtggacccaggacagagccaagcccgtgacccagatcgtgtctgccgaagcctggggcagagccgattgcggatcccagagcttcggcctgctggaccccaagctgtgctacctgctggatggcatcctgttcatctacggcgtgatcctgaccgccctgttcctgagagtgaagttcagcagaagcgccgacgcccctgcctaccagcagggacagaaccaactgtacaacgagctgaacctgggcagacgggaagagtacgacgtgctggacaagcggagaggcagggaccctgagatgggcggaaagccccagcggagaaagaacccccaggaaggactgtataacgaactccagaaagacaagatggccgaagcctacagcgagatcggcatgaagggcgagcggagaagaggcaagggccacgatggcctgtaccagggcctgagcaccgccaccaaggacacctatgacgccctgcacatgcaggccctgcctccaagaagggccaagcgatctggatctggagcaacaaacttctcactactcaaacaagcaggtgacgtggaggagaatcccgggcctactagtatggactggatttggcgcatccttttccttgtcggcgctgctaccggcgcgcattccttcgaagctcagaaagtgacacaggcccagaccgagatcagcgtggtggaaaaagaagatgtgaccctggactgcgtgtacgagacaagggacaccgcctactacctgttctggtacaagcagcctcctagcggcgagctggtgttcctgattagacagccttggtggggcagcagcagaggcatcagcggcagatacagctggaacttccagaagtccaccagcagcttcaacttcaccatcaccgccagccaggtggtggatagcgccgtgtacttttgtgccatgagcgtgcccgatagcagaggccactaccagttcaccttcggcaagggcacaaagctgagcgtgatccctacgcgtatccagaaccctgatcctgccgtgtaccagctgcgggatagcaagagcagcgacaagagcgtgtgtctgttcaccgacttcgacagccagaccaacgtgtcccagagcaaggactccgacgtgtacatcaccgataagaccgtgctggacatgcggagcatggacttcaagagcaactccgccgtggcctggtccaacaagtccgatttcgcctgcgccaacgccttcaacaacagcattatccccgaggacacattcttcccaagccccgagagcagctgcggtacccagagttttgggttgttggaccctaaattgtgctatctgttggacggaatcctgttcatttacggagtgatcctgaccgcattgttcctgcgggttaagttttccagatccgcagacgcacccgcttaccaacaagggcagaaccaactctacaatgaacttaatttggggcggagggaagagtacgacgttctggacaaaaggaggggacgagatcccgagatgggcggaaagcctcagcgaaggaagaatccgcaagaggggctttataacgaactccagaaagataaaatggcagaagcctatagtgagattgggatgaagggagaaaggaggaggggtaaaggtcacgatgggttgtaccaaggattgagcacagccactaaagatacctatgatgcgctccacatgcaggccctgccgccaagacgcgccaagagaagcggatctggcgtgaagcagaccctgaatttcgacctgctgaagctggctggcgacgtggaatccaacccaggcccttctagaggccatatgtgtcaccagcagctggtcatcagctggttcagcctggtgttcctggcctctcctctggtggctatctgggagctgaagaaagacgtgtacgtggtggaactggactggtatcccgatgctcctggcgagatggtggtgctgacctgcgatacccctgaagaggacggcatcacctggacactggatcagtctagcgaggtgctcggcagcggcaagaccctgaccatccaagtgaaagagtttggcgacgccggccagtacacctgtcacaaaggcggagaagtgctgagccacagcctgctgctgctccacaagaaagaggatggcatttggagcaccgacatcctgaaggaccagaaagagcccaagaacaagaccttcctgagatgcgaggccaagaactacagcggcagattcacctgttggtggctgaccaccatcagcaccgacctgaccttcagcgtgaagtccagcagaggcagcagtgatcctcagggcgttacatgtggcgctgccacactgtctgccgaaagagtgcggggcgacaacaaagaatacgagtacagcgtggaatgccaagaggacagcgcctgtccagccgccgaagagtctctgcctatcgaagtgatggtggacgccgtgcacaagctgaagtacgagaactacacctccagctttttcatccgggacatcatcaagcccgatcctccaaagaatctccagctgaagcctctgaagaacagcagacaggtggaagtgtcctgggagtaccccgacacctggtctacaccccacagctacttcagcctgaccttttgcgtgcaagtgcagggcaagtccaagcgcgagaaaaaggaccgggtgttcaccgacaagaccagcgccaccgtgatctgccggaagaatgccagcatcagcgtcagagcccaggatcggtactacagcagctcttggagcgagtgggccagcgttccatgttctggtggcggaggatctggcggaggtggaagcggcggaggcggatcaagaaatctgcctgtggctacccctgatcctggcatgttcccttgtctgcaccacagccagaacctgctgagagccgtgtccaacatgctccagaaggccagacagacccttgagttctacccctgcaccagcgaggaaatcgaccacgaggacatcaccaaggataagaccagcaccgtggaagcctgcctgcctctggaactgaccaagaacgagagctgcctgaacagccgggaaaccagcttcatcaccaacggcagctgtctggcttccagaaagaccagctttatgatggccctgtgcctgagcagcatctacgaggacctgaagatgtaccaggtcgagttcaagaccatgaacgccaagctgctgatggaccccaagagacagattttcctggaccagaatatgctggccgtgatcgacgagctgatgcaggccctgaacttcaacagcgagacagtgccccagaagtctagcctggaagaacccgacttctacaagaccaagatcaagctgtgcatcctgctgcacgccttcagaatcagagccgtgaccatcgacagagtgatgagctacctgaacgccagcggctctaagatcgaagtgatgtaccctcctccttacctggacaacgagaagtccaacggcaccatcatccacgtgaagggcaagcacctgtgtccttctccactgttccccggacctagcaagcctttctgggtgctcgttgttgttggcggcgtgctggcctgttacagcctgctggttaccgtggccttcatcatcttttgggtccgaagcaagcggagc

SEQ ID NO: 973 - DNA, 4377 bp, synthetic construct
  source 1..4377: mol_type = other DNA
atggccttaccagtgaccgccttgctcctgccgctggccttgctgctccacgccgccaggccggaattcggcattacacagagccccaagtacctgttcagaaaagagggccagaacgtcaccctgagctgcgagcagaacctgaaccacgacgccatgtactggtacagacaggacccaggccagggcctgagactgatctactacagccagatcgtgaacgacttccagaagggcgacattgccgagggctacagcgtgtccagagagaagaaagagtcctttccactgaccgtgacaagcgcccagaagaaccctaccgccttctacctgtgtgccagctctcctggcgctctgtacgagcagtatttcggccctggcaccagactgacagttacactcgaggacctgaagaacgtgttcccacctgaggtggccgtgttcgagcctagcgaggccgagatcagccacacccagaaagccaccctcgtgtgcctggctaccggcttctaccccgaccatgtggaactgtcttggtgggtcaacggcaaagaggtgcacagcggcgtgtctaccgacccccagccactgaaagaacagcccgccctgaacgacagccggtactgcctgagcagcagactgagagtgtccgccaccttctggcagaacccccggaaccacttcagatgccaggtgcagttctacggcctgagcgagaacgacgagtggacccaggacagagccaagcccgtgacccagatcgtgtctgccgaagcctggggcagagccgattgcggatcccagagcttcggcctgctggaccccaagctgtgctacctgctggatggcatcctgttcatctacggcgtgatcctgaccgccctgttcctgagagtgaagttcagcagaagcgccgacgcccctgcctaccagcagggacagaaccaactgtacaacgagctgaacctgggcagacgggaagagtacgacgtgctggacaagcggagaggcagggaccctgagatgggcggaaagccccagcggagaaagaacccccaggaaggactgtataacgaactccagaaagacaagatggccgaagcctacagcgagatcggcatgaagggcgagcggagaagaggcaagggccacgatggcctgtaccagggcctgagcaccgccaccaaggacacctatgacgccctgcacatgcaggccctgcctccaagaagggccaagcgatctggatctggagcaacaaacttctcactactcaaacaagcaggtgacgtggaggagaatcccgggcctactagtatggactggatttggcgcatccttttccttgtcggcgctgctaccggcgcgcattccttcgaagaaaatgtggaacagcaccccagcacactgagcgtgcaagagggcgatagcgccgtgattaagtgcacctacagcgacagcgccagcaactacttcccctggtacaagcaagagctgggcaaaagaccccagctcatcatcgacatccggtccaacgtgggcgagaagaaggaccagagaatcgccgtgacactgaacaagaccgccaagcacttcagcctgcacatcaccgagacacagcctgaggattccgccgtgtacttttgtgccgccaccgaggactaccagctgatttggggagccggcaccaagctgattatcaagcctgacacgcgtatccagaaccctgatcctgccgtgtaccagctgcgggatagcaagagcagcgacaagagcgtgtgtctgttcaccgacttcgacagccagaccaacgtgtcccagagcaaggactccgacgtgtacatcaccgataagaccgtgctggacatgcggagcatggacttcaagagcaactccgccgtggcctggtccaacaagtccgatttcgcctgcgccaacgccttcaacaacagcattatccccgaggacacattcttcccaagccccgagagcagctgcggtacccagagttttgggttgttggaccctaaattgtgctatctgttggacggaatcctgttcatttacggagtgatcctgaccgcattgttcctgcgggttaagttttccagatccgcagacgcacccgcttaccaacaagggcagaaccaactctacaatgaacttaatttggggcggagggaagagtacgacgttctggacaaaaggaggggacgagatcccgagatgggcggaaagcctcagcgaaggaagaatccgcaagaggggctttataacgaactccagaaagataaaatggcagaagcctatagtgagattgggatgaagggagaaaggaggaggggtaaaggtcacgatgggttgtaccaaggattgagcacagccactaaagatacctatgatgcgctccacatgcaggccctgccgccaagacgcgccaagagaagcggatctggcgtgaagcagaccctgaatttcgacctgctgaagctggctggcgacgtggaatccaacccaggcccttctagaggccatatgtgtcaccagcagctggtcatcagctggttcagcctggtgttcctggcctctcctctggtggctatctgggagctgaagaaagacgtgtacgtggtggaactggactggtatcccgatgctcctggcgagatggtggtgctgacctgcgatacccctgaagaggacggcatcacctggacactggatcagtctagcgaggtgctcggcagcggcaagaccctgaccatccaagtgaaagagtttggcgacgccggccagtacacctgtcacaaaggcggagaagtgctgagccacagcctgctgctgctccacaagaaagaggatggcatttggagcaccgacatcctgaaggaccagaaagagcccaagaacaagaccttcctgagatgcgaggccaagaactacagcggcagattcacctgttggtggctgaccaccatcagcaccgacctgaccttcagcgtgaagtccagcagaggcagcagtgatcctcagggcgttacatgtggcgctgccacactgtctgccgaaagagtgcggggcgacaacaaagaatacgagtacagcgtggaatgccaagaggacagcgcctgtccagccgccgaagagtctctgcctatcgaagtgatggtggacgccgtgcacaagctgaagtacgagaactacacctccagctttttcatccgggacatcatcaagcccgatcctccaaagaatctccagctgaagcctctgaagaacagcagacaggtggaagtgtcctgggagtaccccgacacctggtctacaccccacagctacttcagcctgaccttttgcgtgcaagtgcagggcaagtccaagcgcgagaaaaaggaccgggtgttcaccgacaagaccagcgccaccgtgatctgccggaagaatgccagcatcagcgtcagagcccaggatcggtactacagcagctcttggagcgagtgggccagcgttccatgttctggtggcggaggatctggcggaggtggaagcggcggaggcggatcaagaaatctgcctgtggctacccctgatcctggcatgttcccttgtctgcaccacagccagaacctgctgagagccgtgtccaacatgctccagaaggccagacagacccttgagttctacccctgcaccagcgaggaaatcgaccacgaggacatcaccaaggataagaccagcaccgtggaagcctgcctgcctctggaactgaccaagaacgagagctgcctgaacagccgggaaaccagcttcatcaccaacggcagctgtctggcttccagaaagaccagctttatgatggccctgtgcctgagcagcatctacgaggacctgaagatgtaccaggtcgagttcaagaccatgaacgccaagctgctgatggaccccaagagacagattttcctggaccagaatatgctggccgtgatcgacgagctgatgcaggccctgaacttcaacagcgagacagtgccccagaagtctagcctggaagaacccgacttctacaagaccaagatcaagctgtgcatcctgctgcacgccttcagaatcagagccgtgaccatcgacagagtgatgagctacctgaacgccagcggctctaagatcgaagtgatgtaccctcctccttacctggacaacgagaagtccaacggcaccatcatccacgtgaagggcaagcacctgtgtccttctccactgttccccggacctagcaagcctttctgggtgctcgttgttgttggcggcgtgctggcctgttacagcctgctggttaccgtggccttcatcatcttttgggtccgaagcaagcggagc

SEQ ID NO: 974 - DNA, 4395 bp, synthetic construct
  source 1..4395: mol_type = other DNA
atggccttaccagtgaccgccttgctcctgccgctggccttgctgctccacgccgccaggccggaattcggcgttacccagacacctaagttccgggtgctgaaaaccggccagagcatgacactgctgtgcgcccaggacatgaaccacgagtacatgtattggtacagacaggaccccggcatgggcctgagactgatccactattctgtcggcgagggcaccacagccaaaggcgaagttcctgacggctacaacgtgtcccggctgaagaagcagaacttcctgctgggcctcgaaagcgccgctccatctcagaccagcgtgtacttctgtgccagccggggctaccacagactgaacaacgagcagttcttcggccctggcaccagactgacagttctcgaggacctgaagaacgtgttcccacctgaggtggccgtgttcgagcctagcgaggccgagatcagccacacccagaaagccaccctcgtgtgcctggctaccggcttctaccccgaccatgtggaactgtcttggtgggtcaacggcaaagaggtgcacagcggcgtgtctaccgacccccagccactgaaagaacagcccgccctgaacgacagccggtactgcctgagcagcagactgagagtgtccgccaccttctggcagaacccccggaaccacttcagatgccaggtgcagttctacggcctgagcgagaacgacgagtggacccaggacagagccaagcccgtgacccagatcgtgtctgccgaagcctggggcagagccgattgcggatcccagagcttcggcctgctggaccccaagctgtgctacctgctggatggcatcctgttcatctacggcgtgatcctgaccgccctgttcctgagagtgaagttcagcagaagcgccgacgcccctgcctaccagcagggacagaaccaactgtacaacgagctgaacctgggcagacgggaagagtacgacgtgctggacaagcggagaggcagggaccctgagatgggcggaaagccccagcggagaaagaacccccaggaaggactgtataacgaactccagaaagacaagatggccgaagcctacagcgagatcggcatgaagggcgagcggagaagaggcaagggccacgatggcctgtaccagggcctgagcaccgccaccaaggacacctatgacgccctgcacatgcaggccctgcctccaagaagggccaagcgatctggatctggagcaacaaacttctcactactcaaacaagcaggtgacgtggaggagaatcccgggcctactagtatggactggatttggcgcatccttttccttgtcggcgctgctaccggcgcgcattccttcgaacagagaaaagaggtggaacaggaccctggacctttcaacgttccagagggcgctaccgtggccttcaactgcacctacagcaatagcgccagccagagcttcttctggtatcggcaggactgccggaaagaacccaagctgctgatgagcgtgtacagcagcggcaacgaggacggcagattcacagcccagctgaacagagccagccagtacatctctctgctgatccgggacagcaagctgagcgatagcgccacctatctgtgcgtggtcaagcctgatcctggcgctggaagctaccagctgacatttggcaagggcaccaagctgtctgtgatccccaatacgcgtatccagaaccctgatcctgccgtgtaccagctgcgggatagcaagagcagcgacaagagcgtgtgtctgttcaccgacttcgacagccagaccaacgtgtcccagagcaaggactccgacgtgtacatcaccgataagaccgtgctggacatgcggagcatggacttcaagagcaactccgccgtggcctggtccaacaagtccgatttcgcctgcgccaacgccttcaacaacagcattatccccgaggacacattcttcccaagccccgagagcagctgcggtacccagagttttgggttgttggaccctaaattgtgctatctgttggacggaatcctgttcatttacggagtgatcctgaccgcattgttcctgcgggttaagttttccagatccgcagacgcacccgcttaccaacaagggcagaaccaactctacaatgaacttaatttggggcggagggaagagtacgacgttctggacaaaaggaggggacgagatcccgagatgggcggaaagcctcagcgaaggaagaatccgcaagaggggctttataacgaactccagaaagataaaatggcagaagcctatagtgagattgggatgaagggagaaaggaggaggggtaaaggtcacgatgggttgtaccaaggattgagcacagccactaaagatacctatgatgcgctccacatgcaggccctgccgccaagacgcgccaagagaagcggatctggcgtgaagcagaccctgaatttcgacctgctgaagctggctggcgacgtggaatccaacccaggcccttctagaggccatatgtgtcaccagcagctggtcatcagctggttcagcctggtgttcctggcctctcctctggtggctatctgggagctgaagaaagacgtgtacgtggtggaactggactggtatcccgatgctcctggcgagatggtggtgctgacctgcgatacccctgaagaggacggcatcacctggacactggatcagtctagcgaggtgctcggcagcggcaagaccctgaccatccaagtgaaagagtttggcgacgccggccagtacacctgtcacaaaggcggagaagtgctgagccacagcctgctgctgctccacaagaaagaggatggcatttggagcaccgacatcctgaaggaccagaaagagcccaagaacaagaccttcctgagatgcgaggccaagaactacagcggcagattcacctgttggtggctgaccaccatcagcaccgacctgaccttcagcgtgaagtccagcagaggcagcagtgatcctcagggcgttacatgtggcgctgccacactgtctgccgaaagagtgcggggcgacaacaaagaatacgagtacagcgtggaatgccaagaggacagcgcctgtccagccgccgaagagtctctgcctatcgaagtgatggtggacgccgtgcacaagctgaagtacgagaactacacctccagctttttcatccgggacatcatcaagcccgatcctccaaagaatctccagctgaagcctctgaagaacagcagacaggtggaagtgtcctgggagtaccccgacacctggtctacaccccacagctacttcagcctgaccttttgcgtgcaagtgcagggcaagtccaagcgcgagaaaaaggaccgggtgttcaccgacaagaccagcgccaccgtgatctgccggaagaatgccagcatcagcgtcagagcccaggatcggtactacagcagctcttggagcgagtgggccagcgttccatgttctggtggcggaggatctggcggaggtggaagcggcggaggcggatcaagaaatctgcctgtggctacccctgatcctggcatgttcccttgtctgcaccacagccagaacctgctgagagccgtgtccaacatgctccagaaggccagacagacccttgagttctacccctgcaccagcgaggaaatcgaccacgaggacatcaccaaggataagaccagcaccgtggaagcctgcctgcctctggaactgaccaagaacgagagctgcctgaacagccgggaaaccagcttcatcaccaacggcagctgtctggcttccagaaagaccagctttatgatggccctgtgcctgagcagcatctacgaggacctgaagatgtaccaggtcgagttcaagaccatgaacgccaagctgctgatggaccccaagagacagattttcctggaccagaatatgctggccgtgatcgacgagctgatgcaggccctgaacttcaacagcgagacagtgccccagaagtctagcctggaagaacccgacttctacaagaccaagatcaagctgtgcatcctgctgcacgccttcagaatcagagccgtgaccatcgacagagtgatgagctacctgaacgccagcggctctaagatcgaagtgatgtaccctcctccttacctggacaacgagaagtccaacggcaccatcatccacgtgaagggcaagcacctgtgtccttctccactgttccccggacctagcaagcctttctgggtgctcgttgttgttggcggcgtgctggcctgttacagcctgctggttaccgtggccttcatcatcttttgggtccgaagcaagcggagc

SEQ ID NO: 975 - DNA, 4392 bp, synthetic construct
  source 1..4392: mol_type = other DNA
atggccttaccagtgaccgccttgctcctgccgctggccttgctgctccacgccgccaggccggaattcgacgtgacccagacacctcggaacagaatcaccaagaccggcaagcggatcatgctggaatgcagccagaccaagggccacgaccggatgtactggtacagacaggaccctggcctgggcctgagactgatctactacagcttcgacgtgaaggacatcaacaagggcgagatcagcgacggctacagcgtgtcaagacaggctcaggccaagttcagcctgtctctggaaagcgccattcctaaccagacagccctgtacttctgtgccacaagcggccagggcgcttacgaggaacagttctttggccctggcaccagactgacagttctcgaggacctgaagaacgtgttcccacctgaggtggccgtgttcgagcctagcgaggccgagatcagccacacccagaaagccaccctcgtgtgcctggctaccggcttctaccccgaccatgtggaactgtcttggtgggtcaacggcaaagaggtgcacagcggcgtgtctaccgacccccagccactgaaagaacagcccgccctgaacgacagccggtactgcctgagcagcagactgagagtgtccgccaccttctggcagaacccccggaaccacttcagatgccaggtgcagttctacggcctgagcgagaacgacgagtggacccaggacagagccaagcccgtgacccagatcgtgtctgccgaagcctggggcagagccgattgcggatcccagagcttcggcctgctggaccccaagctgtgctacctgctggatggcatcctgttcatctacggcgtgatcctgaccgccctgttcctgagagtgaagttcagcagaagcgccgacgcccctgcctaccagcagggacagaaccaactgtacaacgagctgaacctgggcagacgggaagagtacgacgtgctggacaagcggagaggcagggaccctgagatgggcggaaagccccagcggagaaagaacccccaggaaggactgtataacgaactccagaaagacaagatggccgaagcctacagcgagatcggcatgaagggcgagcggagaagaggcaagggccacgatggcctgtaccagggcctgagcaccgccaccaaggacacctatgacgccctgcacatgcaggccctgcctccaagaagggccaagcgatctggatctggagcaacaaacttctcactactcaaacaagcaggtgacgtggaggagaatcccgggcctactagtatggactggatttggcgcatccttttccttgtcggcgctgctaccggcgcgcattccttcgaaaagaaccaggtggaacagagccctcagagcctgattatcctggaaggcaagaactgcaccctccagtgcaactacaccgtgtctcccttcagcaacctgcggtggtacaagcaggatacaggcagaggccctgtgtctctgaccatcctgaccttcagcgagaacaccaagagcaacggcagatacaccgccacactggacgccgatacaaagcagagcagcctgcacatcacagccagccagctgagcgatagcgccagctacatctgtgtggtgtctggcggcacagacagctggggcaaactccagtttggagctggcacacaggtggtggtcacccctgatacgcgtatccagaaccctgatcctgccgtgtaccagctgcgggatagcaagagcagcgacaagagcgtgtgtctgttcaccgacttcgacagccagaccaacgtgtcccagagcaaggactccgacgtgtacatcaccgataagaccgtgctggacatgcggagcatggacttcaagagcaactccgccgtggcctggtccaacaagtccgatttcgcctgcgccaacgccttcaacaacagcattatccccgaggacacattcttcccaagccccgagagcagctgcggtacccagagttttgggttgttggaccctaaattgtgctatctgttggacggaatcctgttcatttacggagtgatcctgaccgcattgttcctgcgggttaagttttccagatccgcagacgcacccgcttaccaacaagggcagaaccaactctacaatgaacttaatttggggcggagggaagagtacgacgttctggacaaaaggaggggacgagatcccgagatgggcggaaagcctcagcgaaggaagaatccgcaagaggggctttataacgaactccagaaagataaaatggcagaagcctatagtgagattgggatgaagggagaaaggaggaggggtaaaggtcacgatgggttgtaccaaggattgagcacagccactaaagatacctatgatgcgctccacatgcaggccctgccgccaagacgcgccaagagaagcggatctggcgtgaagcagaccctgaatttcgacctgctgaagctggctggcgacgtggaatccaacccaggcccttctagaggccatatgtgtcaccagcagctggtcatcagctggttcagcctggtgttcctggcctctcctctggtggctatctgggagctgaagaaagacgtgtacgtggtggaactggactggtatcccgatgctcctggcgagatggtggtgctgacctgcgatacccctgaagaggacggcatcacctggacactggatcagtctagcgaggtgctcggcagcggcaagaccctgaccatccaagtgaaagagtttggcgacgccggccagtacacctgtcacaaaggcggagaagtgctgagccacagcctgctgctgctccacaagaaagaggatggcatttggagcaccgacatcctgaaggaccagaaagagcccaagaacaagaccttcctgagatgcgaggccaagaactacagcggcagattcacctgttggtggctgaccaccatcagcaccgacctgaccttcagcgtgaagtccagcagaggcagcagtgatcctcagggcgttacatgtggcgctgccacactgtctgccgaaagagtgcggggcgacaacaaagaatacgagtacagcgtggaatgccaagaggacagcgcctgtccagccgccgaagagtctctgcctatcgaagtgatggtggacgccgtgcacaagctgaagtacgagaactacacctccagctttttcatccgggacatcatcaagcccgatcctccaaagaatctccagctgaagcctctgaagaacagcagacaggtggaagtgtcctgggagtaccccgacacctggtctacaccccacagctacttcagcctgaccttttgcgtgcaagtgcagggcaagtccaagcgcgagaaaaaggaccgggtgttcaccgacaagaccagcgccaccgtgatctgccggaagaatgccagcatcagcgtcagagcccaggatcggtactacagcagctcttggagcgagtgggccagcgttccatgttctggtggcggaggatctggcggaggtggaagcggcggaggcggatcaagaaatctgcctgtggctacccctgatcctggcatgttcccttgtctgcaccacagccagaacctgctgagagccgtgtccaacatgctccagaaggccagacagacccttgagttctacccctgcaccagcgaggaaatcgaccacgaggacatcaccaaggataagaccagcaccgtggaagcctgcctgcctctggaactgaccaagaacgagagctgcctgaacagccgggaaaccagcttcatcaccaacggcagctgtctggcttccagaaagaccagctttatgatggccctgtgcctgagcagcatctacgaggacctgaagatgtaccaggtcgagttcaagaccatgaacgccaagctgctgatggaccccaagagacagattttcctggaccagaatatgctggccgtgatcgacgagctgatgcaggccctgaacttcaacagcgagacagtgccccagaagtctagcctggaagaacccgacttctacaagaccaagatcaagctgtgcatcctgctgcacgccttcagaatcagagccgtgaccatcgacagagtgatgagctacctgaacgccagcggctctaagatcgaagtgatgtaccctcctccttacctggacaacgagaagtccaacggcaccatcatccacgtgaagggcaagcacctgtgtccttctccactgttccccggacctagcaagcctttctgggtgctcgttgttgttggcggcgtgctggcctgttacagcctgctggttaccgtggccttcatcatcttttgggtccgaagcaagcggagc

SEQ ID NO: 976 - DNA, 4386 bp, synthetic construct
  source 1..4386: mol_type = other DNA
atggccttaccagtgaccgccttgctcctgccgctggccttgctgctccacgccgccaggccggaattcagcagatacctggtcaagcggaccggcgagaaggtgttcctggaatgcgtgcaggacatggaccacgaaaacatgttctggtacagacaggaccccggcctgggcctgagactgatctacttcagctacgacgtgaagatgaaggaaaagggcgacatccccgagggctacagcgtgtccagagagaagaaagagcggttcagcctgatcctggaaagcgccagcaccaaccagaccagcatgtacctgtgtgccagcagcctgtggggcagactggctaagaacatccagtatttcggagccggcaccagactgtctgttctcgagctcgaggacctgaagaacgtgttcccacctgaggtggccgtgttcgagcctagcgaggccgagatcagccacacccagaaagccaccctcgtgtgcctggctaccggcttctaccccgaccatgtggaactgtcttggtgggtcaacggcaaagaggtgcacagcggcgtgtctaccgacccccagccactgaaagaacagcccgccctgaacgacagccggtactgcctgagcagcagactgagagtgtccgccaccttctggcagaacccccggaaccacttcagatgccaggtgcagttctacggcctgagcgagaacgacgagtggacccaggacagagccaagcccgtgacccagatcgtgtctgccgaagcctggggcagagccgattgcggatcccagagcttcggcctgctggaccccaagctgtgctacctgctggatggcatcctgttcatctacggcgtgatcctgaccgccctgttcctgagagtgaagttcagcagaagcgccgacgcccctgcctaccagcagggacagaaccaactgtacaacgagctgaacctgggcagacgggaagagtacgacgtgctggacaagcggagaggcagggaccctgagatgggcggaaagccccagcggagaaagaacccccaggaaggactgtataacgaactccagaaagacaagatggccgaagcctacagcgagatcggcatgaagggcgagcggagaagaggcaagggccacgatggcctgtaccagggcctgagcaccgccaccaaggacacctatgacgccctgcacatgcaggccctgcctccaagaagggccaagcgatctggatctggagcaacaaacttctcactactcaaacaagcaggtgacgtggaggagaatcccgggcctactagtatggactggatttggcgcatccttttccttgtcggcgctgctaccggcgcgcattccttcgaagaggatcaagtgacccagtctcctgaggctctgaggctgcaagagggcgagagcagctctctgaactgctcctacacagtgtctggcctgaggggcctgttttggtataggcaagaccctggcaagggacccgagttcctgttcacactgtactctgccggcgaggaaaaagagaaagaacgcctgaaggccacgctgaccaagaaagagagcttcctgcacatcacagcccctaagcctgaggacagcgccacctatctgtgtgccgtgcaggccaatagaggcagcacactggggagactgtacttcggcagaggcacccagctgaccgtttggcctgatacgcgtatccagaaccctgatcctgccgtgtaccagctgcgggatagcaagagcagcgacaagagcgtgtgtctgttcaccgacttcgacagccagaccaacgtgtcccagagcaaggactccgacgtgtacatcaccgataagaccgtgctggacatgcggagcatggacttcaagagcaactccgccgtggcctggtccaacaagtccgatttcgcctgcgccaacgccttcaacaacagcattatccccgaggacacattcttcccaagccccgagagcagctgcggtacccagagttttgggttgttggaccctaaattgtgctatctgttggacggaatcctgttcatttacggagtgatcctgaccgcattgttcctgcgggttaagttttccagatccgcagacgcacccgcttaccaacaagggcagaaccaactctacaatgaacttaatttggggcggagggaagagtacgacgttctggacaaaaggaggggacgagatcccgagatgggcggaaagcctcagcgaaggaagaatccgcaagaggggctttataacgaactccagaaagataaaatggcagaagcctatagtgagattgggatgaagggagaaaggaggaggggtaaaggtcacgatgggttgtaccaaggattgagcacagccactaaagatacctatgatgcgctccacatgcaggccctgccgccaagacgcgccaagagaagcggatctggcgtgaagcagaccctgaatttcgacctgctgaagctggctggcgacgtggaatccaacccaggcccttctagaggccatatgtgtcaccagcagctggtcatcagctggttcagcctggtgttcctggcctctcctctggtggctatctgggagctgaagaaagacgtgtacgtggtggaactggactggtatcccgatgctcctggcgagatggtggtgctgacctgcgatacccctgaagaggacggcatcacctggacactggatcagtctagcgaggtgctcggcagcggcaagaccctgaccatccaagtgaaagagtttggcgacgccggccagtacacctgtcacaaaggcggagaagtgctgagccacagcctgctgctgctccacaagaaagaggatggcatttggagcaccgacatcctgaaggaccagaaagagcccaagaacaagaccttcctgagatgcgaggccaagaactacagcggcagattcacctgttggtggctgaccaccatcagcaccgacctgaccttcagcgtgaagtccagcagaggcagcagtgatcctcagggcgttacatgtggcgctgccacactgtctgccgaaagagtgcggggcgacaacaaagaatacgagtacagcgtggaatgccaagaggacagcgcctgtccagccgccgaagagtctctgcctatcgaagtgatggtggacgccgtgcacaagctgaagtacgagaactacacctccagctttttcatccgggacatcatcaagcccgatcctccaaagaatctccagctgaagcctctgaagaacagcagacaggtggaagtgtcctgggagtaccccgacacctggtctacaccccacagctacttcagcctgaccttttgcgtgcaagtgcagggcaagtccaagcgcgagaaaaaggaccgggtgttcaccgacaagaccagcgccaccgtgatctgccggaagaatgccagcatcagcgtcagagcccaggatcggtactacagcagctcttggagcgagtgggccagcgttccatgttctggtggcggaggatctggcggaggtggaagcggcggaggcggatcaagaaatctgcctgtggctacccctgatcctggcatgttcccttgtctgcaccacagccagaacctgctgagagccgtgtccaacatgctccagaaggccagacagacccttgagttctacccctgcaccagcgaggaaatcgaccacgaggacatcaccaaggataagaccagcaccgtggaagcctgcctgcctctggaactgaccaagaacgagagctgcctgaacagccgggaaaccagcttcatcaccaacggcagctgtctggcttccagaaagaccagctttatgatggccctgtgcctgagcagcatctacgaggacctgaagatgtaccaggtcgagttcaagaccatgaacgccaagctgctgatggaccccaagagacagattttcctggaccagaatatgctggccgtgatcgacgagctgatgcaggccctgaacttcaacagcgagacagtgccccagaagtctagcctggaagaacccgacttctacaagaccaagatcaagctgtgcatcctgctgcacgccttcagaatcagagccgtgaccatcgacagagtgatgagctacctgaacgccagcggctctaagatcgaagtgatgtaccctcctccttacctggacaacgagaagtccaacggcaccatcatccacgtgaagggcaagcacctgtgtccttctccactgttccccggacctagcaagcctttctgggtgctcgttgttgttggcggcgtgctggcctgttacagcctgctggttaccgtggccttcatcatcttttgggtccgaagcaagcggagc

SEQ ID NO: 977 - DNA, 4374 bp, synthetic construct
  source 1..4374: mol_type = other DNA
atggccttaccagtgaccgccttgctcctgccgctggccttgctgctccacgccgccaggccggaattcagcagatacctggtcaagcggaccggcgagaaggtgttcctggaatgcgtgcaggacatggaccacgaaaacatgttctggtacagacaggaccccggcctgggcctgagactgatctacttcagctacgacgtgaagatgaaggaaaagggcgacatccccgagggctacagcgtgtccagagagaagaaagagcggttcagcctgatcctggaaagcgccagcaccaaccagaccagcatgtacctgtgcgccagcagcttttggggcagaagcaccgacacacagtatttcggccctggcaccagactgacagttctcgaggacctgaagaacgtgttcccacctgaggtggccgtgttcgagcctagcgaggccgagatcagccacacccagaaagccaccctcgtgtgcctggctaccggcttctaccccgaccatgtggaactgtcttggtgggtcaacggcaaagaggtgcacagcggcgtgtctaccgacccccagccactgaaagaacagcccgccctgaacgacagccggtactgcctgagcagcagactgagagtgtccgccaccttctggcagaacccccggaaccacttcagatgccaggtgcagttctacggcctgagcgagaacgacgagtggacccaggacagagccaagcccgtgacccagatcgtgtctgccgaagcctggggcagagccgattgcggatcccagagcttcggcctgctggaccccaagctgtgctacctgctggatggcatcctgttcatctacggcgtgatcctgaccgccctgttcctgagagtgaagttcagcagaagcgccgacgcccctgcctaccagcagggacagaaccaactgtacaacgagctgaacctgggcagacgggaagagtacgacgtgctggacaagcggagaggcagggaccctgagatgggcggaaagccccagcggagaaagaacccccaggaaggactgtataacgaactccagaaagacaagatggccgaagcctacagcgagatcggcatgaagggcgagcggagaagaggcaagggccacgatggcctgtaccagggcctgagcaccgccaccaaggacacctatgacgccctgcacatgcaggccctgcctccaagaagggccaagcgatctggatctggagcaacaaacttctcactactcaaacaagcaggtgacgtggaggagaatcccgggcctactagtatggactggatttggcgcatccttttccttgtcggcgctgctaccggcgcgcattccttcgaaaagcaagaagtgacccagattcctgccgctctgtctgtgcctgagggcgagaatctggtgctgaactgctccttcaccgacagcgccatctacaacctccagtggttcaggcaggaccctggcaagggactgacaagcctgctgctgattcagagcagccagagagagcagaccagcggcagactgaatgccagcctggataagtccagcggaagaagcaccctgtatatcgccgcttctcagcctggcgatagcgccacatatctgtgtgccgtgcgggaaacaagcggctccaggctgacttttggcgagggcacacagctgaccgtgaatcccgatacgcgtatccagaaccctgatcctgccgtgtaccagctgcgggatagcaagagcagcgacaagagcgtgtgtctgttcaccgacttcgacagccagaccaacgtgtcccagagcaaggactccgacgtgtacatcaccgataagaccgtgctggacatgcggagcatggacttcaagagcaactccgccgtggcctggtccaacaagtccgatttcgcctgcgccaacgccttcaacaacagcattatccccgaggacacattcttcccaagccccgagagcagctgcggtacccagagttttgggttgttggaccctaaattgtgctatctgttggacggaatcctgttcatttacggagtgatcctgaccgcattgttcctgcgggttaagttttccagatccgcagacgcacccgcttaccaacaagggcagaaccaactctacaatgaacttaatttggggcggagggaagagtacgacgttctggacaaaaggaggggacgagatcccgagatgggcggaaagcctcagcgaaggaagaatccgcaagaggggctttataacgaactccagaaagataaaatggcagaagcctatagtgagattgggatgaagggagaaaggaggaggggtaaaggtcacgatgggttgtaccaaggattgagcacagccactaaagatacctatgatgcgctccacatgcaggccctgccgccaagacgcgccaagagaagcggatctggcgtgaagcagaccctgaatttcgacctgctgaagctggctggcgacgtggaatccaacccaggcccttctagaggccatatgtgtcaccagcagctggtcatcagctggttcagcctggtgttcctggcctctcctctggtggctatctgggagctgaagaaagacgtgtacgtggtggaactggactggtatcccgatgctcctggcgagatggtggtgctgacctgcgatacccctgaagaggacggcatcacctggacactggatcagtctagcgaggtgctcggcagcggcaagaccctgaccatccaagtgaaagagtttggcgacgccggccagtacacctgtcacaaaggcggagaagtgctgagccacagcctgctgctgctccacaagaaagaggatggcatttggagcaccgacatcctgaaggaccagaaagagcccaagaacaagaccttcctgagatgcgaggccaagaactacagcggcagattcacctgttggtggctgaccaccatcagcaccgacctgaccttcagcgtgaagtccagcagaggcagcagtgatcctcagggcgttacatgtggcgctgccacactgtctgccgaaagagtgcggggcgacaacaaagaatacgagtacagcgtggaatgccaagaggacagcgcctgtccagccgccgaagagtctctgcctatcgaagtgatggtggacgccgtgcacaagctgaagtacgagaactacacctccagctttttcatccgggacatcatcaagcccgatcctccaaagaatctccagctgaagcctctgaagaacagcagacaggtggaagtgtcctgggagtaccccgacacctggtctacaccccacagctacttcagcctgaccttttgcgtgcaagtgcagggcaagtccaagcgcgagaaaaaggaccgggtgttcaccgacaagaccagcgccaccgtgatctgccggaagaatgccagcatcagcgtcagagcccaggatcggtactacagcagctcttggagcgagtgggccagcgttccatgttctggtggcggaggatctggcggaggtggaagcggcggaggcggatcaagaaatctgcctgtggctacccctgatcctggcatgttcccttgtctgcaccacagccagaacctgctgagagccgtgtccaacatgctccagaaggccagacagacccttgagttctacccctgcaccagcgaggaaatcgaccacgaggacatcaccaaggataagaccagcaccgtggaagcctgcctgcctctggaactgaccaagaacgagagctgcctgaacagccgggaaaccagcttcatcaccaacggcagctgtctggcttccagaaagaccagctttatgatggccctgtgcctgagcagcatctacgaggacctgaagatgtaccaggtcgagttcaagaccatgaacgccaagctgctgatggaccccaagagacagattttcctggaccagaatatgctggccgtgatcgacgagctgatgcaggccctgaacttcaacagcgagacagtgccccagaagtctagcctggaagaacccgacttctacaagaccaagatcaagctgtgcatcctgctgcacgccttcagaatcagagccgtgaccatcgacagagtgatgagctacctgaacgccagcggctctaagatcgaagtgatgtaccctcctccttacctggacaacgagaagtccaacggcaccatcatccacgtgaagggcaagcacctgtgtccttctccactgttccccggacctagcaagcctttctgggtgctcgttgttgttggcggcgtgctggcctgttacagcctgctggttaccgtggccttcatcatcttttgggtccgaagcaagcggagc

SEQ ID NO: 978 - DNA, 4383 bp, synthetic construct
  source 1..4383: mol_type = other DNA
atggccttaccagtgaccgccttgctcctgccgctggccttgctgctccacgccgccaggccggaattcggcgtgacacagtctcccacacacctgattaagaccagaggccagcaagtgaccctgcggtgtagccctaagagcggccacgataccgtgtcctggtatcagcaggctctcggacagggaccccagttcatcttccagtattacgaggaagaggaacggcagcggggcaacttccccgatagattttccggccatcagttccccaactacagctccgagctgaacgtgaacgctctgctgctgggagatagcgccctgtacctgtgtgcctctagccttggctggcgcggaggcagatacaacgagcagttctttggccctggcaccagactgacagtgctcgaggacctgaagaacgtgttcccacctgaggtggccgtgttcgagcctagcgaggccgagatcagccacacccagaaagccaccctcgtgtgcctggctaccggcttctaccccgaccatgtggaactgtcttggtgggtcaacggcaaagaggtgcacagcggcgtgtctaccgacccccagccactgaaagaacagcccgccctgaacgacagccggtactgcctgagcagcagactgagagtgtccgccaccttctggcagaacccccggaaccacttcagatgccaggtgcagttctacggcctgagcgagaacgacgagtggacccaggacagagccaagcccgtgacccagatcgtgtctgccgaagcctggggcagagccgattgcggatcccagagcttcggcctgctggaccccaagctgtgctacctgctggatggcatcctgttcatctacggcgtgatcctgaccgccctgttcctgagagtgaagttcagcagaagcgccgacgcccctgcctaccagcagggacagaaccaactgtacaacgagctgaacctgggcagacgggaagagtacgacgtgctggacaagcggagaggcagggaccctgagatgggcggaaagccccagcggagaaagaacccccaggaaggactgtataacgaactccagaaagacaagatggccgaagcctacagcgagatcggcatgaagggcgagcggagaagaggcaagggccacgatggcctgtaccagggcctgagcaccgccaccaaggacacctatgacgccctgcacatgcaggccctgcctccaagaagggccaagcgatctggatctggagcaacaaacttctcactactcaaacaagcaggtgacgtggaggagaatcccgggcctactagtatggactggatttggcgcatccttttccttgtcggcgctgctaccggcgcgcattccttcgaacagaatatcgaccagcctacagagatgaccgccaccgaaggcgctatcgtgcagatcaactgcacctaccagaccagcggcttcaacggcctgttctggtatcaacagcacgccggcgaggcccctaccttcctgtcttacaatgtgctggacggcctggaagagaagggcagattcagcagcttcctgagcagaagcaagggctacagctacctgctgctgaaagaactccagatgaaggacagcgcctcctacctgtgcgcttccgtggacggcaacaacagactggccttcggcaagggcaatcaggtggtcgtgatccccaacacgcgtatccagaaccctgatcctgccgtgtaccagctgcgggatagcaagagcagcgacaagagcgtgtgtctgttcaccgacttcgacagccagaccaacgtgtcccagagcaaggactccgacgtgtacatcaccgataagaccgtgctggacatgcggagcatggacttcaagagcaactccgccgtggcctggtccaacaagtccgatttcgcctgcgccaacgccttcaacaacagcattatccccgaggacacattcttcccaagccccgagagcagctgcggtacccagagttttgggttgttggaccctaaattgtgctatctgttggacggaatcctgttcatttacggagtgatcctgaccgcattgttcctgcgggttaagttttccagatccgcagacgcacccgcttaccaacaagggcagaaccaactctacaatgaacttaatttggggcggagggaagagtacgacgttctggacaaaaggaggggacgagatcccgagatgggcggaaagcctcagcgaaggaagaatccgcaagaggggctttataacgaactccagaaagataaaatggcagaagcctatagtgagattgggatgaagggagaaaggaggaggggtaaaggtcacgatgggttgtaccaaggattgagcacagccactaaagatacctatgatgcgctccacatgcaggccctgccgccaagacgcgccaagagaagcggatctggcgtgaagcagaccctgaatttcgacctgctgaagctggctggcgacgtggaatccaacccaggcccttctagaggccatatgtgtcaccagcagctggtcatcagctggttcagcctggtgttcctggcctctcctctggtggctatctgggagctgaagaaagacgtgtacgtggtggaactggactggtatcccgatgctcctggcgagatggtggtgctgacctgcgatacccctgaagaggacggcatcacctggacactggatcagtctagcgaggtgctcggcagcggcaagaccctgaccatccaagtgaaagagtttggcgacgccggccagtacacctgtcacaaaggcggagaagtgctgagccacagcctgctgctgctccacaagaaagaggatggcatttggagcaccgacatcctgaaggaccagaaagagcccaagaacaagaccttcctgagatgcgaggccaagaactacagcggcagattcacctgttggtggctgaccaccatcagcaccgacctgaccttcagcgtgaagtccagcagaggcagcagtgatcctcagggcgttacatgtggcgctgccacactgtctgccgaaagagtgcggggcgacaacaaagaatacgagtacagcgtggaatgccaagaggacagcgcctgtccagccgccgaagagtctctgcctatcgaagtgatggtggacgccgtgcacaagctgaagtacgagaactacacctccagctttttcatccgggacatcatcaagcccgatcctccaaagaatctccagctgaagcctctgaagaacagcagacaggtggaagtgtcctgggagtaccccgacacctggtctacaccccacagctacttcagcctgaccttttgcgtgcaagtgcagggcaagtccaagcgcgagaaaaaggaccgggtgttcaccgacaagaccagcgccaccgtgatctgccggaagaatgccagcatcagcgtcagagcccaggatcggtactacagcagctcttggagcgagtgggccagcgttccatgttctggtggcggaggatctggcggaggtggaagcggcggaggcggatcaagaaatctgcctgtggctacccctgatcctggcatgttcccttgtctgcaccacagccagaacctgctgagagccgtgtccaacatgctccagaaggccagacagacccttgagttctacccctgcaccagcgaggaaatcgaccacgaggacatcaccaaggataagaccagcaccgtggaagcctgcctgcctctggaactgaccaagaacgagagctgcctgaacagccgggaaaccagcttcatcaccaacggcagctgtctggcttccagaaagaccagctttatgatggccctgtgcctgagcagcatctacgaggacctgaagatgtaccaggtcgagttcaagaccatgaacgccaagctgctgatggaccccaagagacagattttcctggaccagaatatgctggccgtgatcgacgagctgatgcaggccctgaacttcaacagcgagacagtgccccagaagtctagcctggaagaacccgacttctacaagaccaagatcaagctgtgcatcctgctgcacgccttcagaatcagagccgtgaccatcgacagagtgatgagctacctgaacgccagcggctctaagatcgaagtgatgtaccctcctccttacctggacaacgagaagtccaacggcaccatcatccacgtgaagggcaagcacctgtgtccttctccactgttccccggacctagcaagcctttctgggtgctcgttgttgttggcggcgtgctggcctgttacagcctgctggttaccgtggccttcatcatcttttgggtccgaagcaagcggagc

SEQ ID NO: 979 - DNA, 4308 bp, synthetic construct
  source 1..4308: mol_type = other DNA
atggccttaccagtgaccgccttgctcctgccgctggccttgctgctccacgccgccaggccgaatgctggcgtgacccagacacctaagttccaggtgctgaaaaccggccagagcatgaccctgcaatgcgcccaggacatgaaccatgagtacatgagctggtacagacaggaccccggcatgggcctgagactgatccactactctgtggctatccagaccaccgaccagggcgaagtgcccaatggctacaacgtgtccagaagcaccatcgaggacttcccactgagactgctgtctgccgctcctagccagaccagcgtgtacttttgtgccagcagctacctgggcaacaccggcgagctgttttttggcgagggcagcagactgaccgtgctcgaggacaagcagctggacgccgacgtgtcccccaagcctaccatcttcctgccctctatcgccgagacaaagctccagaaggccggcacctacctgtgcctgctggaaaagttcttcccagatgtgattaagatccactggcaggaaaagaagtccaacaccatcctgggcagccaggaaggcaacaccatgaagaccaacgacacctacatgaagttcagctggctgaccgtgcccgagaagtccctggacaaagaacacagatgcatcgtgcggcacgaaaacaacaagaacggcgtggaccaggaaatcatcttcccacccatcaagaccgatgtgattacaggatcccagagcttcggcctgctggaccccaagctgtgctacctgctggatggcatcctgttcatctacggcgtgatcctgaccgccctgttcctgagagtgaagttcagcagaagcgccgacgcccctgcctaccagcagggacagaaccaactgtacaacgagctgaacctgggcagacgggaagagtacgacgtgctggacaagcggagaggcagggaccctgagatgggcggaaagccccggagaaagaacccccaggaaggactgtataacgaactccagaaagacaagatggccgaagcctacagcgagatcggcatgaagggcgagcggagaagaggcaagggccacgatggcctgtaccagggcctgagcaccgccaccaaggacacctatgacgccctgcacatgcaggccctgcctccaagaagggccaagcgatctggatctggagcaacaaacttctcactactcaaacaagcaggtgacgtggaggagaatcccgggcctactagtatggactggatttggcgcatccttttccttgtcggcgctgctaccggcgcgcattccttcgaacaagaagtgacacagatccctgccgctctgtctgtgcctgagggcgaaaacctggtgctgaactgctccttcaccgacagcgccatctacaacctccagtggttcaggcaggaccctggaaagggactgacaagcctgctgctgatccagagcagccagagagagcagacctccggcagactgaatgccagcctggataagagcagcggcaggtctaccctgtatatcgccgcttctcagcctggcgatagcgccacatatctgtgtgctgtgcggcctacaagcggcggcagctacatccctacatttggcagaggcaccagcctgatcgtgcacccttatacgcgtagccagcctcacaccaagcccagcgtgttcgtgatgaagaacggcaccaacgtggcctgcctcgtgaaagagttctaccccaaggacatcaggatcaacctggtgtccagcaagaagatcaccgagttcgaccccgccatcgtgatctcccccagcggcaagtacaacgccgtgaagctggggaagtacgaggacagcaacagcgtgacctgctccgtgcagcacgacaacaagaccgtgcacagcaccgactttggtacccagagttttgggttgttggaccctaaattgtgctatctgttggacggaatcctgttcatttacggagtgatcctgaccgcattgttcctgcgggttaagttttccagatccgcagacgcacccgcttaccaacaagggcagaaccaactctacaatgaacttaatttggggcggagggaagagtacgacgttctggacaaaaggaggggacgagatcccgagatgggcggaaagcctcgaaggaagaatccgcaagaggggctttataacgaactccagaaagataaaatggcagaagcctatagtgagattgggatgaagggagaaaggaggaggggtaaaggtcacgatgggttgtaccaaggattgagcacagccactaaagatacctatgatgcgctccacatgcaggccctgccgccaagacgcgccaagagaagcggatctggcgtgaagcagaccctgaatttcgacctgctgaagctggctggcgacgtggaatccaacccaggcccttctagaggccatatgtgtcaccagcagctggtcatcagctggttcagcctggtgttcctggcctctcctctggtggctatctgggagctgaagaaagacgtgtacgtggtggaactggactggtatcccgatgctcctggcgagatggtggtgctgacctgcgatacccctgaagaggacggcatcacctggacactggatcagtctagcgaggtgctcggcagcggcaagaccctgaccatccaagtgaaagagtttggcgacgccggccagtacacctgtcacaaaggcggagaagtgctgagccacagcctgctgctgctccacaagaaagaggatggcatttggagcaccgacatcctgaaggaccagaaagagcccaagaacaagaccttcctgagatgcgaggccaagaactacagcggcagattcacctgttggtggctgaccaccatcagcaccgacctgaccttcagcgtgaagtccagcagaggcagcagtgatcctcagggcgttacatgtggcgctgccacactgtctgccgaaagagtgcggggcgacaacaaagaatacgagtacagcgtggaatgccaagaggacagcgcctgtccagccgccgaagagtctctgcctatcgaagtgatggtggacgccgtgcacaagctgaagtacgagaactacacctccagctttttcatccgggacatcatcaagcccgatcctccaaagaatctccagctgaagcctctgaagaacagcagacaggtggaagtgtcctgggagtaccccgacacctggtctacaccccacagctacttcagcctgaccttttgcgtgcaagtgcagggcaagtccaagcgcgagaaaaaggaccgggtgttcaccgacaagaccagcgccaccgtgatctgccggaagaatgccagcatcagcgtcagagcccaggatcggtactacagcagctcttggagcgagtgggccagcgttccatgttctggtggcggaggatctggcggaggtggaagcggcggaggcggatcaagaaatctgcctgtggctacccctgatcctggcatgttcccttgtctgcaccacagccagaacctgctgagagccgtgtccaacatgctccagaaggccagacagacccttgagttctacccctgcaccagcgaggaaatcgaccacgaggacatcaccaaggataagaccagcaccgtggaagcctgcctgcctctggaactgaccaagaacgagagctgcctgaacagccgggaaaccagcttcatcaccaacggcagctgtctggcttccagaaagaccagctttatgatggccctgtgcctgagcagcatctacgaggacctgaagatgtaccaggtcgagttcaagaccatgaacgccaagctgctgatggaccccaagagacagattttcctggaccagaatatgctggccgtgatcgacgagctgatgcaggccctgaacttcaacagcgagacagtgccccagaagtctagcctggaagaacccgacttctacaagaccaagatcaagctgtgcatcctgctgcacgccttcagaatcagagccgtgaccatcgacagagtgatgagctacctgaacgccagcggctctaagatcgaagtgatgtaccctcctccttacctggacaacgagaagtccaacggcaccatcatccacgtgaagggcaagcacctgtgtccttctccactgttccccggacctagcaagcctttctgggtgctcgttgttgttggcggcgtgctggcctgttacagcctgctggttaccgtggccttcatcatcttttgggtccgaagcaagcggagc

SEQ ID NO: 980 - DNA, 4335 bp, synthetic construct
  source 1..4335: mol_type = other DNA
atggccttaccagtgaccgccttgctcctgccgctggccttgctgctccacgccgccaggccggacatccagatgacacagagccctagcagcctgtctgccagcgtgggagacagagtgaccatcacatgcaaggccagcgaccacatcaacaactggctggcctggtatcagcagaagcctggacaggcccctaagctgctgatctacggcgctaccacactggaaacaggcgtgcccagcagattttctggcagcggctctggcaccgactacaccctgacaatatccagcctccagcctgaggacttcgccacctactactgtcagcagagctggaacaccccttggacattcggccagggcaccaagctggaaatcaagagaggacagcctaaggccaatcctaccgtgacactgttccctccaagcagcgaagaactccaggccaacaaggccacacttgtgtgcctgatctccgacttctaccctggggctgtgacagtggcttggaaggccgatggatctcctgtgaaagccggcgtggaaaccaccaagccatccaagcagagcaacaacaaatacgccgccagctcctacctgagcctgacacctgagcagtggaagtcccacagatcctacagctgccaagtgacccacgaaggcagcaccgtggaaaagacagtggcccctacagagtgcagcggatcccagagcttcggcctgctggaccccaagctgtgctacctgctggatggcatcctgttcatctacggcgtgatcctgaccgccctgttcctgagagtgaagttcagcagaagcgccgacgcccctgcctaccagcagggacagaaccaactgtacaacgagctgaacctgggcagacgggaagagtacgacgtgctggacaagcggagaggcagggaccctgagatgggcggaaagccccggagaaagaacccccaggaaggactgtataacgaactccagaaagacaagatggccgaagcctacagcgagatcggcatgaagggcgagcggagaagaggcaagggccacgatggcctgtaccagggcctgagcaccgccaccaaggacacctatgacgccctgcacatgcaggccctgcctccaagaagggccaagcgatctggatctggagcaacaaacttctcactactcaaacaagcaggtgacgtggaggagaatcccgggcctactagtatggactggatttggcgcatccttttccttgtcggcgctgctaccggcgcgcattccttcgaacaagttcagcttcaacagcctggcgctgagctggtcaaacctggcgcttctgtgaagatgagctgcaaagccagcggctacgccttcagcagctactggatcaactggatgaagcagaaacccggccagggactcgaatggatcggccaaatctatcccggcgacggcgacaccaactacaacggcaagttcaagggcagagccacactgaccgccgatacctctagcagcacagcctacatgcagctgagcagcctgaccagcgaagatagcgccgtgtacttctgtgcccggtccatcacaacagtcgtgggctgcgctatggactattggggccagggaacaagcgtgaccgtgtctagtgcctctacaaagggaccctccgtgtttcctctggctcccagcagcaagtctacaagcggaggaacagccgctctgggctgcctggtcaaggattactttcccgagcctgtgaccgtgtcctggaatagcggagcactgacaagcggcgtgcacacctttccagccgtgctgcaaagcagcggcctgtactctctgagcagcgtggtcacagtgcctagctctagcctgggcacccagacctacatctgcaatgtgaaccacaagcctagcaacaccaaggtggacaagagagtggaacccaagagctgtggtacccagagttttgggttgttggaccctaaattgtgctatctgttggacggaatcctgttcatttacggagtgatcctgaccgcattgttcctgcgggttaagttttccagatccgcagacgcacccgcttaccaacaagggcagaaccaactctacaatgaacttaatttggggcggagggaagagtacgacgttctggacaaaaggaggggacgagatcccgagatgggcggaaagcctcgaaggaagaatccgcaagaggggctttataacgaactccagaaagataaaatggcagaagcctatagtgagattgggatgaagggagaaaggaggaggggtaaaggtcacgatgggttgtaccaaggattgagcacagccactaaagatacctatgatgcgctccacatgcaggccctgccgccaagacgcgccaagagaagcggatctggcgtgaagcagaccctgaatttcgacctgctgaagctggctggcgacgtggaatccaacccaggcccttctagaggccatatgtgtcaccagcagctggtcatcagctggttcagcctggtgttcctggcctctcctctggtggctatctgggagctgaagaaagacgtgtacgtggtggaactggactggtatcccgatgctcctggcgagatggtggtgctgacctgcgatacccctgaagaggacggcatcacctggacactggatcagtctagcgaggtgctcggcagcggcaagaccctgaccatccaagtgaaagagtttggcgacgccggccagtacacctgtcacaaaggcggagaagtgctgagccacagcctgctgctgctccacaagaaagaggatggcatttggagcaccgacatcctgaaggaccagaaagagcccaagaacaagaccttcctgagatgcgaggccaagaactacagcggcagattcacctgttggtggctgaccaccatcagcaccgacctgaccttcagcgtgaagtccagcagaggcagcagtgatcctcagggcgttacatgtggcgctgccacactgtctgccgaaagagtgcggggcgacaacaaagaatacgagtacagcgtggaatgccaagaggacagcgcctgtccagccgccgaagagtctctgcctatcgaagtgatggtggacgccgtgcacaagctgaagtacgagaactacacctccagctttttcatccgggacatcatcaagcccgatcctccaaagaatctccagctgaagcctctgaagaacagcagacaggtggaagtgtcctgggagtaccccgacacctggtctacaccccacagctacttcagcctgaccttttgcgtgcaagtgcagggcaagtccaagcgcgagaaaaaggaccgggtgttcaccgacaagaccagcgccaccgtgatctgccggaagaatgccagcatcagcgtcagagcccaggatcggtactacagcagctcttggagcgagtgggccagcgttccatgttctggtggcggaggatctggcggaggtggaagcggcggaggcggatcaagaaatctgcctgtggctacccctgatcctggcatgttcccttgtctgcaccacagccagaacctgctgagagccgtgtccaacatgctccagaaggccagacagacccttgagttctacccctgcaccagcgaggaaatcgaccacgaggacatcaccaaggataagaccagcaccgtggaagcctgcctgcctctggaactgaccaagaacgagagctgcctgaacagccgggaaaccagcttcatcaccaacggcagctgtctggcttccagaaagaccagctttatgatggccctgtgcctgagcagcatctacgaggacctgaagatgtaccaggtcgagttcaagaccatgaacgccaagctgctgatggaccccaagagacagattttcctggaccagaatatgctggccgtgatcgacgagctgatgcaggccctgaacttcaacagcgagacagtgccccagaagtctagcctggaagaacccgacttctacaagaccaagatcaagctgtgcatcctgctgcacgccttcagaatcagagccgtgaccatcgacagagtgatgagctacctgaacgccagcggctctaagatcgaagtgatgtaccctcctccttacctggacaacgagaagtccaacggcaccatcatccacgtgaagggcaagcacctgtgtccttctccactgttccccggacctagcaagcctttctgggtgctcgttgttgttggcggcgtgctggcctgttacagcctgctggttaccgtggccttcatcatcttttgggtccgaagcaagcggagc

SEQ ID NO: 981 - DNA, 2250 bp, synthetic construct
  source 1..2250: mol_type = other DNA
atggccttaccagtgaccgccttgctcctgccgctggccttgctgctccacgccgccaggccggacatccagatgacacagagccctagcagcctgtctgccagcgtgggagacagagtgaccatcacctgtagagccagccaggacatcagcagctacctgaactggtatcagcagaagcccggcaaggcccctaagctgctgatctactacaccagcagactgcacagcggcgtgcccagcagattttctggctctggcagcggcaccgacttcaccctgacaatatctagcctccagcctgaggacttcgccacctactattgccagcagggcaacaccctgccttacacatttggacagggcaccaaggtggaaatcaagagactcgaggacctgaagaacgtgttcccacctgaggtggccgtgttcgagcctagcgaggccgagatcagccacacccagaaagccaccctcgtgtgcctggctaccggcttctaccccgaccatgtggaactgtcttggtgggtcaacggcaaagaggtgcacagcggcgtgtgtaccgacccccagccactgaaagaacagcccgccctgaacgacagccggtactgcctgagcagcagactgagagtgtccgccaccttctggcagaacccccggaaccacttcagatgccaggtgcagttctacggcctgagcgagaacgacgagtggacccaggacagagccaagcccgtgacccagatcgtgtctgccgaagcctggggcagagccgattgcggctttaccagcgagagctaccagcagggcgtgctgagcgccaccatcctgtacgagatcctgctgggcaaggccaccctgtacgccgtgctggtgtctgccctggtgctgatggctatggtcaagcggaaggacagccggggaagggccaagcgatctggatctggagcaacaaacttctcactactcaaacaagcaggtgacgtggaggagaatcccgggcctactagtgccaccatggactggatttggcgcatccttttccttgtcggcgctgctaccggcgcccattccgggcccgaggtgcagctggttgaatctggcggaggactggttcagcctggcggatctctgagactgtcttgtgctgcttctggcggcgattggagcgccaacttcatgtactggtacagacaggcccctggcaagcagagagagctggtcgccagaatctctggcagaggcgtggtggactacgtggaaagcgtgaagggcagattcaccatcagccgggacaacagcaagaacaccctgtacctccagatgaacagcctgagagccgaggacaccgccgtgtactattgtgccgtggcctcttattggggccagggcacactggtcacagtgtctagtggatccggcggcggaggatctggcggaggcggatctgggggcggaggctctttcgaagtgcagctggttgaatcaggtggcggcctggttcaacctggcggatctctgagactgagctgtgccgccagcggctacaccttcagcgactactttatgagctgggtccgacaggcccctggcaaaggacttgaatgggtcgccaccatcagcaatggcggcacctacacttactaccccgacagcgtgaagggcagattcaccatctccagagacaacagcaagaacaccctgtacctccagatgaactccctgagagccgaggacaccgccgtgtactactgcgccagattcgacggctacatcttcgactattggggccagggcaccctggtcacagtctcttctacgcgtatccagaaccctgatcctgccgtgtaccagctgcgggatagcaagagcagcgacaagagcgtgtgtctgttcaccgacttcgacagccagaccaacgtgtcccagagcaaggactccgacgtgtacatcaccgataagtgcgtgctggacatgcggagcatggacttcaagagcaactccgccgtggcctggtccaacaagtccgatttcgcctgcgccaacgccttcaacaacagcattatccccgaggacacattcttcccaagccccgagagcagctgcgacgtgaagctggtggaaaagagcttcgagacagacaccaacctgaacttccagaacctgagcgtgatcggcttcagaatcctgctgctgaaagtggccggctttaacctgctgatgaccctgcggctgtggtccagctaa

SEQ ID NO: 982 - DNA, 2034 bp, synthetic construct
  source 1..2034: mol_type = other DNA
atggccttaccagtgaccgccttgctcctgccgctggccttgctgctccacgccgccaggccggacatccagatgacacagagccctagcagcctgtctgccagcgtgggagacagagtgaccatcacatgcaaggccagcgaccacatcaacaactggctggcctggtatcagcagaagcctggacaggcccctaagctgctgatctacggcgctaccacactggaaacaggcgtgcccagcagattttctggcagcggctctggcaccgactacaccctgacaatatccagcctccagcctgaggacttcgccacctactactgtcagcagagctggaacaccccttggacattcggccagggcaccaagctggaaatcaagagactcgaggacctgaagaacgtgttcccacctgaggtggccgtgttcgagcctagcgaggccgagatcagccacacccagaaagccaccctcgtgtgcctggctaccggcttctaccccgaccatgtggaactgtcttggtgggtcaacggcaaagaggtgcacagcggcgtgtctaccgacccccagccactgaaagaacagcccgccctgaacgacagccggtactgcctgagcagcagactgagagtgtccgccaccttctggcagaacccccggaaccacttcagatgccaggtgcagttctacggcctgagcgagaacgacgagtggacccaggacagagccaagcccgtgacccagatcgtgtctgccgaagcctggggcagagccgattgcggatccctgggagagcctcagctgtgctatatcctggacgccatcctgtttctgtacggcatcgtgctgaccctgctgtactgccggctgaagatccaagtgcggaaggccgccatcaccagctacgagaaatccgacggcgtgtacaccggcctgagcaccagaaatcaagagacatacgagacactgaagcacgaaaagcctccacaaagggccaagcgatctggatctggagcaacaaacttctcactactcaaacaagcaggtgacgtggaggagaatcccgggcctactagtatggactggatttggcgcatccttttccttgtcggcgctgctaccggcgcgcattccttcgaacaagttcagcttcaacagcctggcgctgagctggtcaaacctggcgcttctgtgaagatgagctgcaaagccagcggctacgccttcagcagctactggatcaactggatgaagcagaaacccggccagggactcgaatggatcggccaaatctatcccggcgacggcgacaccaactacaacggcaagttcaagggcagagccacactgaccgccgatacctctagcagcacagcctacatgcagctgagcagcctgaccagcgaagatagcgccgtgtacttctgtgcccggtccatcacaacagtcgtgggctgcgctatggactattggggccagggaacaagcgtgaccgtgtctagtacgcgtgcctctacaaagggaccctccgtgtttcctctggctcccagcagcaagtctacaagcggaggaacagccgctctgggctgcctggtcaaggattactttcccgagcctgtgaccgtgtcctggaatagcggagcactgacaagcggcgtgcacacctttccagccgtgctgcaaagcagcggcctgtactctctgagcagcgtggtcacagtgcctagctctagcctgggcacccagacctacatctgcaatgtgaaccacaagcctagcaacaccaaggtggacaagagagtggaacccaagagctgtggtaccctcggagaaccacagctctgttacattctggatgctatcctgttcctctatgggatcgtcctgacactcctgtattgcagactcaaaattcaagttcgcaaagccgccattacctcttacgagaagagtgatggggtgtacacaggactgtctacccggaatcaagaaacctacgaaaccctcaaacatgagaagccacctcagtaa

SEQ ID NO: 983 - DNA, 2256 bp, synthetic construct
  source 1..2256: mol_type = other DNA
atggccttaccagtgaccgccttgctcctgccgctggccttgctgctccacgccgccaggccggaattcaatgctggcgtgacccagacacctaagttccaggtgctgaaaaccggccagagcatgaccctgcaatgcgcccaggacatgaaccatgagtacatgagctggtacagacaggaccccggcatgggcctgagactgatccactactctgtggctatccagaccaccgaccagggcgaagtgcccaatggctacaacgtgtccagaagcaccatcgaggacttcccactgagactgctgtctgccgctcctagccagaccagcgtgtacttttgtgccagcagctacctgggcaacaccggcgagctgttttttggcgagggcagcagactgaccgtgctcgaggacctgaagaacgtgttcccacctgaggtggccgtgttcgagcctagcgaggccgagatcagccacacccagaaagccaccctcgtgtgcctggctaccggcttctaccccgaccatgtggaactgtcttggtgggtcaacggcaaagaggtgcacagcggcgtgtctaccgacccccagccactgaaagaacagcccgccctgaacgacagccggtactgcctgagcagcagactgagagtgtccgccaccttctggcagaacccccggaaccacttcagatgccaggtgcagttctacggcctgagcgagaacgacgagtggacccaggacagagccaagcccgtgacccagatcgtgtctgccgaagcctggggcagagccgattgcggatcccagagcttcggcctgctggaccccaagctgtgctacctgctggatggcatcctgttcatctacggcgtgatcctgaccgccctgttcctgagagtgaagttcagcagaagcgccgacgcccctgcctaccagcagggacagaaccaactgtacaacgagctgaacctgggcagacgggaagagtacgacgtgctggacaagcggagaggcagggaccctgagatgggcggaaagccccagcggagaaagaacccccaggaaggactgtataacgaactccagaaagacaagatggccgaagcctacagcgagatcggcatgaagggcgagcggagaagaggcaagggccacgatggcctgtaccagggcctgagcaccgccaccaaggacacctatgacgccctgcacatgcaggccctgcctccaagaagggccaagcgatctggatctggagcaacaaacttctcactactcaaacaagcaggtgacgtggaggagaatcccgggcctactagtatggactggatttggcgcatccttttccttgtcggcgctgctaccggcgcgcattccttcgaacaagaagtgacacagatccctgccgctctgtctgtgcctgagggcgaaaacctggtgctgaactgctccttcaccgacagcgccatctacaacctccagtggttcaggcaggaccctggaaagggactgacaagcctgctgctgatccagagcagccagagagagcagacctccggcagactgaatgccagcctggataagagcagcggcaggtctaccctgtatatcgccgcttctcagcctggcgatagcgccacatatctgtgtgctgtgcggcctacaagcggcggcagctacatccctacatttggcagaggcaccagcctgatcgtgcacccttatacgcgtgcctctacaaagggaccctccgtgtttcctctggctcccagcagcaagtctacaagcggaggaacagccgctctgggctgcctggtcaaggattactttcccgagcctgtgaccgtgtcctggaatagcggagcactgacaagcggcgtgcacacctttccagccgtgctgcaaagcagcggcctgtactctctgagcagcgtggtcacagtgcctagctctagcctgggcacccagacctacatctgcaatgtgaaccacaagcctagcaacaccaaggtggacaagagagtggaacccaagagctgtggtaccctcggagaaccacagctctgttacattctggatgctatcctgttcctctatgggatcgtcctgacactcctgtattgcagactcaaaattcaagttcgcaaagccgccattacctcttacgagaagagtgatggggtgtacacaggactgtctacccggaatcaagaaacctacgaaaccctcaaacatgagaagccacctcagtaa

SEQ ID NO: 984 - DNA, 3540 bp, synthetic construct
  source 1..3540: mol_type = other DNA
atgggacccagactgctgttttgggctctgctgtgtctgctcggcacaggacctgttgaagctggcgtgacacagagccccacacacctgattaagaccagaggccagcaggccacactgagatgcagccctatcagcggccacaccagcgtgtactggtatcagcaggctctcggactgggcctccagttcctgctttggtacgacgagggcgaagagagaaaccggggcaacttccctcctcggttttccggcagacagttccccaactacagcagcgagctgaacgtgaacgccctggaactggaagatagcgccctgtacctgtgtgcctcttctcttggtggacctcgcggactggctggactgagaggggatgagcagtttttcggccctggcaccagactgaccgtgctggaaggtaccggcggaggcggatctggcggcggagaattcaatgctggcgtgacccagacacctaagttccaggtgctgaaaaccggccagagcatgaccctgcaatgcgcccaggacatgaaccatgagtacatgagctggtacagacaggaccccggcatgggcctgagactgatccactactctgtggctatccagaccaccgaccagggcgaagtgcccaatggctacaacgtgtccagaagcaccatcgaggacttcccactgagactgctgtctgccgctcctagccagaccagcgtgtacttttgtgccagcagctacctgggcaacaccggcgagctgttttttggcgagggcagcagactgaccgtgctcgaggacctgaagaacgtgttcccacctgaggtggccgtgttcgagcctagcgaggccgagatcagccacacccagaaagccaccctcgtgtgcctggctaccggcttctaccccgaccatgtggaactgtcttggtgggtcaacggcaaagaggtgcacagcggcgtgtctaccgacccccagccactgaaagaacagcccgccctgaacgacagccggtactgcctgagcagcagactgagagtgtccgccaccttctggcagaacccccggaaccacttcagatgccaggtgcagttctacggcctgagcgagaacgacgagtggacccaggacagagccaagcccgtgacccagatcgtgtctgccgaagcctggggcagagccgattgcggatcccagagcttcggcctgctggaccccaagctgtgctacctgctggatggcatcctgttcatctacggcgtgatcctgaccgccctgttcctgagagtgaagttcagcagaagcgccgacgcccctgcctaccagcagggacagaaccaactgtacaacgagctgaacctgggcagacgggaagagtacgacgtgctggacaagcggagaggcagggaccctgagatgggcggaaagccccagcggagaaagaacccccaggaaggactgtataacgaactccagaaagacaagatggccgaagcctacagcgagatcggcatgaagggcgagcggagaagaggcaagggccacgatggcctgtaccagggcctgagcaccgccaccaaggacacctatgacgccctgcacatgcaggccctgcctccaagaagggccaagcgatctggatctggagcaacaaacttctcactactcaaacaagcaggtgacgtggaggagaatcccgggcctactagtatggactggatttggcgcatccttttccttgtcggcgctgctaccggcgcgcattccttcgaacaagaagtgacacagatccctgccgctctgtctgtgcctgagggcgaaaacctggtgctgaactgctccttcaccgacagcgccatctacaacctccagtggttcaggcaggaccctggaaagggactgacaagcctgctgctgatccagagcagccagagagagcagacctccggcagactgaatgccagcctggataagagcagcggcaggtctaccctgtatatcgccgcttctcagcctggcgatagcgccacatatctgtgtgctgtgcggcctacaagcggcggcagctacatccctacatttggcagaggcaccagcctgatcgtgcacccttatacgcgtatccagaaccctgatcctgccgtgtaccagctgcgggatagcaagagcagcgacaagagcgtgtgtctgttcaccgacttcgacagccagaccaacgtgtcccagagcaaggactccgacgtgtacatcaccgataagaccgtgctggacatgcggagcatggacttcaagagcaactccgccgtggcctggtccaacaagtccgatttcgcctgcgccaacgccttcaacaacagcattatccccgaggacacattcttcccaagccccgagagcagctgcggtacccagagttttgggttgttggaccctaaattgtgctatctgttggacggaatcctgttcatttacggagtgatcctgaccgcattgttcctgcgggttaagttttccagatccgcagacgcacccgcttaccaacaagggcagaaccaactctacaatgaacttaatttggggcggagggaagagtacgacgttctggacaaaaggaggggacgagatcccgagatgggcggaaagcctcagcgaaggaagaatccgcaagaggggctttataacgaactccagaaagataaaatggcagaagcctatagtgagattgggatgaagggagaaaggaggaggggtaaaggtcacgatgggttgtaccaaggattgagcacagccactaaagatacctatgatgcgctccacatgcaggccctgccgccaagacgcgccaagagaagcggatctggcgtgaagcagaccctgaatttcgacctgctgaagctggctggcgacgtggaatccaacccaggcccttctagaggccatatgaccgagtacaagcccacggtgcgcctcgccacccgcgacgacgtccccagggccgtacgcaccctcgccgccgcgttcgccgactaccccgccacgcgccacaccgtcgatccggaccgccacatcgagcgggtcaccgagctgcaagaactcttcctcacgcgcgtcgggctcgacatcggcaaggtgtgggtcgcggacgacggcgccgcggtggcggtctggaccacgccggagagcgtcgaagcgggggcggtgttcgccgagatcggcccgcgcatggccgagttgagcggttcccggctggccgcgcagcaacagatggaaggcctcctggcgccgcaccggcccaaggagcccgcgtggttcctggccaccgtcggcgtctcgcccgaccaccagggcaagggtctgggcagcgccgtcgtgctccccggagtggaggcggccgagcgcgccggggtgcccgccttcctggagacctccgcgccccgcaacctccccttctacgagcggctcggcttcaccgtcaccgccgacgtcgaggtgcccgaaggaccgcgcacctggtgcatgacccgcaagcccggtgcctga

SEQ ID NO: 985 - DNA, 3537 bp, synthetic construct
  source 1..3537: mol_type = other DNA
atgggacccagactgctgttttgggctctgctgtgtctgctcggcacaggacctgttgaagctggcgtgacacagagccccacacacctgattaagaccagaggccagcaggccacactgagatgcagccctatcagcggccacaccagcgtgtactggtatcagcaggctctcggactgggcctccagttcctgctttggtacgacgagggcgaagagagaaaccggggcaacttccctcctcggttttccggcagacagttccccaactacagcagcgagctgaacgtgaacgccctggaactggaagatagcgccctgtacctgtgtgccagctctctcggcggagatgaactgggagccgatggcaacgagcagttctttggccctggcaccagactgaccgtgctggaaggtaccggcggaggcggatctggcggcggaagcgaattcaatgctggcgtgacccagacacctaagttccaggtgctgaaaaccggccagagcatgaccctgcaatgcgcccaggacatgaaccatgagtacatgagctggtacagacaggaccccggcatgggcctgagactgatccactactctgtggctatccagaccaccgaccagggcgaagtgcccaatggctacaacgtgtccagaagcaccatcgaggacttcccactgagactgctgtctgccgctcctagccagaccagcgtgtacttttgtgccagcagctacctgggcaacaccggcgagctgttttttggcgagggcagcagactgaccgtgctcgaggacctgaagaacgtgttcccacctgaggtggccgtgttcgagcctagcgaggccgagatcagccacacccagaaagccaccctcgtgtgcctggctaccggcttctaccccgaccatgtggaactgtcttggtgggtcaacggcaaagaggtgcacagcggcgtgtctaccgacccccagccactgaaagaacagcccgccctgaacgacagccggtactgcctgagcagcagactgagagtgtccgccaccttctggcagaacccccggaaccacttcagatgccaggtgcagttctacggcctgagcgagaacgacgagtggacccaggacagagccaagcccgtgacccagatcgtgtctgccgaagcctggggcagagccgattgcggatcccagagcttcggcctgctggaccccaagctgtgctacctgctggatggcatcctgttcatctacggcgtgatcctgaccgccctgttcctgagagtgaagttcagcagaagcgccgacgcccctgcctaccagcagggacagaaccaactgtacaacgagctgaacctgggcagacgggaagagtacgacgtgctggacaagcggagaggcagggaccctgagatgggcggaaagccccagcggagaaagaacccccaggaaggactgtataacgaactccagaaagacaagatggccgaagcctacagcgagatcggcatgaagggcgagcggagaagaggcaagggccacgatggcctgtaccagggcctgagcaccgccaccaaggacacctatgacgccctgcacatgcaggccctgcctccaagaagggccaagcgatctggatctggagcaacaaacttctcactactcaaacaagcaggtgacgtggaggagaatcccgggcctactagtatggactggatttggcgcatccttttccttgtcggcgctgctaccggcgcgcattccttcgaacaagaagtgacacagatccctgccgctctgtctgtgcctgagggcgaaaacctggtgctgaactgctccttcaccgacagcgccatctacaacctccagtggttcaggcaggaccctggaaagggactgacaagcctgctgctgatccagagcagccagagagagcagacctccggcagactgaatgccagcctggataagagcagcggcaggtctaccctgtatatcgccgcttctcagcctggcgatagcgccacatatctgtgtgctgtgcggcctacaagcggcggcagctacatccctacatttggcagaggcaccagcctgatcgtgcacccttatacgcgtatccagaaccctgatcctgccgtgtaccagctgcgggatagcaagagcagcgacaagagcgtgtgtctgttcaccgacttcgacagccagaccaacgtgtcccagagcaaggactccgacgtgtacatcaccgataagaccgtgctggacatgcggagcatggacttcaagagcaactccgccgtggcctggtccaacaagtccgatttcgcctgcgccaacgccttcaacaacagcattatccccgaggacacattcttcccaagccccgagagcagctgcggtacccagagttttgggttgttggaccctaaattgtgctatctgttggacggaatcctgttcatttacggagtgatcctgaccgcattgttcctgcgggttaagttttccagatccgcagacgcacccgcttaccaacaagggcagaaccaactctacaatgaacttaatttggggcggagggaagagtacgacgttctggacaaaaggaggggacgagatcccgagatgggcggaaagcctcagcgaaggaagaatccgcaagaggggctttataacgaactccagaaagataaaatggcagaagcctatagtgagattgggatgaagggagaaaggaggaggggtaaaggtcacgatgggttgtaccaaggattgagcacagccactaaagatacctatgatgcgctccacatgcaggccctgccgccaagacgcgccaagagaagcggatctggcgtgaagcagaccctgaatttcgacctgctgaagctggctggcgacgtggaatccaacccaggcccttctagaggccatatgaccgagtacaagcccacggtgcgcctcgccacccgcgacgacgtccccagggccgtacgcaccctcgccgccgcgttcgccgactaccccgccacgcgccacaccgtcgatccggaccgccacatcgagcgggtcaccgagctgcaagaactcttcctcacgcgcgtcgggctcgacatcggcaaggtgtgggtcgcggacgacggcgccgcggtggcggtctggaccacgccggagagcgtcgaagcgggggcggtgttcgccgagatcggcccgcgcatggccgagttgagcggttcccggctggccgcgcagcaacagatggaaggcctcctggcgccgcaccggcccaaggagcccgcgtggttcctggccaccgtcggcgtctcgcccgaccaccagggcaagggtctgggcagcgccgtcgtgctccccggagtggaggcggccgagcgcgccggggtgcccgccttcctggagacctccgcgccccgcaacctccccttctacgagcggctcggcttcaccgtcaccgccgacgtcgaggtgcccgaaggaccgcgcacctggtgcatgacccgcaagcccggtgcctga

SEQ ID NO: 986 - DNA, 3567 bp, synthetic construct
  source 1..3567: mol_type = other DNA
atggccttaccagtgaccgccttgctcctgccgctggccttgctgctccacgccgccaggccggcatgcgaagtgcagctgcttgaaagtggcggcggactgattcagcctggcggatctctgagactgagctgtgccgccagcggcttcaccttttctagccacgccatgacctgggtccgacaggcacctggaaaagggcttgaatgggtgtccgccatcagcggctctggcgattacacacactacgccgacagcgtgaagggcagattcaccatcagcagagacaacagcaagaacaccgtgtacctccagatgaacagcctgagagccgaggacagcgccgtgtattattgcgccaaggatgaggatggcggcagcctgcttggacacagaggacaaggcaccctggtcaccgtttcttccggtaccggcggaggcggatctggcggcggaggtagcggtggcggaggatctgaattcaatgctggcgtgacccagacacctaagttccaggtgctgaaaaccggccagagcatgaccctgcaatgcgcccaggacatgaaccatgagtacatgagctggtacagacaggaccccggcatgggcctgagactgatccactactctgtggctatccagaccaccgaccagggcgaagtgcccaatggctacaacgtgtccagaagcaccatcgaggacttcccactgagactgctgtctgccgctcctagccagaccagcgtgtacttttgtgccagcagctacctgggcaacaccggcgagctgttttttggcgagggcagcagactgaccgtgctcgaggacctgaagaacgtgttcccacctgaggtggccgtgttcgagcctagcgaggccgagatcagccacacccagaaagccaccctcgtgtgcctggctaccggcttctaccccgaccatgtggaactgtcttggtgggtcaacggcaaagaggtgcacagcggcgtgtctaccgacccccagccactgaaagaacagcccgccctgaacgacagccggtactgcctgagcagcagactgagagtgtccgccaccttctggcagaacccccggaaccacttcagatgccaggtgcagttctacggcctgagcgagaacgacgagtggacccaggacagagccaagcccgtgacccagatcgtgtctgccgaagcctggggcagagccgattgcggatcccagagcttcggcctgctggaccccaagctgtgctacctgctggatggcatcctgttcatctacggcgtgatcctgaccgccctgttcctgagagtgaagttcagcagaagcgccgacgcccctgcctaccagcagggacagaaccaactgtacaacgagctgaacctgggcagacgggaagagtacgacgtgctggacaagcggagaggcagggaccctgagatgggcggaaagccccagcggagaaagaacccccaggaaggactgtataacgaactccagaaagacaagatggccgaagcctacagcgagatcggcatgaagggcgagcggagaagaggcaagggccacgatggcctgtaccagggcctgagcaccgccaccaaggacacctatgacgccctgcacatgcaggccctgcctccaagaagggccaagcgatctggatctggagcaacaaacttctcactactcaaacaagcaggtgacgtggaggagaatcccgggcctactagtatggactggatttggcgcatccttttccttgtcggcgctgctaccggcgcgcattccttcgaacaagaagtgacacagatccctgccgctctgtctgtgcctgagggcgaaaacctggtgctgaactgctccttcaccgacagcgccatctacaacctccagtggttcaggcaggaccctggaaagggactgacaagcctgctgctgatccagagcagccagagagagcagacctccggcagactgaatgccagcctggataagagcagcggcaggtctaccctgtatatcgccgcttctcagcctggcgatagcgccacatatctgtgtgctgtgcggcctacaagcggcggcagctacatccctacatttggcagaggcaccagcctgatcgtgcacccttatacgcgtatccagaaccctgatcctgccgtgtaccagctgcgggatagcaagagcagcgacaagagcgtgtgtctgttcaccgacttcgacagccagaccaacgtgtcccagagcaaggactccgacgtgtacatcaccgataagaccgtgctggacatgcggagcatggacttcaagagcaactccgccgtggcctggtccaacaagtccgatttcgcctgcgccaacgccttcaacaacagcattatccccgaggacacattcttcccaagccccgagagcagctgcggtacccagagttttgggttgttggaccctaaattgtgctatctgttggacggaatcctgttcatttacggagtgatcctgaccgcattgttcctgcgggttaagttttccagatccgcagacgcacccgcttaccaacaagggcagaaccaactctacaatgaacttaatttggggcggagggaagagtacgacgttctggacaaaaggaggggacgagatcccgagatgggcggaaagcctcagcgaaggaagaatccgcaagaggggctttataacgaactccagaaagataaaatggcagaagcctatagtgagattgggatgaagggagaaaggaggaggggtaaaggtcacgatgggttgtaccaaggattgagcacagccactaaagatacctatgatgcgctccacatgcaggccctgccgccaagacgcgccaagagaagcggatctggcgtgaagcagaccctgaatttcgacctgctgaagctggctggcgacgtggaatccaacccaggcccttctagaggccatatgaccgagtacaagcccacggtgcgcctcgccacccgcgacgacgtccccagggccgtacgcaccctcgccgccgcgttcgccgactaccccgccacgcgccacaccgtcgatccggaccgccacatcgagcgggtcaccgagctgcaagaactcttcctcacgcgcgtcgggctcgacatcggcaaggtgtgggtcgcggacgacggcgccgcggtggcggtctggaccacgccggagagcgtcgaagcgggggcggtgttcgccgagatcggcccgcgcatggccgagttgagcggttcccggctggccgcgcagcaacagatggaaggcctcctggcgccgcaccggcccaaggagcccgcgtggttcctggccaccgtcggcgtctcgcccgaccaccagggcaagggtctgggcagcgccgtcgtgctccccggagtggaggcggccgagcgcgccggggtgcccgccttcctggagacctccgcgccccgcaacctccccttctacgagcggctcggcttcaccgtcaccgccgacgtcgaggtgcccgaaggaccgcgcacctggtgcatgacccgcaagcccggtgcctga

SEQ ID NO: 987 - DNA, 2481 bp, synthetic construct
  source 1..2481: mol_type = other DNA
atggccttaccagtgaccgccttgctcctgccgctggccttgctgctccacgccgccaggccggaattcaatgctggcgtgacccagacacctaagttccaggtgctgaaaaccggccagagcatgaccctgcaatgcgcccaggacatgaaccatgagtacatgagctggtacagacaggaccccggcatgggcctgagactgatccactactctgtggctatccagaccaccgaccagggcgaagtgcccaatggctacaacgtgtccagaagcaccatcgaggacttcccactgagactgctgtctgccgctcctagccagaccagcgtgtacttttgtgccagcagctacctgggcaacaccggcgagctgttttttggcgagggcagcagactgaccgtgctcgaggacctgaagaacgtgttcccacctgaggtggccgtgttcgagcctagcgaggccgagatcagccacacccagaaagccaccctcgtgtgcctggctaccggcttctaccccgaccatgtggaactgtcttggtgggtcaacggcaaagaggtgcacagcggcgtgtctaccgacccccagccactgaaagaacagcccgccctgaacgacagccggtactgcctgagcagcagactgagagtgtccgccaccttctggcagaacccccggaaccacttcagatgccaggtgcagttctacggcctgagcgagaacgacgagtggacccaggacagagccaagcccgtgacccagatcgtgtctgccgaagcctggggcagagccgattgcggatcccagagcttcggcctgctggaccccaagctgtgctacctgctggatggcatcctgttcatctacggcgtgatcctgaccgccctgttcctgagagtgaagttcagcagaagcgccgacgcccctgcctaccagcagggacagaaccaactgtacaacgagctgaacctgggcagacgggaagagtacgacgtgctggacaagcggagaggcagggaccctgagatgggcggaaagccccagcggagaaagaacccccaggaaggactgtataacgaactccagaaagacaagatggccgaagcctacagcgagatcggcatgaagggcgagcggagaagaggcaagggccacgatggcctgtaccagggcctgagcaccgccaccaaggacacctatgacgccctgcacatgcaggccctgcctccaagaagggccaagcgatctggatctggagcaacaaacttctcactactcaaacaagcaggtgacgtggaggagaatcccgggcctactagtatggactggatttggcgcatccttttccttgtcggcgctgctaccggcgcgcattccttcgaacaagaagtgacacagatccctgccgctctgtctgtgcctgagggcgaaaacctggtgctgaactgctccttcaccgacagcgccatctacaacctccagtggttcaggcaggaccctggaaagggactgacaagcctgctgctgatccagagcagccagagagagcagacctccggcagactgaatgccagcctggataagagcagcggcaggtctaccctgtatatcgccgcttctcagcctggcgatagcgccacatatctgtgtgctgtgcggcctacaagcggcggcagctacatccctacatttggcagaggcaccagcctgatcgtgcacccttatacgcgtgcgtccactaagggtccgtcagtcttcccgctggcgccctgttcccgcagcacgagtgaatctaccgccgcccttgggtgcttggtaaaagactattttcctgagcccgttacagtatcatggaacagcggggctctgactagcggggtgcatacgttccctgcggttctgcaatctagcggactgtattctctctccagtgttgtgaccgtgccaagctccagcctcggtactaaaacttatacatgtaatgtggatcataaaccttcaaataccaaggttgacaaaagggtagagagtaagtacggtggtacccagagttttgggttgttggaccctaaattgtgctatctgttggacggaatcctgttcatttacggagtgatcctgaccgcattgttcctgcgggttaagttttccagatccgcagacgcacccgcttaccaacaagggcagaaccaactctacaatgaacttaatttggggcggagggaagagtacgacgttctggacaaaaggaggggacgagatcccgagatgggcggaaagcctcagcgaaggaagaatccgcaagaggggctttataacgaactccagaaagataaaatggcagaagcctatagtgagattgggatgaagggagaaaggaggaggggtaaaggtcacgatgggttgtaccaaggattgagcacagccactaaagatacctatgatgcgctccacatgcaggccctgccgccaagataa

SEQ ID NO: 988 - DNA, 2229 bp, synthetic construct
  source 1..2229: mol_type = other DNA
atggccttaccagtgaccgccttgctcctgccgctggccttgctgctccacgccgccaggccggaattcaatgctggcgtgacccagacacctaagttccaggtgctgaaaaccggccagagcatgaccctgcaatgcgcccaggacatgaaccatgagtacatgagctggtacagacaggaccccggcatgggcctgagactgatccactactctgtggctatccagaccaccgaccagggcgaagtgcccaatggctacaacgtgtccagaagcaccatcgaggacttcccactgagactgctgtctgccgctcctagccagaccagcgtgtacttttgtgccagcagctacctgggcaacaccggcgagctgttttttggcgagggcagcagactgaccgtgctcgaggacctgaagaacgtgttcccacctgaggtggccgtgttcgagcctagcgaggccgagatcagccacacccagaaagccaccctcgtgtgcctggctaccggcttctaccccgaccatgtggaactgtcttggtgggtcaacggcaaagaggtgcacagcggcgtgtctaccgacccccagccactgaaagaacagcccgccctgaacgacagccggtactgcctgagcagcagactgagagtgtccgccaccttctggcagaacccccggaaccacttcagatgccaggtgcagttctacggcctgagcgagaacgacgagtggacccaggacagagccaagcccgtgacccagatcgtgtctgccgaagcctggggcagagccgattgcggatcccagagcttcggcctgctggaccccaagctgtgctacctgctggatggcatcctgttcatctacggcgtgatcctgaccgccctgttcctgagagtgaagttcagcagaagcgccgacgcccctgcctaccagcagggacagaaccaactgtacaacgagctgaacctgggcagacgggaagagtacgacgtgctggacaagcggagaggcagggaccctgagatgggcggaaagccccagcggagaaagaacccccaggaaggactgtataacgaactccagaaagacaagatggccgaagcctacagcgagatcggcatgaagggcgagcggagaagaggcaagggccacgatggcctgtaccagggcctgagcaccgccaccaaggacacctatgacgccctgcacatgcaggccctgcctccaagaagggccaagcgatctggatctggagcaacaaacttctcactactcaaacaagcaggtgacgtggaggagaatcccgggcctactagtatggactggatttggcgcatccttttccttgtcggcgctgctaccggcgcgcattccttcgaacaagaagtgacacagatccctgccgctctgtctgtgcctgagggcgaaaacctggtgctgaactgctccttcaccgacagcgccatctacaacctccagtggttcaggcaggaccctggaaagggactgacaagcctgctgctgatccagagcagccagagagagcagacctccggcagactgaatgccagcctggataagagcagcggcaggtctaccctgtatatcgccgcttctcagcctggcgatagcgccacatatctgtgtgctgtgcggcctacaagcggcggcagctacatccctacatttggcagaggcaccagcctgatcgtgcacccttatacgcgtatccagaaccctgatcctgccgtgtaccagctgcgggatagcaagagcagcgacaagagcgtgtgtctgttcaccgacttcgacagccagaccaacgtgtcccagagcaaggactccgacgtgtacatcaccgataagaccgtgctggacatgcggagcatggacttcaagagcaactccgccgtggcctggtccaacaagtccgatttcgcctgcgccaacgccttcaacaacagcattatccccgaggacacattcttcccaagccccgagagcagctgcggtaccctcggagaaccacagctctgttacattctggatgctatcctgttcctctatgggatcgtcctgacactcctgtattgcagactcaaaattcaagttcgcaaagccgccattacctcttacgagaagagtgatggggtgtacacaggactgtctacccggaatcaagaaacctacgaaaccctcaaacatgagaagccacctcagtaa

SEQ ID NO: 989 - DNA, 2256 bp, synthetic construct; identical to SEQ ID NO: 983
  source 1..2256: mol_type = other DNA

SEQ ID NO: 990 - DNA, 3513 bp, synthetic construct
  source 1..3513: mol_type = other DNA
atggccttaccagtgaccgccttgctcctgccgctggccttgctgctccacgccgccaggccggaattcaatgctggcgtgacccagacacctaagttccaggtgctgaaaaccggccagagcatgaccctgcaatgcgcccaggacatgaaccatgagtacatgagctggtacagacaggaccccggcatgggcctgagactgatccactactctgtggctatccagaccaccgaccagggcgaagtgcccaatggctacaacgtgtccagaagcaccatcgaggacttcccactgagactgctgtctgccgctcctagccagaccagcgtgtacttttgtgccagcagctacctgggcaacaccggcgagctgttttttggcgagggcagcagactgaccgtgctcgaggacctgaagaacgtgttcccacctgaggtggccgtgttcgagcctagcgaggccgagatcagccacacccagaaagccaccctcgtgtgcctggctaccggcttctaccccgaccatgtggaactgtcttggtgggtcaacggcaaagaggtgcacagcggcgtgtctaccgacccccagccactgaaagaacagcccgccctgaacgacagccggtactgcctgagcagcagactgagagtgtccgccaccttctggcagaacccccggaaccacttcagatgccaggtgcagttctacggcctgagcgagaacgacgagtggacccaggacagagccaagcccgtgacccagatcgtgtctgccgaagcctggggcagagccgattgcggatcccagagcttcggcctgctggaccccaagctgagctacctgctggatggcatcctgttcatctacggcgtgatcctgaccgccctgttcctgtggcggcggaagcggaaagagaagcagtctgagacaagccccaaagagttcctgaccatctacgaggacgtgaaggacctgaaaacccggcggaaccacgaacaagagcagacctttcctggcggaggcagcaccatctacagcatgatccagagccagagcagcgcccctacaagccaagagcctgcctacacactgtactccctgatccagcctagcagaaagagcggcagccggaagagaaatcacagccccagcttcaacagcacgatctacgaagtgatcggcaagagccagccaaaggctcagaaccctgccagactgagccggaaagagctggaaaacttcgacgtgtacagcactagtagagtgaagttcagcagaagcgccgacgcccctgcctaccagcagggacagaaccaactgtacaacgagctgaacctgggcagacgggaagagtacgacgtgctggacaagcggagaggcagggaccctgagatgggcggaaagccccagcggagaaagaacccccaggaaggactgtataacgaactccagaaagacaagatggccgaagcctacagcgagatcggcatgaagggcgagcggagaagaggcaagggccacgatggcctgtaccagggcctgagcaccgccaccaaggacacctatgacgccctgcacatgcaggccctgcctccaagaagggccaagcgatctggatctggagcaacaaacttctcactactcaaacaagcaggtgacgtggaggagaatcccgggcctatggactggatttggcgcatccttttccttgtcggcgctgctaccggcgcgcattccttcgaacaagaagtgacacagatccctgccgctctgtctgtgcctgagggcgaaaacctggtgctgaactgctccttcaccgacagcgccatctacaacctccagtggttcaggcaggaccctggaaagggactgacaagcctgctgctgatccagagcagccagagagagcagacctccggcagactgaatgccagcctggataagagcagcggcaggtctaccctgtatatcgccgcttctcagcctggcgatagcgccacatatctgtgtgctgtgcggcctacaagcggcggcagctacatccctacatttggcagaggcaccagcctgatcgtgcacccttatacgcgtatccagaaccctgatcctgccgtgtaccagctgcgggatagcaagagcagcgacaagagcgtgtgtctgttcaccgacttcgacagccagaccaacgtgtcccagagcaaggactccgacgtgtacatcaccgataagaccgtgctggacatgcggagcatggacttcaagagcaactccgccgtggcctggtccaacaagtccgatttcgcctgcgccaacgccttcaacaacagcattatccccgaggacacattcttcccaagccccgagagcagctgcggtacccagagttttgggttgttggaccctaaattgtgctatctgttggacggaatcctgttcatttacggagtgatcctgaccgcattgttcctgcgggttaagttttccagatccgcagacgcacccgcttaccaacaagggcagaaccaactctacaatgaacttaatttggggcggagggaagagtacgacgttctggacaaaaggaggggacgagatcccgagatgggcggaaagcctcagcgaaggaagaatccgcaagaggggctttataacgaactccagaaagataaaatggcagaagcctatagtgagattgggatgaagggagaaaggaggaggggtaaaggtcacgatgggttgtaccaaggattgagcacagccactaaagatacctatgatgcgctccacatgcaggccctgccgccaagacgcgccaagagaagcggatctggcgtgaagcagaccctgaatttcgacctgctgaagctggctggcgacgtggaatccaacccaggcccttctagaggccatatgaccgagtacaagcccacggtgcgcctcgccacccgcgacgacgtccccagggccgtacgcaccctcgccgccgcgttcgccgactaccccgccacgcgccacaccgtcgatccggaccgccacatcgagcgggtcaccgagctgcaagaactcttcctcacgcgcgtcgggctcgacatcggcaaggtgtgggtcgcggacgacggcgccgcggtggcggtctggaccacgccggagagcgtcgaagcgggggcggtgttcgccgagatcggcccgcgcatggccgagttgagcggttcccggctggccgcgcagcaacagatggaaggcctcctggcgccgcaccggcccaaggagcccgcgtggttcctggccaccgtcggcgtctcgcccgaccaccagggcaagggtctgggcagcgccgtcgtgctccccggagtggaggcggccgagcgcgccggggtgcccgccttcctggagacctccgcgccccgcaacctccccttctacgagcggctcggcttcaccgtcaccgccgacgtcgaggtgcccgaaggaccgcgcacctggtgcatgacccgcaagcccggtgcctga

SEQ ID NO: 991 - DNA, 2952 bp, synthetic construct
  source 1..2952: mol_type = other DNA
atggccttaccagtgaccgccttgctcctgccgctggccttgctgctccacgccgccaggccggaattcaatgctggcgtgacccagacacctaagttccaggtgctgaaaaccggccagagcatgaccctgcaatgcgcccaggacatgaaccatgagtacatgagctggtacagacaggaccccggcatgggcctgagactgatccactactctgtggctatccagaccaccgaccagggcgaagtgcccaatggctacaacgtgtccagaagcaccatcgaggacttcccactgagactgctgtctgccgctcctagccagaccagcgtgtacttttgtgccagcagctacctgggcaacaccggcgagctgttttttggcgagggcagcagactgaccgtgctcgaggacctgaagaacgtgttcccacctgaggtggccgtgttcgagcctagcgaggccgagatcagccacacccagaaagccaccctcgtgtgcctggctaccggcttctaccccgaccatgtggaactgtcttggtgggtcaacggcaaagaggtgcacagcggcgtgtctaccgacccccagccactgaaagaacagcccgccctgaacgacagccggtactgcctgagcagcagactgagagtgtccgccaccttctggcagaacccccggaaccacttcagatgccaggtgcagttctacggcctgagcgagaacgacgagtggacccaggacagagccaagcccgtgacccagatcgtgtctgccgaagcctggggcagagccgattgcggatcccagagcttcggcctgctggaccccaagctgtgctacctgctggatggcatcctgttcatctacggcgtgatcctgaccgccctgttcctgagagtgaagttcagcagaagcgccgacgcccctgcctaccagcagggacagaaccaactgtacaacgagctgaacctgggcagacgggaagagtacgacgtgctggacaagcggagaggcagggaccctgagatgggcggaaagccccagcggagaaagaacccccaggaaggactgtataacgaactccagaaagacaagatggccgaagcctacagcgagatcggcatgaagggcgagcggagaagaggcaagggccacgatggcctgtaccagggcctgagcaccgccaccaaggacacctatgacgccctgcacatgcaggccctgcctccaagaagggccaagcgatctggatctggagcaacaaacttctcactactcaaacaagcaggtgacgtggaggagaatcccgggcctactagtatggactggatttggcgcatccttttccttgtcggcgctgctaccggcgcgcattccttcgaacaagaagtgacacagatccctgccgctctgtctgtgcctgagggcgaaaacctggtgctgaactgctccttcaccgacagcgccatctacaacctccagtggttcaggcaggaccctggaaagggactgacaagcctgctgctgatccagagcagccagagagagcagacctccggcagactgaatgccagcctggataagagcagcggcaggtctaccctgtatatcgccgcttctcagcctggcgatagcgccacatatctgtgtgctgtgcggcctacaagcggcggcagctacatccctacatttggcagaggcaccagcctgatcgtgcacccttatacgcgtatccagaaccctgatcctgccgtgtaccagctgcgggatagcaagagcagcgacaagagcgtgtgtctgttcaccgacttcgacagccagaccaacgtgtcccagagcaaggactccgacgtgtacatcaccgataagaccgtgctggacatgcggagcatggacttcaagagcaactccgccgtggcctggtccaacaagtccgatttcgcctgcgccaacgccttcaacaacagcattatccccgaggacacattcttcccaagccccgagagcagctgcggtaccgtggtcgagaaagaacatccacagcttggcgctggcaccgtcctgttgcttagagccggattctatgccgtcagcttcctgtccgtggctgtggggtctacagtgtattaccagggaaaatgtctcacctggaaaggccccagacgccagcttccagctgttgttcctgctccactgccaccaccttgtggctcctctgctcacttgcttccaccagtgcctggcggacgcgccaagagaagcggatctggcgtgaagcagaccctgaatttcgacctgctgaagctggctggcgacgtggaatccaacccaggcccttctagaggccatatgaccgagtacaagcccacggtgcgcctcgccacccgcgacgacgtccccagggccgtacgcaccctcgccgccgcgttcgccgactaccccgccacgcgccacaccgtcgatccggaccgccacatcgagcgggtcaccgagctgcaagaactcttcctcacgcgcgtcgggctcgacatcggcaaggtgtgggtcgcggacgacggcgccgcggtggcggtctggaccacgccggagagcgtcgaagcgggggcggtgttcgccgagatcggcccgcgcatggccgagttgagcggttcccggctggccgcgcagcaacagatggaaggcctcctggcgccgcaccggcccaaggagcccgcgtggttcctggccaccgtcggcgtctcgcccgaccaccagggcaagggtctgggcagcgccgtcgtgctccccggagtggaggcggccgagcgcgccggggtgcccgccttcctggagacctccgcgccccgcaacctccccttctacgagcggctcggcttcaccgtcaccgccgacgtcgaggtgcccgaaggaccgcgcacctggtgcatgacccgcaagcccggtgcctga

SEQ ID NO: 992 - DNA, 2910 bp, synthetic construct
  source 1..2910: mol_type = other DNA
atggccttaccagtgaccgccttgctcctgccgctggccttgctgctccacgccgccaggccggaattcaatgctggcgtgacccagacacctaagttccaggtgctgaaaaccggccagagcatgaccctgcaatgcgcccaggacatgaaccatgagtacatgagctggtacagacaggaccccggcatgggcctgagactgatccactactctgtggctatccagaccaccgaccagggcgaagtgcccaatggctacaacgtgtccagaagcaccatcgaggacttcccactgagactgctgtctgccgctcctagccagaccagcgtgtacttttgtgccagcagctacctgggcaacaccggcgagctgttttttggcgagggcagcagactgaccgtgctcgaggacctgaagaacgtgttcccacctgaggtggccgtgttcgagcctagcgaggccgagatcagccacacccagaaagccaccctcgtgtgcctggctaccggcttctaccccgaccatgtggaactgtcttggtgggtcaacggcaaagaggtgcacagcggcgtgtctaccgacccccagccactgaaagaacagcccgccctgaacgacagccggtactgcctgagcagcagactgagagtgtccgccaccttctggcagaacccccggaaccacttcagatgccaggtgcagttctacggcctgagcgagaacgacgagtggacccaggacagagccaagcccgtgacccagatcgtgtctgccgaagcctggggcagagccgattgcggatcccagagcttcggcctgctggaccccaagctgtgctacctgctggatggcatcctgttcatctacggcgtgatcctgaccgccctgttcctgagagtgaagttcagcagaagcgccgacgcccctgcctaccagcagggacagaaccaactgtacaacgagctgaacctgggcagacgggaagagtacgacgtgctggacaagcggagaggcagggaccctgagatgggcggaaagccccagcggagaaagaacccccaggaaggactgtataacgaactccagaaagacaagatggccgaagcctacagcgagatcggcatgaagggcgagcggagaagaggcaagggccacgatggcctgtaccagggcctgagcaccgccaccaaggacacctatgacgccctgcacatgcaggccctgcctccaagaagggccaagcgatctggatctggagcaacaaacttctcactactcaaacaagcaggtgacgtggaggagaatcccgggcctactagtatggactggatttggcgcatccttttccttgtcggcgctgctaccggcgcgcattccttcgaacaagaagtgacacagatccctgccgctctgtctgtgcctgagggcgaaaacctggtgctgaactgctccttcaccgacagcgccatctacaacctccagtggttcaggcaggaccctggaaagggactgacaagcctgctgctgatccagagcagccagagagagcagacctccggcagactgaatgccagcctggataagagcagcggcaggtctaccctgtatatcgccgcttctcagcctggcgatagcgccacatatctgtgtgctgtgcggcctacaagcggcggcagctacatccctacatttggcagaggcaccagcctgatcgtgcacccttatacgcgtatccagaaccctgatcctgccgtgtaccagctgcgggatagcaagagcagcgacaagagcgtgtgtctgttcaccgacttcgacagccagaccaacgtgtcccagagcaaggactccgacgtgtacatcaccgataagaccgtgctggacatgcggagcatggacttcaagagcaactccgccgtggcctggtccaacaagtccgatttcgcctgcgccaacgccttcaacaacagcattatccccgaggacacattcttcccaagccccgagagcagctgcggtaccatcactcaaggtttggcagtgtcaaccatctcatcattctttccacctggctaccaagtgtccttctgcctggtcatggtgctgctgttcgccgtggataccggcctgtacttcagcgtcaagaccaacatccggtccagcaccagagactggaaggaccacaagttcaagtggcggaaggaccctcaggacaagagggccaagcgatctggatctggagcaacaaacttctcactactcaaacaagcaggtgacgtggaggagaatcccgggccttctagaggccatatgaccgagtacaagcccacggtgcgcctcgccacccgcgacgacgtccccagggccgtacgcaccctcgccgccgcgttcgccgactaccccgccacgcgccacaccgtcgatccggaccgccacatcgagcgggtcaccgagctgcaagaactcttcctcacgcgcgtcgggctcgacatcggcaaggtgtgggtcgcggacgacggcgccgcggtggcggtctggaccacgccggagagcgtcgaagcgggggcggtgttcgccgagatcggcccgcgcatggccgagttgagcggttcccggctggccgcgcagcaacagatggaaggcctcctggcgccgcaccggcccaaggagcccgcgtggttcctggccaccgtcggcgtctcgcccgaccaccagggcaagggtctgggcagcgccgtcgtgctccccggagtggaggcggccgagcgcgccggggtgcccgccttcctggagacctccgcgccccgcaacctccccttctacgagcggctcggcttcaccgtcaccgccgacgtcgaggtgcccgaaggaccgcgcacctggtgcatgacccgcaagcccggtgcctga

SEQ ID NO: 993 - DNA, 2067 bp, synthetic construct
  source 1..2067: mol_type = other DNA
atggccttaccagtgaccgccttgctcctgccgctggccttgctgctccacgccgccaggccggacatccagatgacacagagccctagcagcctgtctgccagcgtgggagacagagtgaccatcacatgcaaggccagcgaccacatcaacaactggctggcctggtatcagcagaagcctggacaggcccctaagctgctgatctacggcgctaccacactggaaacaggcgtgcccagcagattttctggcagcggctctggcaccgactacaccctgacaatatccagcctccagcctgaggacttcgccacctactactgtcagcagagctggaacaccccttggacattcggccagggcaccaagctggaaatcaagagaggcggaggcggaagtggaggcggaggatctggcggcggaggctctcaagttcagcttcaacagcctggcgctgagctggtcaaacctggcgcttctgtgaagatgagctgcaaagccagcggctacgccttcagcagctactggatcaactggatgaagcagaaacccggccagggactcgaatggatcggccaaatctatcccggcgacggcgacaccaactacaacggcaagttcaagggcagagccacactgaccgccgatacctctagcagcacagcctacatgcagctgagcagcctgaccagcgaagatagcgccgtgtacttctgtgcccggtccatcacaacagtcgtgggctgcgctatggactattggggccagggaacaagcgtgaccgtgtctagtggtaccacaacgccgggcgaaaggagttccttgccggccttttaccccggcacaagcggaagctgtagtgggtgtggaagcctcagcctcccacttcttgcgggcctcgtcgcggcagatgcagtagcttcacttcttattgtaggcgcggtatttctctgtgctcgaccaaggaggtcacccgctcaggaggatggtaaggtgtatataaatatgccaggacgcggaagctctagacgggttaagttttccagatccgcagacgcacccgcttaccaacaagggcagaaccaactctacaatgaacttaatttggggcggagggaagagtacgacgttctggacaaaaggaggggacgagatcccgagatgggcggaaagcctcagcgaaggaagaatccgcaagaggggctttataacgaactccagaaagataaaatggcagaagcctatagtgagattgggatgaagggagaaaggaggaggggtaaaggtcacgatgggttgtaccaaggattgagcacagccactaaagatacctatgatgcgctccacatgcaggccctgccgccaagacgcgccaagagaagcggatctggcgtgaagcagaccctgaatttcgacctgctgaagctggctggcgacgtggaatccaacccaggccctggccatatgaccgagtacaagcccacggtgcgcctcgccacccgcgacgacgtccccagggccgtacgcaccctcgccgccgcgttcgccgactaccccgccacgcgccacaccgtcgatccggaccgccacatcgagcgggtcaccgagctgcaagaactcttcctcacgcgcgtcgggctcgacatcggcaaggtgtgggtcgcggacgacggcgccgcggtggcggtctggaccacgccggagagcgtcgaagcgggggcggtgttcgccgagatcggcccgcgcatggccgagttgagcggttcccggctggccgcgcagcaacagatggaaggcctcctggcgccgcaccggcccaaggagcccgcgtggttcctggccaccgtcggcgtctcgcccgaccaccagggcaagggtctgggcagcgccgtcgtgctccccggagtggaggcggccgagcgcgccggggtgcccgccttcctggagacctccgcgccccgcaacctccccttctacgagcggctcggcttcaccgtcaccgccgacgtcgaggtgcccgaaggaccgcgcacctggtgcatgacccgcaagcccggtgcctga

SEQ ID NO: 994 - DNA, 2364 bp, synthetic construct
  source 1..2364: mol_type = other DNA
atggccttaccagtgaccgccttgctcctgccgctggccttgctgctccacgccgccaggccggacatccagatgacacagagccctagcagcctgtctgccagcgtgggagacagagtgaccatcacatgcaaggccagcgaccacatcaacaactggctggcctggtatcagcagaagcctggacaggcccctaagctgctgatctacggcgctaccacactggaaacaggcgtgcccagcagattttctggcagcggctctggcaccgactacaccctgacaatatccagcctccagcctgaggacttcgccacctactactgtcagcagagctggaacaccccttggacattcggccagggcaccaagctggaaatcaagagactcgaggacctgaagaacgtgttcccacctgaggtggccgtgttcgagcctagcgaggccgagatcagccacacccagaaagccaccctcgtgtgcctggctaccggcttctaccccgaccatgtggaactgtcttggtgggtcaacggcaaagaggtgcacagcggcgtgtctaccgacccccagccactgaaagaacagcccgccctgaacgacagccggtactgcctgagcagcagactgagagtgtccgccaccttctggcagaacccccggaaccacttcagatgccaggtgcagttctacggcctgagcgagaacgacgagtggacccaggacagagccaagcccgtgacccagatcgtgtctgccgaagcctggggcagagccgattgcggatcccagagcttcggcctgctggaccccaagctgtgctacctgctggatggcatcctgttcatctacggcgtgatcctgaccgccctgttcctgagagtgaagttcagcagaagcgccgacgcccctgcctaccagcagggacagaaccaactgtacaacgagctgaacctgggcagacgggaagagtacgacgtgctggacaagcggagaggcagggaccctgagatgggcggaaagccccagcggagaaagaacccccaggaaggactgtataacgaactccagaaagacaagatggccgaagcctacagcgagatcggcatgaagggcgagcggagaagaggcaagggccacgatggcctgtaccagggcctgagcaccgccaccaaggacacctatgacgccctgcacatgcaggccctgcctccaagaagggccaagcgatctggatctggagcaacaaacttctcactactcaaacaagcaggtgacgtggaggagaatcccgggcctactagtatggactggatttggcgcatccttttccttgtcggcgctgctaccggcgcgcattccttcgaacaagttcagcttcaacagcctggcgctgagctggtcaaacctggcgcttctgtgaagatgagctgcaaagccagcggctacgccttcagcagctactggatcaactggatgaagcagaaacccggccagggactcgaatggatcggccaaatctatcccggcgacggcgacaccaactacaacggcaagttcaagggcagagccacactgaccgccgatacctctagcagcacagcctacatgcagctgagcagcctgaccagcgaagatagcgccgtgtacttctgtgcccggtccatcacaacagtcgtgggctgcgctatggactattggggccagggaacaagcgtgaccgtgtctagtacgcgtatccagaaccctgatcctgccgtgtaccagctgcgggatagcaagagcagcgacaagagcgtgtgtctgttcaccgacttcgacagccagaccaacgtgtcccagagcaaggactccgacgtgtacatcaccgataagaccgtgctggacatgcggagcatggacttcaagagcaactccgccgtggcctggtccaacaagtccgatttcgcctgcgccaacgccttcaacaacagcattatccccgaggacacattcttcccaagccccgagagcagctgcggtaccatgtgccagaactgcatcgagctgaacgccgctaccatcagcggctttctgttcgccgagatcgtgtccatcttcgtgctggccgtgggcgtgtactttatcgctggacaggatggcgtgcggcagagcagagcttccgataagcaaaccctgctgcctaacgaccagctgtaccagcctctgaaggacagagaggacgaccagtacagccacctccagggcaatcagctgagaagaaaccgcgccaagagaagcggatctggcgtgaagcagaccctgaatttcgacctgctgaagctggctggcgacgtggaatccaacccaggcccttctagataa

SEQ ID NO: 995 - DNA, 1848 bp, synthetic construct
  source 1..1848: mol_type = other DNA
atggccttaccagtgaccgccttgctcctgccgctggccttgctgctccacgccgccaggccggacatccagatgacacagagccctagcagcctgtctgccagcgtgggagacagagtgaccatcacatgcaaggccagccaggatgtgggcacagccgtggattggtatcagcagaagcctggcaaggcccctaagctgctgatctactgggccagcacaagacacacaggcgtgcccagcagattttctggcagcggctctggcaccgacttcaccctgacaatatccagcctccagcctgaggacttcgccacctactactgccagcagtacaacagctaccctctgaccttcggccagggcaccaaggtggaaatcaaaagactcgaggacctgaagaacgtgttcccacctgaggtggccgtgttcgagcctagcgaggccgagatcagccacacccagaaagccaccctcgtgtgcctggctaccggcttctaccccgaccatgtggaactgtcttggtgggtcaacggcaaagaggtgcacagcggcgtgtgtaccgacccccagccactgaaagaacagcccgccctgaacgacagccggtactgcctgagcagcagactgagagtgtccgccaccttctggcagaacccccggaaccacttcagatgccaggtgcagttctacggcctgagcgagaacgacgagtggacccaggacagagccaagcccgtgacccagatcgtgtctgccgaagcctggggcagagccgattgcggctttaccagcgagagctaccagcagggcgtgctgagcgccaccatcctgtacgagatcctgctgggcaaggccaccctgtacgccgtgctggtgtctgccctggtgctgatggctatggtcaagcggaaggacagccggggaagggccaagcgatctggatctggagcaacaaacttctcactactcaaacaagcaggtgacgtggaggagaatcccgggcctactagtatggactggatttggcgcatccttttccttgtcggcgctgctaccggcgcgcattccttcgaagtgcagctggttgaatcaggtggcggcctggttcaacctggcggatctctgagactgagctgtgccgccagcggctacacctttaccgagtacacaatccactgggtccgacaggcccctggcaaaggacttgagtgggtcgccaacatcaaccccaacaatggcggcaccacctacaaccagaagttcgaggacagattcaccatcagccgggacaacagcaagaacaccctgtacctccagatgaactccctgagagccgaggacaccgccgtgtactattgtgccagaggctggaacttcgactactggggccagggaacactggtcaccgttagctctacgcgtatccagaaccctgatcctgccgtgtaccagctgcgggatagcaagagcagcgacaagttcgtgtgtctgttcaccgacttcgacagccagatcaacgtgtcccagagcaaggactccgacgtgtacatcaccgataagtgcgtgctggacatgcggagcatggacttcaagagcaactccgccgtggcctggtccaacaagtccgatttcacctgcgccaacgccttcaacaacagcattatccccgaggacacattcttcccaagccccgagagcagctgcgacgtgaagctggtggaaaagagcttcgagacagacaccaacctgaacttccagaacctgagcgtgatcggcttcagaatcctgctgctgaaagtggccggctttaacctgctgatgaccctgcggctgtggtccagctaa

SEQ ID NO: 996 - DNA, 2583 bp, synthetic construct
  source 1..2583: mol_type = other DNA
atggccttaccagtgaccgccttgctcctgccgctggccttgctgctccacgccgccaggccggacatccagatgacacagagccctagcagcctgtctgccagcgtgggagacagagtgaccatcacatgcaaggccagcgaccacatcaacaactggctggcctggtatcagcagaagcctggacaggcccctaagctgctgatctacggcgctaccacactggaaacaggcgtgcccagcagattttctggcagcggctctggcaccgactacaccctgacaatatccagcctccagcctgaggacttcgccacctactactgtcagcagagctggaacaccccttggacattcggccagggcaccaagctggaaatcaagagactcgaggacctgaagaacgtgttcccacctgaggtggccgtgttcgagcctagcgaggccgagatcagccacacccagaaagccaccctcgtgtgcctggctaccggcttctaccccgaccatgtggaactgtcttggtgggtcaacggcaaagaggtgcacagcggcgtgtctaccgacccccagccactgaaagaacagcccgccctgaacgacagccggtactgcctgagcagcagactgagagtgtccgccaccttctggcagaacccccggaaccacttcagatgccaggtgcagttctacggcctgagcgagaacgacgagtggacccaggacagagccaagcccgtgacccagatcgtgtctgccgaagcctggggcagagccgattgcggatcccagagcttcggcctgctggaccccaagctgtgctacctgctggatggcatcctgttcatctacggcgtgatcctgaccgccctgttcctgaaacggggcagaaagaaactcctgtatatattcaaacaaccatttatgagaccagtacaaactactcaagaggaagatggctgtagctgccgatttccagaagaagaagaaggaggatgtgaactgagagtgaagttcagcagaagcgccgacgcccctgcctaccagcagggacagaaccaactgtacaacgagctgaacctgggcagacgggaagagtacgacgtgctggacaagcggagaggcagggaccctgagatgggcggaaagccccagcggagaaagaacccccaggaaggactgtataacgaactccagaaagacaagatggccgaagcctacagcgagatcggcatgaagggcgagcggagaagaggcaagggccacgatggcctgtaccagggcctgagcaccgccaccaaggacacctatgacgccctgcacatgcaggccctgcctccaagaagggccaagcgatctggatctggagcaacaaacttctcactactcaaacaagcaggtgacgtggaggagaatcccgggcctactagtatggactggatttggcgcatccttttccttgtcggcgctgctaccggcgcgcattccttcgaacaagttcagcttcaacagcctggcgctgagctggtcaaacctggcgcttctgtgaagatgagctgcaaagccagcggctacgccttcagcagctactggatcaactggatgaagcagaaacccggccagggactcgaatggatcggccaaatctatcccggcgacggcgacaccaactacaacggcaagttcaagggcagagccacactgaccgccgatacctctagcagcacagcctacatgcagctgagcagcctgaccagcgaagatagcgccgtgtacttctgtgcccggtccatcacaacagtcgtgggctgcgctatggactattggggccagggaacaagcgtgaccgtgtctagtacgcgtatccagaaccctgatcctgccgtgtaccagctgcgggatagcaagagcagcgacaagagcgtgtgtctgttcaccgacttcgacagccagaccaacgtgtcccagagcaaggactccgacgtgtacatcaccgataagaccgtgctggacatgcggagcatggacttcaagagcaactccgccgtggcctggtccaacaagtccgatttcgcctgcgccaacgccttcaacaacagcattatccccgaggacacattcttcccaagccccgagagcagctgcggtacccagagttttgggttgttggaccctaaattgtgctatctgttggacggaatcctgttcatttacggagtgatcctgaccgcattgttcctgcgggttaagttttccagatccgcagacgcacccgcttaccaacaagggcagaaccaactctacaatgaacttaatttggggcggagggaagagtacgacgttctggacaaaaggaggggacgagatcccgagatgggcggaaagcctcagcgaaggaagaatccgcaagaggggctttataacgaactccagaaagataaaatggcagaagcctatagtgagattgggatgaagggagaaaggaggaggggtaaaggtcacgatgggttgtaccaaggattgagcacagccactaaagatacctatgatgcgctccacatgcaggccctgccgccaagataa

SEQ ID NO: 997 - DNA, 2580 bp, synthetic construct
  source 1..2580: mol_type = other DNA
atggccttaccagtgaccgccttgctcctgccgctggccttgctgctccacgccgccaggccggaattcaatgctggcgtgacccagacacctaagttccaggtgctgaaaaccggccagagcatgaccctgcaatgcgcccaggacatgaaccatgagtacatgagctggtacagacaggaccccggcatgggcctgagactgatccactactctgtggctatccagaccaccgaccagggcgaagtgcccaatggctacaacgtgtccagaagcaccatcgaggacttcccactgagactgctgtctgccgctcctagccagaccagcgtgtacttttgtgccagcagctacctgggcaacaccggcgagctgttttttggcgagggcagcagactgaccgtgctcgaggacctgaagaacgtgttcccacctgaggtggccgtgttcgagcctagcgaggccgagatcagccacacccagaaagccaccctcgtgtgcctggctaccggcttctaccccgaccatgtggaactgtcttggtgggtcaacggcaaagaggtgcacagcggcgtgtctaccgacccccagccactgaaagaacagcccgccctgaacgacagccggtactgcctgagcagcagactgagagtgtccgccaccttctggcagaacccccggaaccacttcagatgccaggtgcagttctacggcctgagcgagaacgacgagtggacccaggacagagccaagcccgtgacccagatcgtgtctgccgaagcctggggcagagccgattgcggatcccagagcttcggcctgctggaccccaagctgtgctacctgctggatggcatcctgttcatctacggcgtgatcctgaccgccctgttcctgaaacggggcagaaagaaactcctgtatatattcaaacaaccatttatgagaccagtacaaactactcaagaggaagatggctgtagctgccgatttccagaagaagaagaaggaggatgtgaactgagagtgaagttcagcagaagcgccgacgcccctgcctaccagcagggacagaaccaactgtacaacgagctgaacctgggcagacgggaagagtacgacgtgctggacaagcggagaggcagggaccctgagatgggcggaaagccccagcggagaaagaacccccaggaaggactgtataacgaactccagaaagacaagatggccgaagcctacagcgagatcggcatgaagggcgagcggagaagaggcaagggccacgatggcctgtaccagggcctgagcaccgccaccaaggacacctatgacgccctgcacatgcaggccctgcctccaagaagggccaagcgatctggatctggagcaacaaacttctcactactcaaacaagcaggtgacgtggaggagaatcccgggcctactagtatggactggatttggcgcatccttttccttgtcggcgctgctaccggcgcgcattccttcgaacaagaagtgacacagatccctgccgctctgtctgtgcctgagggcgaaaacctggtgctgaactgctccttcaccgacagcgccatctacaacctccagtggttcaggcaggaccctggaaagggactgacaagcctgctgctgatccagagcagccagagagagcagacctccggcagactgaatgccagcctggataagagcagcggcaggtctaccctgtatatcgccgcttctcagcctggcgatagcgccacatatctgtgtgctgtgcggcctacaagcggcggcagctacatccctacatttggcagaggcaccagcctgatcgtgcacccttatacgcgtatccagaaccctgatcctgccgtgtaccagctgcgggatagcaagagcagcgacaagagcgtgtgtctgttcaccgacttcgacagccagaccaacgtgtcccagagcaaggactccgacgtgtacatcaccgataagaccgtgctggacatgcggagcatggacttcaagagcaactccgccgtggcctggtccaacaagtccgatttcgcctgcgccaacgccttcaacaacagcattatccccgaggacacattcttcccaagccccgagagcagctgcggtacccagagttttgggttgttggaccctaaattgtgctatctgttggacggaatcctgttcatttacggagtgatcctgaccgcattgttcctgcgggttaagttttccagatccgcagacgcacccgcttaccaacaagggcagaaccaactctacaatgaacttaatttggggcggagggaagagtacgacgttctggacaaaaggaggggacgagatcccgagatgggcggaaagcctcagcgaaggaagaatccgcaagaggggctttataacgaactccagaaagataaaatggcagaagcctatagtgagattgggatgaagggagaaaggaggaggggtaaaggtcacgatgggttgtaccaaggattgagcacagccactaaagatacctatgatgcgctccacatgcaggccctgccgccaagataa

SEQ ID NO: 998 - DNA, 2580 bp, synthetic construct
  source 1..2580: mol_type = other DNA
atggccttaccagtgaccgccttgctcctgccgctggccttgctgctccacgccgccaggccggacatccagatgacacagagccctagcagcctgtctgccagcgtgggagacagagtgaccatcacatgcaaggccagcgaccacatcaacaactggctggcctggtatcagcagaagcctggacaggcccctaagctgctgatctacggcgctaccacactggaaacaggcgtgcccagcagattttctggcagcggctctggcaccgactacaccctgacaatatccagcctccagcctgaggacttcgccacctactactgtcagcagagctggaacaccccttggacattcggccagggcaccaagctggaaatcaagagactcgaggacctgaagaacgtgttcccacctgaggtggccgtgttcgagcctagcgaggccgagatcagccacacccagaaagccaccctcgtgtgcctggctaccggcttctaccccgaccatgtggaactgtcttggtgggtcaacggcaaagaggtgcacagcggcgtgtctaccgacccccagccactgaaagaacagcccgccctgaacgacagccggtactgcctgagcagcagactgagagtgtccgccaccttctggcagaacccccggaaccacttcagatgccaggtgcagttctacggcctgagcgagaacgacgagtggacccaggacagagccaagcccgtgacccagatcgtgtctgccgaagcctggggcagagccgattgcggatcccagagcttcggcctgctggaccccaagctgtgctacctgctggatggcatcctgttcatctacggcgtgatcctgaccgccctgttcctgaggagtaagaggagcaggctcctgcacagtgactacatgaacatgactccacgccgccccggacccacccgcaagcattaccagccctatgccccaccacgcgacttcgcagcctatcgctccagagtgaagttcagcagaagcgccgacgcccctgcctaccagcagggacagaaccaactgtacaacgagctgaacctgggcagacgggaagagtacgacgtgctggacaagcggagaggcagggaccctgagatgggcggaaagccccagcggagaaagaacccccaggaaggactgtataacgaactccagaaagacaagatggccgaagcctacagcgagatcggcatgaagggcgagcggagaagaggcaagggccacgatggcctgtaccagggcctgagcaccgccaccaaggacacctatgacgccctgcacatgcaggccctgcctccaagaagggccaagcgatctggatctggagcaacaaacttctcactactcaaacaagcaggtgacgtggaggagaatcccgggcctactagtatggactggatttggcgcatccttttccttgtcggcgctgctaccggcgcgcattccttcgaacaagttcagcttcaacagcctggcgctgagctggtcaaacctggcgcttctgtgaagatgagctgcaaagccagcggctacgccttcagcagctactggatcaactggatgaagcagaaacccggccagggactcgaatggatcggccaaatctatcccggcgacggcgacaccaactacaacggcaagttcaagggcagagccacactgaccgccgatacctctagcagcacagcctacatgcagctgagcagcctgaccagcgaagatagcgccgtgtacttctgtgcccggtccatcacaacagtcgtgggctgcgctatggactattggggccagggaacaagcgtgaccgtgtctagtacgcgtatccagaaccctgatcctgccgtgtaccagctgcgggatagcaagagcagcgacaagagcgtgtgtctgttcaccgacttcgacagccagaccaacgtgtcccagagcaaggactccgacgtgtacatcaccgataagaccgtgctggacatgcggagcatggacttcaagagcaactccgccgtggcctggtccaacaagtccgatttcgcctgcgccaacgccttcaacaacagcattatccccgaggacacattcttcccaagccccgagagcagctgcggtacccagagttttgggttgttggaccctaaattgtgctatctgttggacggaatcctgttcatttacggagtgatcctgaccgcattgttcctgcgggttaagttttccagatccgcagacgcacccgcttaccaacaagggcagaaccaactctacaatgaacttaatttggggcggagggaagagtacgacgttctggacaaaaggaggggacgagatcccgagatgggcggaaagcctcagcgaaggaagaatccgcaagaggggctttataacgaactccagaaagataaaatggcagaagcctatagtgagattgggatgaagggagaaaggaggaggggtaaaggtcacgatgggttgtaccaaggattgagcacagccactaaagatacctatgatgcgctccacatgcaggccctgccgccaagataa

SEQ ID NO: 999 - DNA, 2457 bp, synthetic construct
  source 1..2457: mol_type = other DNA
atggccttaccagtgaccgccttgctcctgccgctggccttgctgctccacgccgccaggccggacatccagatgacacagagccctagcagcctgtctgccagcgtgggagacagagtgaccatcacatgcaaggccagcgaccacatcaacaactggctggcctggtatcagcagaagcctggacaggcccctaagctgctgatctacggcgctaccacactggaaacaggcgtgcccagcagattttctggcagcggctctggcaccgactacaccctgacaatatccagcctccagcctgaggacttcgccacctactactgtcagcagagctggaacaccccttggacattcggccagggcaccaagctggaaatcaagagactcgaggacctgaagaacgtgttcccacctgaggtggccgtgttcgagcctagcgaggccgagatcagccacacccagaaagccaccctcgtgtgcctggctaccggcttctaccccgaccatgtggaactgtcttggtgggtcaacggcaaagaggtgcacagcggcgtgtctaccgacccccagccactgaaagaacagcccgccctgaacgacagccggtactgcctgagcagcagactgagagtgtccgccaccttctggcagaacccccggaaccacttcagatgccaggtgcagttctacggcctgagcgagaacgacgagtggacccaggacagagccaagcccgtgacccagatcgtgtctgccgaagcctggggcagagccgattgcggatcccagagcttcggcctgctggaccccaagctgtgctacctgctggatggcatcctgttcatctacggcgtgatcctgaccgccctgttcctgagagtgaagttcagcagaagcgccgacgcccctgcctaccagcagggacagaaccaactgtacaacgagctgaacctgggcagacgggaagagtacgacgtgctggacaagcggagaggcagggaccctgagatgggcggaaagccccagcggagaaagaacccccaggaaggactgtataacgaactccagaaagacaagatggccgaagcctacagcgagatcggcatgaagggcgagcggagaagaggcaagggccacgatggcctgtaccagggcctgagcaccgccaccaaggacacctatgacgccctgcacatgcaggccctgcctccaagaagggccaagcgatctggatctggagcaacaaacttctcactactcaaacaagcaggtgacgtggaggagaatcccgggcctactagtatggactggatttggcgcatccttttccttgtcggcgctgctaccggcgcgcattccttcgaacaagttcagcttcaacagcctggcgctgagctggtcaaacctggcgcttctgtgaagatgagctgcaaagccagcggctacgccttcagcagctactggatcaactggatgaagcagaaacccggccagggactcgaatggatcggccaaatctatcccggcgacggcgacaccaactacaacggcaagttcaagggcagagccacactgaccgccgatacctctagcagcacagcctacatgcagctgagcagcctgaccagcgaagatagcgccgtgtacttctgtgcccggtccatcacaacagtcgtgggctgcgctatggactattggggccagggaacaagcgtgaccgtgtctagtacgcgtatccagaaccctgatcctgccgtgtaccagctgcgggatagcaagagcagcgacaagagcgtgtgtctgttcaccgacttcgacagccagaccaacgtgtcccagagcaaggactccgacgtgtacatcaccgataagaccgtgctggacatgcggagcatggacttcaagagcaactccgccgtggcctggtccaacaagtccgatttcgcctgcgccaacgccttcaacaacagcattatccccgaggacacattcttcccaagccccgagagcagctgcggtacccagagttttgggttgttggaccctaaattgtgctatctgttggacggaatcctgttcatttacggagtgatcctgaccgcattgttcctgcgggttaagttttccagatccgcagacgcacccgcttaccaacaagggcagaaccaactctacaatgaacttaatttggggcggagggaagagtacgacgttctggacaaaaggaggggacgagatcccgagatgggcggaaagcctcagcgaaggaagaatccgcaagaggggctttataacgaactccagaaagataaaatggcagaagcctatagtgagattgggatgaagggagaaaggaggaggggtaaaggtcacgatgggttgtaccaaggattgagcacagccactaaagatacctatgatgcgctccacatgcaggccctgccgccaagataa

SEQ ID NO: 1000 - DNA, 2454 bp, synthetic construct
  source 1..2454: mol_type = other DNA
atggccttaccagtgaccgccttgctcctgccgctggccttgctgctccacgccgccaggccggaattcaatgctggcgtgacccagacacctaagttccaggtgctgaaaaccggccagagcatgaccctgcaatgcgcccaggacatgaaccatgagtacatgagctggtacagacaggaccccggcatgggcctgagactgatccactactctgtggctatccagaccaccgaccagggcgaagtgcccaatggctacaacgtgtccagaagcaccatcgaggacttcccactgagactgctgtctgccgctcctagccagaccagcgtgtacttttgtgccagcagctacctgggcaacaccggcgagctgttttttggcgagggcagcagactgaccgtgctcgaggacctgaagaacgtgttcccacctgaggtggccgtgttcgagcctagcgaggccgagatcagccacacccagaaagccaccctcgtgtgcctggctaccggcttctaccccgaccatgtggaactgtcttggtgggtcaacggcaaagaggtgcacagcggcgtgtctaccgacccccagccactgaaagaacagcccgccctgaacgacagccggtactgcctgagcagcagactgagagtgtccgccaccttctggcagaacccccggaaccacttcagatgccaggtgcagttctacggcctgagcgagaacgacgagtggacccaggacagagccaagcccgtgacccagatcgtgtctgccgaagcctggggcagagccgattgcggatcccagagcttcggcctgctggaccccaagctgtgctacctgctggatggcatcctgttcatctacggcgtgatcctgaccgccctgttcctgagagtgaagttcagcagaagcgccgacgcccctgcctaccagcagggacagaaccaactgtacaacgagctgaacctgggcagacgggaagagtacgacgtgctggacaagcggagaggcagggaccctgagatgggcggaaagccccagcggagaaagaacccccaggaaggactgtataacgaactccagaaagacaagatggccgaagcctacagcgagatcggcatgaagggcgagcggagaagaggcaagggccacgatggcctgtaccagggcctgagcaccgccaccaaggacacctatgacgccctgcacatgcaggccctgcctccaagaagggccaagcgatctggatctggagcaacaaacttctcactactcaaacaagcaggtgacgtggaggagaatcccgggcctactagtatggactggatttggcgcatccttttccttgtcggcgctgctaccggcgcgcattccttcgaacaagaagtgacacagatccctgccgctctgtctgtgcctgagggcgaaaacctggtgctgaactgctccttcaccgacagcgccatctacaacctccagtggttcaggcaggaccctggaaagggactgacaagcctgctgctgatccagagcagccagagagagcagacctccggcagactgaatgccagcctggataagagcagcggcaggtctaccctgtatatcgccgcttctcagcctggcgatagcgccacatatctgtgtgctgtgcggcctacaagcggcggcagctacatccctacatttggcagaggcaccagcctgatcgtgcacccttatacgcgtatccagaaccctgatcctgccgtgtaccagctgcgggatagcaagagcagcgacaagagcgtgtgtctgttcaccgacttcgacagccagaccaacgtgtcccagagcaaggactccgacgtgtacatcaccgataagaccgtgctggacatgcggagcatggacttcaagagcaactccgccgtggcctggtccaacaagtccgatttcgcctgcgccaacgccttcaacaacagcattatccccgaggacacattcttcccaagccccgagagcagctgcggtacccagagttttgggttgttggaccctaaattgtgctatctgttggacggaatcctgttcatttacggagtgatcctgaccgcattgttcctgcgggttaagttttccagatccgcagacgcacccgcttaccaacaagggcagaaccaactctacaatgaacttaatttggggcggagggaagagtacgacgttctggacaaaaggaggggacgagatcccgagatgggcggaaagcctcagcgaaggaagaatccgcaagaggggctttataacgaactccagaaagataaaatggcagaagcctatagtgagattgggatgaagggagaaaggaggaggggtaaaggtcacgatgggttgtaccaaggattgagcacagccactaaagatacctatgatgcgctccacatgcaggccctgccgccaagataa

SEQ ID NO: 1001 - DNA, 1962 bp, synthetic construct
  source 1..1962: mol_type = other DNA
atggccttaccagtgaccgccttgctcctgccgctggccttgctgctccacgccgccaggccggacatccagatgacacagagccctagcagcctgtctgccagcgtgggagacagagtgaccatcacatgcaaggccagcgaccacatcaacaactggctggcctggtatcagcagaagcctggacaggcccctaagctgctgatctacggcgctaccacactggaaacaggcgtgcccagcagattttctggcagcggctctggcaccgactacaccctgacaatatccagcctccagcctgaggacttcgccacctactactgtcagcagagctggaacaccccttggacattcggccagggcaccaagctggaaatcaagagactcgagggacagcctaaggccaatcctaccgtgacactgttccctccaagcagcgaagaactccaggccaacaaggccacacttgtgtgcctgatctccgacttctaccctggggctgtgacagtggcttggaaggccgatggatctcctgtgaaagccggcgtggaaaccaccaagccatccaagcagagcaacaacaaatacgccgccagctcctacctgagcctgacacctgagcagtggaagtcccacagatcctacagctgccaagtgacccacgaaggcagcaccgtggaaaagacagtggcccctacagagtgcagcggatccctgggagagcctcagctgtgctatatcctggacgccatcctgtttctgtacggcatcgtgctgaccctgctgtactgccggctgaagatccaagtgcggaaggccgccatcaccagctacgagaaatccgacggcgtgtacaccggcctgagcaccagaaatcaagagacatacgagacactgaagcacgaaaagcctccacaaagggccaagcgatctggatctggagcaacaaacttctcactactcaaacaagcaggtgacgtggaggagaatcccgggcctactagtatggactggatttggcgcatccttttccttgtcggcgctgctaccggcgcgcattccttcgaacaagttcagcttcaacagcctggcgctgagctggtcaaacctggcgcttctgtgaagatgagctgcaaagccagcggctacgccttcagcagctactggatcaactggatgaagcagaaacccggccagggactcgaatggatcggccaaatctatcccggcgacggcgacaccaactacaacggcaagttcaagggcagagccacactgaccgccgatacctctagcagcacagcctacatgcagctgagcagcctgaccagcgaagatagcgccgtgtacttctgtgcccggtccatcacaacagtcgtgggctgcgctatggactattggggccagggaacaagcgtgaccgtgtctagtacgcgtgcctctacaaagggaccctccgtgtttcctctggctcccagcagcaagtctacaagcggaggaacagccgctctgggctgcctggtcaaggattactttcccgagcctgtgaccgtgtcctggaatagcggagcactgacaagcggcgtgcacacctttccagccgtgctgcaaagcagcggcctgtactctctgagcagcgtggtcacagtgcctagctctagcctgggcacccagacctacatctgcaatgtgaaccacaagcctagcaacaccaaggtggacaagagagtggaacccaagagctgtggtaccctcggagaaccacagctctgttacattctggatgctatcctgttcctctatgggatcgtcctgacactcctgtattgcagactcaaaattcaagttcgcaaagccgccattacctcttacgagaagagtgatggggtgtacacaggactgtctacccggaatcaagaaacctacgaaaccctcaaacatgagaagccacctcagtaa

SEQ ID NO: 1002 - DNA, 2703 bp, synthetic construct
  source 1..2703: mol_type = other DNA
atggccttaccagtgaccgccttgctcctgccgctggccttgctgctccacgccgccaggccggacatccagatgacacagagccctagcagcctgtctgccagcgtgggagacagagtgaccatcacatgcaaggccagcgaccacatcaacaactggctggcctggtatcagcagaagcctggacaggcccctaagctgctgatctacggcgctaccacactggaaacaggcgtgcccagcagattttctggcagcggctctggcaccgactacaccctgacaatatccagcctccagcctgaggacttcgccacctactactgtcagcagagctggaacaccccttggacattcggccagggcaccaagctggaaatcaagagactcgaggacctgaagaacgtgttcccacctgaggtggccgtgttcgagcctagcgaggccgagatcagccacacccagaaagccaccctcgtgtgcctggctaccggcttctaccccgaccatgtggaactgtcttggtgggtcaacggcaaagaggtgcacagcggcgtgtctaccgacccccagccactgaaagaacagcccgccctgaacgacagccggtactgcctgagcagcagactgagagtgtccgccaccttctggcagaacccccggaaccacttcagatgccaggtgcagttctacggcctgagcgagaacgacgagtggacccaggacagagccaagcccgtgacccagatcgtgtctgccgaagcctggggcagagccgattgcggatcccagagcttcggcctgctggaccccaagctgtgctacctgctggatggcatcctgttcatctacggcgtgatcctgaccgccctgttcctgaggagtaagaggagcaggctcctgcacagtgactacatgaacatgactccacgccgccccggacccacccgcaagcattaccagccctatgccccaccacgcgacttcgcagcctatcgctccagagtgaagttcagcagaagcgccgacgcccctgcctaccagcagggacagaaccaactgtacaacgagctgaacctgggcagacgggaagagtacgacgtgctggacaagcggagaggcagggaccctgagatgggcggaaagccccagcggagaaagaacccccaggaaggactgtataacgaactccagaaagacaagatggccgaagcctacagcgagatcggcatgaagggcgagcggagaagaggcaagggccacgatggcctgtaccagggcctgagcaccgccaccaaggacacctatgacgccctgcacatgcaggccctgcctccaagaagggccaagcgatctggatctggagcaacaaacttctcactactcaaacaagcaggtgacgtggaggagaatcccgggcctactagtatggactggatttggcgcatccttttccttgtcggcgctgctaccggcgcgcattccttcgaacaagttcagcttcaacagcctggcgctgagctggtcaaacctggcgcttctgtgaagatgagctgcaaagccagcggctacgccttcagcagctactggatcaactggatgaagcagaaacccggccagggactcgaatggatcggccaaatctatcccggcgacggcgacaccaactacaacggcaagttcaagggcagagccacactgaccgccgatacctctagcagcacagcctacatgcagctgagcagcctgaccagcgaagatagcgccgtgtacttctgtgcccggtccatcacaacagtcgtgggctgcgctatggactattggggccagggaacaagcgtgaccgtgtctagtacgcgtatccagaaccctgatcctgccgtgtaccagctgcgggatagcaagagcagcgacaagagcgtgtgtctgttcaccgacttcgacagccagaccaacgtgtcccagagcaaggactccgacgtgtacatcaccgataagaccgtgctggacatgcggagcatggacttcaagagcaactccgccgtggcctggtccaacaagtccgatttcgcctgcgccaacgccttcaacaacagcattatccccgaggacacattcttcccaagccccgagagcagctgcggtacccagagttttgggttgttggaccctaaattgtgctatctgttggacggaatcctgttcatttacggagtgatcctgaccgcattgttcctgaggagcaagcggtcacggctgctccacagcgattacatgaatatgacaccacgaagaccgggtcctactcgcaaacactaccaaccctacgcacctccccgcgactttgcagcgtaccgatctcgggttaagttttccagatccgcagacgcacccgcttaccaacaagggcagaaccaactctacaatgaacttaatttggggcggagggaagagtacgacgttctggacaaaaggaggggacgagatcccgagatgggcggaaagcctcagcgaaggaagaatccgcaagaggggctttataacgaactccagaaagataaaatggcagaagcctatagtgagattgggatgaagggagaaaggaggaggggtaaaggtcacgatgggttgtaccaaggattgagcacagccactaaagatacctatgatgcgctccacatgcaggccctgccgccaagataa

SEQ ID NO: 1003 - DNA, 2610 bp, synthetic construct
  source 1..2610: mol_type = other DNA
atggccttaccagtgaccgccttgctcctgccgctggccttgctgctccacgccgccaggccggacatccagatgacacagagccctagcagcctgtctgccagcgtgggagacagagtgaccatcacatgcaaggccagcgaccacatcaacaactggctggcctggtatcagcagaagcctggacaggcccctaagctgctgatctacggcgctaccacactggaaacaggcgtgcccagcagattttctggcagcggctctggcaccgactacaccctgacaatatccagcctccagcctgaggacttcgccacctactactgtcagcagagctggaacaccccttggacattcggccagggcaccaagctggaaatcaagagactcgaggacctgaagaacgtgttcccacctgaggtggccgtgttcgagcctagcgaggccgagatcagccacacccagaaagccaccctcgtgtgcctggctaccggcttctaccccgaccatgtggaactgtcttggtgggtcaacggcaaagaggtgcacagcggcgtgtctaccgacccccagccactgaaagaacagcccgccctgaacgacagccggtactgcctgagcagcagactgagagtgtccgccaccttctggcagaacccccggaaccacttcagatgccaggtgcagttctacggcctgagcgagaacgacgagtggacccaggacagagccaagcccgtgacccagatcgtgtctgccgaagcctggggcagagccgattgcggatcccagagcttcggcctgctggaccccaagctgtgctacctgctggatggcatcctgttcatctacggcgtgatcctgaccgccctgttcctgaaacggggcagaaagaaactcctgtatatattcaaacaaccatttatgagaccagtacaaactactcaagaggaagatggctgtagctgccgatttccagaagaagaagaaggaggatgtgaactgagagtgaagttcagcagaagcgccgacgcccctgcctaccagcagggacagaaccaactgtacaacgagctgaacctgggcagacgggaagagtacgacgtgctggacaagcggagaggcagggaccctgagatgggcggaaagccccagcggagaaagaacccccaggaaggactgtataacgaactccagaaagacaagatggccgaagcctacagcgagatcggcatgaagggcgagcggagaagaggcaagggccacgatggcctgtaccagggcctgagcaccgccaccaaggacacctatgacgccctgcacatgcaggccctgcctccaagaagggccaagcgatctggatctggagcaacaaacttctcactactcaaacaagcaggtgacgtggaggagaatcccgggcctactagtatggactggatttggcgcatccttttccttgtcggcgctgctaccggcgcgcattccttcgaacaagttcagcttcaacagcctggcgctgagctggtcaaacctggcgcttctgtgaagatgagctgcaaagccagcggctacgccttcagcagctactggatcaactggatgaagcagaaacccggccagggactcgaatggatcggccaaatctatcccggcgacggcgacaccaactacaacggcaagttcaagggcagagccacactgaccgccgatacctctagcagcacagcctacatgcagctgagcagcctgaccagcgaagatagcgccgtgtacttctgtgcccggtccatcacaacagtcgtgggctgcgctatggactattggggccagggaacaagcgtgaccgtgtctagtacgcgtatccagaaccctgatcctgccgtgtaccagctgcgggatagcaagagcagcgacaagagcgtgtgtctgttcaccgacttcgacagccagaccaacgtgtcccagagcaaggactccgacgtgtacatcaccgataagaccgtgctggacatgcggagcatggacttcaagagcaactccgccgtggcctggtccaacaagtccgatttcgcctgcgccaacgccttcaacaacagcattatccccgaggacacattcttcccaagccccgagagcagctgcggtacccagagttttgggttgttggaccctaaattgagctatctgttggacggaatcctgttcatttacggagtgatcctgaccgcattgttcctgtggcgacgcaagcgcaaagaaaagcaaagcgagacaagcccaaaagaatttctcactatatacgaggacgtgaaagatttgaagacgaggcggaatcatgagcaagagcagacatttcctggcgggggctctactatctactcaatgattcaatcccaaagctccgctccgacttcccaagagcccgcttacactctctactcactgatacagccttcaagaaaatcaggctctcggaaacggaatcattccccatccttcaatagtaccatctatgaagtaatcggtaagagtcaacctaaagctcaaaaccccgctcgcttgagccgcaaggagctggaaaacttcgatgtatatagctctagataa

SEQ ID NO: 1004 - DNA, 2607 bp, synthetic construct
  source 1..2607: mol_type = other DNA
atggccttaccagtgaccgccttgctcctgccgctggccttgctgctccacgccgccaggccggacatccagatgacacagagccctagcagcctgtctgccagcgtgggagacagagtgaccatcacatgcaaggccagcgaccacatcaacaactggctggcctggtatcagcagaagcctggacaggcccctaagctgctgatctacggcgctaccacactggaaacaggcgtgcccagcagattttctggcagcggctctggcaccgactacaccctgacaatatccagcctccagcctgaggacttcgccacctactactgtcagcagagctggaacaccccttggacattcggccagggcaccaagctggaaatcaagagactcgaggacctgaagaacgtgttcccacctgaggtggccgtgttcgagcctagcgaggccgagatcagccacacccagaaagccaccctcgtgtgcctggctaccggcttctaccccgaccatgtggaactgtcttggtgggtcaacggcaaagaggtgcacagcggcgtgtctaccgacccccagccactgaaagaacagcccgccctgaacgacagccggtactgcctgagcagcagactgagagtgtccgccaccttctggcagaacccccggaaccacttcagatgccaggtgcagttctacggcctgagcgagaacgacgagtggacccaggacagagccaagcccgtgacccagatcgtgtctgccgaagcctggggcagagccgattgcggatcccagagcttcggcctgctggaccccaagctgtgctacctgctggatggcatcctgttcatctacggcgtgatcctgaccgccctgttcctgaggagtaagaggagcaggctcctgcacagtgactacatgaacatgactccacgccgccccggacccacccgcaagcattaccagccctatgccccaccacgcgacttcgcagcctatcgctccagagtgaagttcagcagaagcgccgacgcccctgcctaccagcagggacagaaccaactgtacaacgagctgaacctgggcagacgggaagagtacgacgtgctggacaagcggagaggcagggaccctgagatgggcggaaagccccagcggagaaagaacccccaggaaggactgtataacgaactccagaaagacaagatggccgaagcctacagcgagatcggcatgaagggcgagcggagaagaggcaagggccacgatggcctgtaccagggcctgagcaccgccaccaaggacacctatgacgccctgcacatgcaggccctgcctccaagaagggccaagcgatctggatctggagcaacaaacttctcactactcaaacaagcaggtgacgtggaggagaatcccgggcctactagtatggactggatttggcgcatccttttccttgtcggcgctgctaccggcgcgcattccttcgaacaagttcagcttcaacagcctggcgctgagctggtcaaacctggcgcttctgtgaagatgagctgcaaagccagcggctacgccttcagcagctactggatcaactggatgaagcagaaacccggccagggactcgaatggatcggccaaatctatcccggcgacggcgacaccaactacaacggcaagttcaagggcagagccacactgaccgccgatacctctagcagcacagcctacatgcagctgagcagcctgaccagcgaagatagcgccgtgtacttctgtgcccggtccatcacaacagtcgtgggctgcgctatggactattggggccagggaacaagcgtgaccgtgtctagtacgcgtatccagaaccctgatcctgccgtgtaccagctgcgggatagcaagagcagcgacaagagcgtgtgtctgttcaccgacttcgacagccagaccaacgtgtcccagagcaaggactccgacgtgtacatcaccgataagaccgtgctggacatgcggagcatggacttcaagagcaactccgccgtggcctggtccaacaagtccgatttcgcctgcgccaacgccttcaacaacagcattatccccgaggacacattcttcccaagccccgagagcagctgcggtacccagagttttgggttgttggaccctaaattgagctatctgttggacggaatcctgttcatttacggagtgatcctgaccgcattgttcctgtggcgacgcaagcgcaaagaaaagcaaagcgagacaagcccaaaagaatttctcactatatacgaggacgtgaaagatttgaagacgaggcggaatcatgagcaagagcagacatttcctggcgggggctctactatctactcaatgattcaatcccaaagctccgctccgacttcccaagagcccgcttacactctctactcactgatacagccttcaagaaaatcaggctctcggaaacggaatcattccccatccttcaatagtaccatctatgaagtaatcggtaagagtcaacctaaagctcaaaaccccgctcgcttgagccgcaaggagctggaaaacttcgatgtatatagctctagataa

SEQ ID NO: 1005 - DNA, 3129 bp, synthetic construct
  source 1..3129: mol_type = other DNA
atggccttaccagtgaccgccttgctcctgccgctggccttgctgctccacgccgccaggccgggcgttacccagacacctaagttccaggtgctgaaaaccggccagagcatgaccctgcaatgcgcccaggacatgaaccatgagtacatgagctggtacagacaggaccccggcatgggcctgagactgatccactactctgtggctatccagaccaccgaccagggcgaagtgcccaatggctacaacgtgtccagaagcaccatcgaggacttcccactgagactgctgtctgccgctcctagccagaccagcgtgtacttttgtgccagcagctacgtgggcgataccggcgagctgttctttggcgaaggcagcagactgaccgtgctcgaggacctgaagaacgtgttcccacctgaggtggccgtgttcgagcctagcaaggccgagatcagcagaacccagaaagccaccctcgtgtgcctggctaccggcttctaccctcctcatgtggaactgtcttggtgggtcaacggcaaagaggtgcacgacggcgtgtgtaccgacccccagccactgaaagaacagcccgccctgaacgacagccggtactgcctgagcagcagactgagagtgtccgccaccttctggcagaacccccggaaccacttcagatgccaggtgcagttctacggcctgagcgagaacgacgagtggacccaggacagagccaagcccgtgacccagatcgtgtctgccgaagcctggggcagagccgattgcggatcccagagcttcggcctgctggaccccaagctgtgctacctgctggatggcatcctgttcatctacggcgtgatcctgaccgccctgttcctgagagtgaagttcagcagaagcgccgacgcccctgcctaccagcagggacagaaccaactgtacaacgagctgaacctgggcagacgggaagagtacgacgtgctggacaagcggagaggcagggaccctgagatgggcggaaagccccagcggagaaagaacccccaggaaggactgtataacgaactccagaaagacaagatggccgaagcctacagcgagatcggcatgaagggcgagcggagaagaggcaagggccacgatggcctgtaccagggcctgagcaccgccaccaaggacacctatgacgccctgcacatgcaggccctgcctccaagaagggccaagcgatctggatctggagcaacaaacttctcactactcaaacaagcaggtgacgtggaggagaatcccgggcctactagtatggactggatttggcgcatccttttccttgtcggcgctgctaccggcgcccattcccaagaagtgacacagatccctgccgctctgtctgtgcctgagggcgaaaacctggtgctgaactgctccttcaccgacagcgccatctacaacctccagtggttcagacaggaccccggcaagggactgacaagcctgctgcttattagcccctggcagagagagcagaccagcggcagactgaatgccagcctggataagtcctccggcagaagcaccctgtatatcgccgcttctcagcctggcgatagcgccacatatctgtgtgccgtcagacccctgctggacggcacatatatccccacctttggcagaggcaccagcctgatcgtgcacccctacatccagaaccctgatcctgccgtgtaccagctgcgggatagcaagagcagcgacaagttcgtgtgtctgttcaccgacttcgacagccagatcaacgtgtcccagagcaaggactccgacgtgtacatcaccgataagtgcgtgctggacatgcggagcatggacttcaagagcaactccgccgtggcctggtccaacaagtccgatttcacctgcgccaacgccttcaacaacagcattatccccgaggacacattcttcccaagccccgagagcagctgcggtacccagagttttgggttgttggaccctaaattgtgctatctgttggacggaatcctgttcatttacggagtgatcctgaccgcattgttcctgcgggttaagttttccagatccgcagacgcacccgcttaccaacaagggcagaaccaactctacaatgaacttaatttggggcggagggaagagtacgacgttctggacaaaaggaggggacgagatcccgagatgggcggaaagcctcagcgaaggaagaatccgcaagaggggctttataacgaactccagaaagataaaatggcagaagcctatagtgagattgggatgaagggagaaaggaggaggggtaaaggtcacgatgggttgtaccaaggattgagcacagccactaaagatacctatgatgcgctccacatgcaggccctgccgccaagacgcgccaagagaagcggatctggcgtgaagcagaccctgaatttcgacctgctgaagctggctggcgacgtggaatccaacccaggcccttctagaggccatatgaccgagtacaagcccacggtgcgcctcgccacccgcgacgacgtccccagggccgtacgcaccctcgccgccgcgttcgccgactaccccgccacgcgccacaccgtcgatccggaccgccacatcgagcgggtcaccgagctgcaagaactcttcctcacgcgcgtcgggctcgacatcggcaaggtgtgggtcgcggacgacggcgccgcggtggcggtctggaccacgccggagagcgtcgaagcgggggcggtgttcgccgagatcggcccgcgcatggccgagttgagcggttcccggctggccgcgcagcaacagatggaaggcctcctggcgccgcaccggcccaaggagcccgcgtggttcctggccaccgtcggcgtctcgcccgaccaccagggcaagggtctgggcagcgccgtcgtgctccccggagtggaggcggccgagcgcgccggggtgcccgccttcctggagacctccgcgccccgcaacctccccttctacgagcggctcggcttcaccgtcaccgccgacgtcgaggtgcccgaaggaccgcgcacctggtgcatgacccgcaagcccggtgcctga

SEQ ID NO: 1006 - DNA, 2370 bp, synthetic construct
  source 1..2370: mol_type = other DNA
atggccttaccagtgaccgccttgctcctgccgctggccttgctgctccacgccgccaggccggacatccagatgacacagagccctagcagcctgtctgccagcgtgggagacagagtgaccatcacatgcaaggccagcgaccacatcaacaactggctggcctggtatcagcagaagcctggacaggcccctaagctgctgatctacggcgctaccacactggaaacaggcgtgcccagcagattttctggcagcggctctggcaccgactacaccctgacaatatccagcctccagcctgaggacttcgccacctactactgtcagcagagctggaacaccccttggacattcggccagggcaccaagctggaaatcaagagactcgaggacctgaagaacgtgttcccacctgaggtggccgtgttcgagcctagcgaggccgagatcagccacacccagaaagccaccctcgtgtgcctggctaccggcttctaccccgaccatgtggaactgtcttggtgggtcaacggcaaagaggtgcacagcggcgtgtctaccgacccccagccactgaaagaacagcccgccctgaacgacagccggtactgcctgagcagcagactgagagtgtccgccaccttctggcagaacccccggaaccacttcagatgccaggtgcagttctacggcctgagcgagaacgacgagtggacccaggacagagccaagcccgtgacccagatcgtgtctgccgaagcctggggcagagccgattgcggatcccagagcttcggcctgctggaccccaagctgtgctacctgctggatggcatcctgttcatctacggcgtgatcctgaccgccctgttcctgaaacggggcagaaagaaactcctgtatatattcaaacaaccatttatgagaccagtacaaactactcaagaggaagatggctgtagctgccgatttccagaagaagaagaaggaggatgtgaactgagagtgaagttcagcagaagcgccgacgcccctgcctaccagcagggacagaaccaactgtacaacgagctgaacctgggcagacgggaagagtacgacgtgctggacaagcggagaggcagggaccctgagatgggcggaaagccccagcggagaaagaacccccaggaaggactgtataacgaactccagaaagacaagatggccgaagcctacagcgagatcggcatgaagggcgagcggagaagaggcaagggccacgatggcctgtaccagggcctgagcaccgccaccaaggacacctatgacgccctgcacatgcaggccctgcctccaagaagggccaagcgatctggatctggagcaacaaacttctcactactcaaacaagcaggtgacgtggaggagaatcccgggcctactagtatggactggatttggcgcatccttttccttgtcggcgctgctaccggcgcgcattccttcgaacaagttcagcttcaacagcctggcgctgagctggtcaaacctggcgcttctgtgaagatgagctgcaaagccagcggctacgccttcagcagctactggatcaactggatgaagcagaaacccggccagggactcgaatggatcggccaaatctatcccggcgacggcgacaccaactacaacggcaagttcaagggcagagccacactgaccgccgatacctctagcagcacagcctacatgcagctgagcagcctgaccagcgaagatagcgccgtgtacttctgtgcccggtccatcacaacagtcgtgggctgcgctatggactattggggccagggaacaagcgtgaccgtgtctagtacgcgtatccagaaccctgatcctgccgtgtaccagctgcgggatagcaagagcagcgacaagagcgtgtgtctgttcaccgacttcgacagccagaccaacgtgtcccagagcaaggactccgacgtgtacatcaccgataagaccgtgctggacatgcggagcatggacttcaagagcaactccgccgtggcctggtccaacaagtccgatttcgcctgcgccaacgccttcaacaacagcattatccccgaggacacattcttcccaagccccgagagcagctgcggtacccagagttttgggttgttggaccctaaattgtgctatctgttggacggaatcctgttcatttacggagtgatcctgaccgcattgttcctgaagagaggccggaagaagctgctgtacatcttcaagcagcctttcatgcggcccgtgcagaccacccaggaagaggacggctgctcctgccggttccccgaggaagaagaaggcggctgcgagctgtaa

SEQ ID NO: 1007 - DNA, 2367 bp, synthetic construct
  source 1..2367: mol_type = other DNA
atggccttaccagtgaccgccttgctcctgccgctggccttgctgctccacgccgccaggccggacatccagatgacacagagccctagcagcctgtctgccagcgtgggagacagagtgaccatcacatgcaaggccagcgaccacatcaacaactggctggcctggtatcagcagaagcctggacaggcccctaagctgctgatctacggcgctaccacactggaaacaggcgtgcccagcagattttctggcagcggctctggcaccgactacaccctgacaatatccagcctccagcctgaggacttcgccacctactactgtcagcagagctggaacaccccttggacattcggccagggcaccaagctggaaatcaagagactcgaggacctgaagaacgtgttcccacctgaggtggccgtgttcgagcctagcgaggccgagatcagccacacccagaaagccaccctcgtgtgcctggctaccggcttctaccccgaccatgtggaactgtcttggtgggtcaacggcaaagaggtgcacagcggcgtgtctaccgacccccagccactgaaagaacagcccgccctgaacgacagccggtactgcctgagcagcagactgagagtgtccgccaccttctggcagaacccccggaaccacttcagatgccaggtgcagttctacggcctgagcgagaacgacgagtggacccaggacagagccaagcccgtgacccagatcgtgtctgccgaagcctggggcagagccgattgcggatcccagagcttcggcctgctggaccccaagctgtgctacctgctggatggcatcctgttcatctacggcgtgatcctgaccgccctgttcctgaggagtaagaggagcaggctcctgcacagtgactacatgaacatgactccacgccgccccggacccacccgcaagcattaccagccctatgccccaccacgcgacttcgcagcctatcgctccagagtgaagttcagcagaagcgccgacgcccctgcctaccagcagggacagaaccaactgtacaacgagctgaacctgggcagacgggaagagtacgacgtgctggacaagcggagaggcagggaccctgagatgggcggaaagccccagcggagaaagaacccccaggaaggactgtataacgaactccagaaagacaagatggccgaagcctacagcgagatcggcatgaagggcgagcggagaagaggcaagggccacgatggcctgtaccagggcctgagcaccgccaccaaggacacctatgacgccctgcacatgcaggccctgcctccaagaagggccaagcgatctggatctggagcaacaaacttctcactactcaaacaagcaggtgacgtggaggagaatcccgggcctactagtatggactggatttggcgcatccttttccttgtcggcgctgctaccggcgcgcattccttcgaacaagttcagcttcaacagcctggcgctgagctggtcaaacctggcgcttctgtgaagatgagctgcaaagccagcggctacgccttcagcagctactggatcaactggatgaagcagaaacccggccagggactcgaatggatcggccaaatctatcccggcgacggcgacaccaactacaacggcaagttcaagggcagagccacactgaccgccgatacctctagcagcacagcctacatgcagctgagcagcctgaccagcgaagatagcgccgtgtacttctgtgcccggtccatcacaacagtcgtgggctgcgctatggactattggggccagggaacaagcgtgaccgtgtctagtacgcgtatccagaaccctgatcctgccgtgtaccagctgcgggatagcaagagcagcgacaagagcgtgtgtctgttcaccgacttcgacagccagaccaacgtgtcccagagcaaggactccgacgtgtacatcaccgataagaccgtgctggacatgcggagcatggacttcaagagcaactccgccgtggcctggtccaacaagtccgatttcgcctgcgccaacgccttcaacaacagcattatccccgaggacacattcttcccaagccccgagagcagctgcggtacccagagttttgggttgttggaccctaaattgtgctatctgttggacggaatcctgttcatttacggagtgatcctgaccgcattgttcctgaagagaggccggaagaagctgctgtacatcttcaagcagcctttcatgcggcccgtgcagaccacccaggaagaggacggctgctcctgccggttccccgaggaagaagaaggcggctgcgagctgtaa

SEQ ID NO: 1008 - DNA, 2364 bp, synthetic construct
  source 1..2364: mol_type = other DNA
atggccttaccagtgaccgccttgctcctgccgctggccttgctgctccacgccgccaggccggacatccagatgacacagagccctagcagcctgtctgccagcgtgggagacagagtgaccatcacatgcaaggccagcgaccacatcaacaactggctggcctggtatcagcagaagcctggacaggcccctaagctgctgatctacggcgctaccacactggaaacaggcgtgcccagcagattttctggcagcggctctggcaccgactacaccctgacaatatccagcctccagcctgaggacttcgccacctactactgtcagcagagctggaacaccccttggacattcggccagggcaccaagctggaaatcaagagactcgaggacctgaagaacgtgttcccacctgaggtggccgtgttcgagcctagcgaggccgagatcagccacacccagaaagccaccctcgtgtgcctggctaccggcttctaccccgaccatgtggaactgtcttggtgggtcaacggcaaagaggtgcacagcggcgtgtctaccgacccccagccactgaaagaacagcccgccctgaacgacagccggtactgcctgagcagcagactgagagtgtccgccaccttctggcagaacccccggaaccacttcagatgccaggtgcagttctacggcctgagcgagaacgacgagtggacccaggacagagccaagcccgtgacccagatcgtgtctgccgaagcctggggcagagccgattgcggatcccagagcttcggcctgctggaccccaagctgtgctacctgctggatggcatcctgttcatctacggcgtgatcctgaccgccctgttcctgaggagtaagaggagcaggctcctgcacagtgactacatgaacatgactccacgccgccccggacccacccgcaagcattaccagccctatgccccaccacgcgacttcgcagcctatcgctccagagtgaagttcagcagaagcgccgacgcccctgcctaccagcagggacagaaccaactgtacaacgagctgaacctgggcagacgggaagagtacgacgtgctggacaagcggagaggcagggaccctgagatgggcggaaagccccagcggagaaagaacccccaggaaggactgtataacgaactccagaaagacaagatggccgaagcctacagcgagatcggcatgaagggcgagcggagaagaggcaagggccacgatggcctgtaccagggcctgagcaccgccaccaaggacacctatgacgccctgcacatgcaggccctgcctccaagaagggccaagcgatctggatctggagcaacaaacttctcactactcaaacaagcaggtgacgtggaggagaatcccgggcctactagtatggactggatttggcgcatccttttccttgtcggcgctgctaccggcgcgcattccttcgaacaagttcagcttcaacagcctggcgctgagctggtcaaacctggcgcttctgtgaagatgagctgcaaagccagcggctacgccttcagcagctactggatcaactggatgaagcagaaacccggccagggactcgaatggatcggccaaatctatcccggcgacggcgacaccaactacaacggcaagttcaagggcagagccacactgaccgccgatacctctagcagcacagcctacatgcagctgagcagcctgaccagcgaagatagcgccgtgtacttctgtgcccggtccatcacaacagtcgtgggctgcgctatggactattggggccagggaacaagcgtgaccgtgtctagtacgcgtatccagaaccctgatcctgccgtgtaccagctgcgggatagcaagagcagcgacaagagcgtgtgtctgttcaccgacttcgacagccagaccaacgtgtcccagagcaaggactccgacgtgtacatcaccgataagaccgtgctggacatgcggagcatggacttcaagagcaactccgccgtggcctggtccaacaagtccgatttcgcctgcgccaacgccttcaacaacagcattatccccgaggacacattcttcccaagccccgagagcagctgcggtacccagagttttgggttgttggaccctaaattgtgctatctgttggacggaatcctgttcatttacggagtgatcctgaccgcattgttcctgaggagcaagcggtcacggctgctccacagcgattacatgaatatgacaccacgaagaccgggtcctactcgcaaacactaccaaccctacgcacctccccgcgactttgcagcgtaccgatcttaa

SEQ ID NO: 1009 - DNA, 2361 bp, synthetic construct
  source 1..2361: mol_type = other DNA
atggccttaccagtgaccgccttgctcctgccgctggccttgctgctccacgccgccaggccggaattcaatgctggcgtgacccagacacctaagttccaggtgctgaaaaccggccagagcatgaccctgcaatgcgcccaggacatgaaccatgagtacatgagctggtacagacaggaccccggcatgggcctgagactgatccactactctgtggctatccagaccaccgaccagggcgaagtgcccaatggctacaacgtgtccagaagcaccatcgaggacttcccactgagactgctgtctgccgctcctagccagaccagcgtgtacttttgtgccagcagctacctgggcaacaccggcgagctgttttttggcgagggcagcagactgaccgtgctcgaggacctgaagaacgtgttcccacctgaggtggccgtgttcgagcctagcgaggccgagatcagccacacccagaaagccaccctcgtgtgcctggctaccggcttctaccccgaccatgtggaactgtcttggtgggtcaacggcaaagaggtgcacagcggcgtgtctaccgacccccagccactgaaagaacagcccgccctgaacgacagccggtactgcctgagcagcagactgagagtgtccgccaccttctggcagaacccccggaaccacttcagatgccaggtgcagttctacggcctgagcgagaacgacgagtggacccaggacagagccaagcccgtgacccagatcgtgtctgccgaagcctggggcagagccgattgcggatcccagagcttcggcctgctggaccccaagctgtgctacctgctggatggcatcctgttcatctacggcgtgatcctgaccgccctgttcctgaggagtaagaggagcaggctcctgcacagtgactacatgaacatgactccacgccgccccggacccacccgcaagcattaccagccctatgccccaccacgcgacttcgcagcctatcgctccagagtgaagttcagcagaagcgccgacgcccctgcctaccagcagggacagaaccaactgtacaacgagctgaacctgggcagacgggaagagtacgacgtgctggacaagcggagaggcagggaccctgagatgggcggaaagccccagcggagaaagaacccccaggaaggactgtataacgaactccagaaagacaagatggccgaagcctacagcgagatcggcatgaagggcgagcggagaagaggcaagggccacgatggcctgtaccagggcctgagcaccgccaccaaggacacctatgacgccctgcacatgcaggccctgcctccaagaagggccaagcgatctggatctggagcaacaaacttctcactactcaaacaagcaggtgacgtggaggagaatcccgggcctactagtatggactggatttggcgcatccttttccttgtcggcgctgctaccggcgcgcattccttcgaacaagaagtgacacagatccctgccgctctgtctgtgcctgagggcgaaaacctggtgctgaactgctccttcaccgacagcgccatctacaacctccagtggttcaggcaggaccctggaaagggactgacaagcctgctgctgatccagagcagccagagagagcagacctccggcagactgaatgccagcctggataagagcagcggcaggtctaccctgtatatcgccgcttctcagcctggcgatagcgccacatatctgtgtgctgtgcggcctacaagcggcggcagctacatccctacatttggcagaggcaccagcctgatcgtgcacccttatacgcgtatccagaaccctgatcctgccgtgtaccagctgcgggatagcaagagcagcgacaagagcgtgtgtctgttcaccgacttcgacagccagaccaacgtgtcccagagcaaggactccgacgtgtacatcaccgataagaccgtgctggacatgcggagcatggacttcaagagcaactccgccgtggcctggtccaacaagtccgatttcgcctgcgccaacgccttcaacaacagcattatccccgaggacacattcttcccaagccccgagagcagctgcggtacccagagttttgggttgttggaccctaaattgtgctatctgttggacggaatcctgttcatttacggagtgatcctgaccgcattgttcctgaggagcaagcggtcacggctgctccacagcgattacatgaatatgacaccacgaagaccgggtcctactcgcaaacactaccaaccctacgcacctccccgcgactttgcagcgtaccgatcttaa

SEQ ID NO: 1010 - DNA, 2367 bp, synthetic construct
  source 1..2367: mol_type = other DNA
atggccttaccagtgaccgccttgctcctgccgctggccttgctgctccacgccgccaggccggacatccagatgacacagagccctagcagcctgtctgccagcgtgggagacagagtgaccatcacatgcaaggccagcgaccacatcaacaactggctggcctggtatcagcagaagcctggacaggcccctaagctgctgatctacggcgctaccacactggaaacaggcgtgcccagcagattttctggcagcggctctggcaccgactacaccctgacaatatccagcctccagcctgaggacttcgccacctactactgtcagcagagctggaacaccccttggacattcggccagggcaccaagctggaaatcaagagactcgaggacctgaagaacgtgttcccacctgaggtggccgtgttcgagcctagcgaggccgagatcagccacacccagaaagccaccctcgtgtgcctggctaccggcttctaccccgaccatgtggaactgtcttggtgggtcaacggcaaagaggtgcacagcggcgtgtctaccgacccccagccactgaaagaacagcccgccctgaacgacagccggtactgcctgagcagcagactgagagtgtccgccaccttctggcagaacccccggaaccacttcagatgccaggtgcagttctacggcctgagcgagaacgacgagtggacccaggacagagccaagcccgtgacccagatcgtgtctgccgaagcctggggcagagccgattgcggatcccagagcttcggcctgctggaccccaagctgtgctacctgctggatggcatcctgttcatctacggcgtgatcctgaccgccctgttcctgaaacggggcagaaagaaactcctgtatatattcaaacaaccatttatgagaccagtacaaactactcaagaggaagatggctgtagctgccgatttccagaagaagaagaaggaggatgtgaactgagagtgaagttcagcagaagcgccgacgcccctgcctaccagcagggacagaaccaactgtacaacgagctgaacctgggcagacgggaagagtacgacgtgctggacaagcggagaggcagggaccctgagatgggcggaaagccccagcggagaaagaacccccaggaaggactgtataacgaactccagaaagacaagatggccgaagcctacagcgagatcggcatgaagggcgagcggagaagaggcaagggccacgatggcctgtaccagggcctgagcaccgccaccaaggacacctatgacgccctgcacatgcaggccctgcctccaagaagggccaagcgatctggatctggagcaacaaacttctcactactcaaacaagcaggtgacgtggaggagaatcccgggcctactagtatggactggatttggcgcatccttttccttgtcggcgctgctaccggcgcgcattccttcgaacaagttcagcttcaacagcctggcgctgagctggtcaaacctggcgcttctgtgaagatgagctgcaaagccagcggctacgccttcagcagctactggatcaactggatgaagcagaaacccggccagggactcgaatggatcggccaaatctatcccggcgacggcgacaccaactacaacggcaagttcaagggcagagccacactgaccgccgatacctctagcagcacagcctacatgcagctgagcagcctgaccagcgaagatagcgccgtgtacttctgtgcccggtccatcacaacagtcgtgggctgcgctatggactattggggccagggaacaagcgtgaccgtgtctagtacgcgtatccagaaccctgatcctgccgtgtaccagctgcgggatagcaagagcagcgacaagagcgtgtgtctgttcaccgacttcgacagccagaccaacgtgtcccagagcaaggactccgacgtgtacatcaccgataagaccgtgctggacatgcggagcatggacttcaagagcaactccgccgtggcctggtccaacaagtccgatttcgcctgcgccaacgccttcaacaacagcattatccccgaggacacattcttcccaagccccgagagcagctgcggtacccagagttttgggttgttggaccctaaattgtgctatctgttggacggaatcctgttcatttacggagtgatcctgaccgcattgttcctgaggagcaagcggtcacggctgctccacagcgattacatgaatatgacaccacgaagaccgggtcctactcgcaaacactaccaaccctacgcacctccccgcgactttgcagcgtaccgatcttaa

SEQ ID NO: 1011 - DNA, 2364 bp, synthetic construct
  source 1..2364: mol_type = other DNA
atggccttaccagtgaccgccttgctcctgccgctggccttgctgctccacgccgccaggccggaattcaatgctggcgtgacccagacacctaagttccaggtgctgaaaaccggccagagcatgaccctgcaatgcgcccaggacatgaaccatgagtacatgagctggtacagacaggaccccggcatgggcctgagactgatccactactctgtggctatccagaccaccgaccagggcgaagtgcccaatggctacaacgtgtccagaagcaccatcgaggacttcccactgagactgctgtctgccgctcctagccagaccagcgtgtacttttgtgccagcagctacctgggcaacaccggcgagctgttttttggcgagggcagcagactgaccgtgctcgaggacctgaagaacgtgttcccacctgaggtggccgtgttcgagcctagcgaggccgagatcagccacacccagaaagccaccctcgtgtgcctggctaccggcttctaccccgaccatgtggaactgtcttggtgggtcaacggcaaagaggtgcacagcggcgtgtctaccgacccccagccactgaaagaacagcccgccctgaacgacagccggtactgcctgagcagcagactgagagtgtccgccaccttctggcagaacccccggaaccacttcagatgccaggtgcagttctacggcctgagcgagaacgacgagtggacccaggacagagccaagcccgtgacccagatcgtgtctgccgaagcctggggcagagccgattgcggatcccagagcttcggcctgctggaccccaagctgtgctacctgctggatggcatcctgttcatctacggcgtgatcctgaccgccctgttcctgaaacggggcagaaagaaactcctgtatatattcaaacaaccatttatgagaccagtacaaactactcaagaggaagatggctgtagctgccgatttccagaagaagaagaaggaggatgtgaactgagagtgaagttcagcagaagcgccgacgcccctgcctaccagcagggacagaaccaactgtacaacgagctgaacctgggcagacgggaagagtacgacgtgctggacaagcggagaggcagggaccctgagatgggcggaaagccccagcggagaaagaacccccaggaaggactgtataacgaactccagaaagacaagatggccgaagcctacagcgagatcggcatgaagggcgagcggagaagaggcaagggccacgatggcctgtaccagggcctgagcaccgccaccaaggacacctatgacgccctgcacatgcaggccctgcctccaagaagggccaagcgatctggatctggagcaacaaacttctcactactcaaacaagcaggtgacgtggaggagaatcccgggcctactagtatggactggatttggcgcatccttttccttgtcggcgctgctaccggcgcgcattccttcgaacaagaagtgacacagatccctgccgctctgtctgtgcctgagggcgaaaacctggtgctgaactgctccttcaccgacagcgccatctacaacctccagtggttcaggcaggaccctggaaagggactgacaagcctgctgctgatccagagcagccagagagagcagacctccggcagactgaatgccagcctggataagagcagcggcaggtctaccctgtatatcgccgcttctcagcctggcgatagcgccacatatctgtgtgctgtgcggcctacaagcggcggcagctacatccctacatttggcagaggcaccagcctgatcgtgcacccttatacgcgtatccagaaccctgatcctgccgtgtaccagctgcgggatagcaagagcagcgacaagagcgtgtgtctgttcaccgacttcgacagccagaccaacgtgtcccagagcaaggactccgacgtgtacatcaccgataagaccgtgctggacatgcggagcatggacttcaagagcaactccgccgtggcctggtccaacaagtccgatttcgcctgcgccaacgccttcaacaacagcattatccccgaggacacattcttcccaagccccgagagcagctgcggtacccagagttttgggttgttggaccctaaattgtgctatctgttggacggaatcctgttcatttacggagtgatcctgaccgcattgttcctgaggagcaagcggtcacggctgctccacagcgattacatgaatatgacaccacgaagaccgggtcctactcgcaaacactaccaaccctacgcacctccccgcgactttgcagcgtaccgatcttaa

SEQ ID NO: 1012 - DNA, 3396 bp, synthetic construct
  source 1..3396: mol_type = other DNA
atggccttaccagtgaccgccttgctcctgccgctggccttgctgctccacgccgccaggccggacatccagatgacacagagccctagcagcctgtctgccagcgtgggagacagagtgaccatcacatgcaaggccagcgaccacatcaacaactggctggcctggtatcagcagaagcctggacaggcccctaagctgctgatctacggcgctaccacactggaaacaggcgtgcccagcagattttctggcagcggctctggcaccgactacaccctgacaatatccagcctccagcctgaggacttcgccacctactactgtcagcagagctggaacaccccttggacattcggccagggcaccaagctggaaatcaagagactcgaggacctgaagaacgtgttcccacctgaggtggccgtgttcgagcctagcgaggccgagatcagccacacccagaaagccaccctcgtgtgcctggctaccggcttctaccccgaccatgtggaactgtcttggtgggtcaacggcaaagaggtgcacagcggcgtgtctaccgacccccagccactgaaagaacagcccgccctgaacgacagccggtactgcctgagcagcagactgagagtgtccgccaccttctggcagaacccccggaaccacttcagatgccaggtgcagttctacggcctgagcgagaacgacgagtggacccaggacagagccaagcccgtgacccagatcgtgtctgccgaagcctggggcagagccgattgcggatcccagagcttcggcctgctggaccccaagctgtgctacctgctggatggcatcctgttcatctacggcgtgatcctgaccgccctgttcctgagagtgagattcagcagaagcgccgacgcccctgcctaccagcagggacagaaccaactgtacaacgagctgaacctgggcagacgggaagagtacgacgtgctggacagacggagaggcagggaccctgagatgggcggaaagccccagcggagaagaaacccccaggaaggactgtataacgaactccagagagacagaatggccgaagcctacagcgagatcggcatgagaggcgagcggagaagaggcaagggccacgatggcctgtaccagggcctgagcaccgccaccagagacacctatgacgccctgcacatgcaggccctgcctccaagagaattcggtggatctggattcaatgtgctgatggtgcacagaagaagccacaccggcgagaggcccttccagtgtaatcagtgcggagccagcttcacccagagaggcaatctgctgcggcacatcagactgcacacaggcgagcggcctttcagatgccacctgtgcaattacgcctgccagagaagagatgccctgaccgcctctgccgaggccagacatattagagccgaaatgggcagggccaagcgatctggatctggagcaacaaacttctcactactcaaacaagcaggtgacgtggaggagaatcccgggcctactagtatggactggatttggcgcatccttttccttgtcggcgctgctaccggcgcgcattccttcgaacaagttcagcttcaacagcctggcgctgagctggtcaaacctggcgcttctgtgaagatgagctgcaaagccagcggctacgccttcagcagctactggatcaactggatgaagcagaaacccggccagggactcgaatggatcggccaaatctatcccggcgacggcgacaccaactacaacggcaagttcaagggcagagccacactgaccgccgatacctctagcagcacagcctacatgcagctgagcagcctgaccagcgaagatagcgccgtgtacttctgtgcccggtccatcacaacagtcgtgggctgcgctatggactattggggccagggaacaagcgtgaccgtgtctagtacgcgtatccagaaccctgatcctgccgtgtaccagctgcgggatagcaagagcagcgacaagagcgtgtgtctgttcaccgacttcgacagccagaccaacgtgtcccagagcaaggactccgacgtgtacatcaccgataagaccgtgctggacatgcggagcatggacttcaagagcaactccgccgtggcctggtccaacaagtccgatttcgcctgcgccaacgccttcaacaacagcattatccccgaggacacattcttcccaagccccgagagcagctgcggtacccagagttttgggttgttggaccctaaattgtgctatctgttggacggaatcctgttcatttacggagtgatcctgaccgcattgttcctgcgggttaagttttccagatccgcagacgcacccgcttaccaacaagggcagaaccaactctacaatgaacttaatttggggcggagggaagagtacgacgttctggacaaaaggaggggacgagatcccgagatgggcggaaagcctcagcgaaggaagaatccgcaagaggggctttataacgaactccagaaagataaaatggcagaagcctatagtgagattgggatgaagggagaaaggaggaggggtaaaggtcacgatgggttgtaccaaggattgagcacagccactaaagatacctatgatgcgctccacatgcaggccctgccgccaagacgcgccaagagaagcggatctggcgtgaagcagaccctgaatttcgacctgctgaagctggctggcgacgtggaatccaacccaggcccttctagaggccatatgaccgagtacaagcccacggtgcgcctcgccacccgcgacgacgtccccagggccgtacgcaccctcgccgccgcgttcgccgactaccccgccacgcgccacaccgtcgatccggaccgccacatcgagcgggtcaccgagctgcaagaactcttcctcacgcgcgtcgggctcgacatcggcaaggtgtgggtcgcggacgacggcgccgcggtggcggtctggaccacgccggagagcgtcgaagcgggggcggtgttcgccgagatcggcccgcgcatggccgagttgagcggttcccggctggccgcgcagcaacagatggaaggcctcctggcgccgcaccggcccaaggagcccgcgtggttcctggccaccgtcggcgtctcgcccgaccaccagggcaagggtctgggcagcgccgtcgtgctccccggagtggaggcggccgagcgcgccggggtgcccgccttcctggagacctccgcgccccgcaacctccccttctacgagcggctcggcttcaccgtcaccgccgacgtcgaggtgcccgaaggaccgcgcacctggtgcatgacccgcaagcccggtgcctga

SEQ ID NO: 1013 - DNA, 1494 bp, synthetic construct
  source 1..1494: mol_type = other DNA
atggccttaccagtgaccgccttgctcctgccgctggccttgctgctccacgccgccaggccggaagttcagctggttcagagcggagccgaagtgaagaagcctggcgagagcctgaagattagctgcaaaggcagcggctacggcttcaccagctattggatcggctgggtccgacagatgcctggcaaaggactggaatggatgggcatcattcaccccgacgacagcgacaccaagtacagccctagcttccagggccaagtgaccatcagcgccgacaagagcatcagcacagcctacctccagtggtcctctctgaaggccagcgataccgccatgtactactgcgccagcagctacctgagaggactgtggggcggctacttcgatttttggggccagggcacactggtcaccgttagttctggcggaggcggaagtggaggcggaggatctggcggcggaggctctgaactgcaaagcgtgctgacacagcctcctagcgcctctggaacacctggacagagagtgacaatcagctgctccggcagctccagcaacatcggcagcaactacgtgaactggtatcagcagctgcctggcacagcccctaaactgctgatctacggcgactaccagaggccaagcggcgtgccagatagattcagcggcagcaagtctggcacaagcgccagcctggctatctctggactgagaagcgaggacgaggccgactactactgtgccaccagagatgatagcctgagcggcagcgtggtgtttggcacaggcacaaagctgacagtgctgggcacgcgtaccacgacgccagcgccgcgaccaccaacaccggcgcccaccatcgcgtcgcagcccctgtccctgcgcccagaggcgtgccggccagcggcggggggcgcagtgcacacgagggggctggacttcgcctgtgacatctacatctgggcgcccttggccgggacttgtggggtccttctcctgtcactggttatcaccctttactgcaaacggggcagaaagaaactcctgtatatattcaaacaaccatttatgagaccagtacaaactactcaagaggaagatggctgtagctgccgatttccagaagaagaagaaggaggatgtgaactgagagtgaagttcagcaggagcgcagacgcccccgcgtaccagcagggccagaaccagctctataacgagctgaatctaggacgaagagaggagtacgatgttttggacaagagacgtggccgggaccctgagatggggggaaagccgagaaggaagaaccctcaggaaggcctgtacaatgaactgcagaaagataagatggcggaggcctacagtgagattgggatgaaaggcgagcgccggaggggcaaggggcacgatggcctttaccagggtctcagtacagccaccaaggacacctacgacgcccttcacatgcaggccctgccccctcgctaa

SEQ ID NO: 1014 - DNA, 1116 bp, synthetic construct
  source 1..1116: mol_type = other DNA
atggccttaccagtgaccgccttgctcctgccgctggccttgctgctccacgccgccaggccgcaggttcagctgcaagagtctggcggaggactggttcaagctggcggaagcctgagactgtcttgtgccgcctctggcacaatcagccccatcgacatcatgggctggtacagacaggcccctggcaaagagagagagctggttgccgccattgctctcggcggcaatacctactacgccgactctgtgaagggcagattcaccatcagccgggacaacgccaagaacaccgtgtacctccagatgaacagcctgaagccagaggacaccgccgtgtactattgtgccgtgggctacgtggacaagtgggacgacagcgactaccacacatattggggccagggcacccaagtgacagtgtctagcggtaccagcacgcgtaccacgacgccagcgccgcgaccaccaacaccggcgcccaccatcgcgtcgcagcccctgtccctgcgcccagaggcgtgccggccagcggcggggggcgcagtgcacacgagggggctggacttcgcctgtgacatctacatctgggcgcccttggccgggacttgtggggtccttctcctgtcactggttatcaccctttactgcaaacggggcagaaagaaactcctgtatatattcaaacaaccatttatgagaccagtacaaactactcaagaggaagatggctgtagctgccgatttccagaagaagaagaaggaggatgtgaactgagagtgaagttcagcaggagcgcagacgcccccgcgtaccagcagggccagaaccagctctataacgagctgaatctaggacgaagagaggagtacgatgttttggacaagagacgtggccgggaccctgagatggggggaaagccgagaaggaagaaccctcaggaaggcctgtacaatgaactgcagaaagataagatggcggaggcctacagtgagattgggatgaaaggcgagcgccggaggggcaaggggcacgatggcctttaccagggtctcagtacagccaccaaggacacctacgacgcccttcacatgcaggccctgccccctcgctaa

SEQ ID NO: 1015 - DNA, 1866 bp, synthetic construct
  source 1..1866: mol_type = other DNA
atggccttaccagtgaccgccttgctcctgccgctggccttgctgctccacgccgccaggccggacatcgtgctgacacagagccctgatagcctggccgtgtctctgggagagagagccaccatcaactgtagagccagcgagagcgtggaatacttcggcacctctctgatgcactggtatcagcagaagcccggccagcctcctaagctgctgatctacgccgccagcaatgtggaaagcggagtgcctgccagattttccggctctggcagcggcaccgatttcaccctgacaatctctagcctgcaagccgaggacgtggccgtgtactactgtcagcagagcagaaaggtgccctacaccttcggccagggcaccaagctggaaatcaaactcgaggacctgaagaacgtgttcccacctgaggtggccgtgttcgagcctagcgaggccgagatcagccacacccagaaagccaccctcgtgtgcctggctaccggcttctaccccgaccatgtggaactgtcttggtgggtcaacggcaaagaggtgcacagcggcgtgtgtaccgacccccagccactgaaagaacagcccgccctgaacgacagccggtactgcctgagcagcagactgagagtgtccgccaccttctggcagaacccccggaaccacttcagatgccaggtgcagttctacggcctgagcgagaacgacgagtggacccaggacagagccaagcccgtgacccagatcgtgtctgccgaagcctggggcagagccgattgcggctttaccagcgagagctaccagcagggcgtgctgagcgccaccatcctgtacgagatcctgctgggcaaggccaccctgtacgccgtgctggtgtctgccctggtgctgatggctatggtcaagcggaaggacagccggggaagggccaagcgatctggatctggagcaacaaacttctcactactcaaacaagcaggtgacgtggaggagaatcccgggcctactagtatggactggatttggcgcatccttttccttgtcggcgctgctaccggcgcgcattccttcgaacaagttcagctgcaagagtctggccctggcctggtcaagcctagccaaacactgagcctgacctgtaccgtgtccggcaacagcatcaccagcgactacgcctggaactggatcagacagttccccggcaagcggctggaatggatcggctacatcagctacagcggcagcaccacatacagccccagcctgaaaagcagagtgaccatcagccgggacaccagcaagaaccagttcagcctgaagctgagcagcgtgacagccgccgataccgccgtgtattattgtgccaccggctactactacggcagcggcttttggggacagggcacactggttacagtgtcctctacgcgtatccagaaccctgatcctgccgtgtaccagctgcgggatagcaagagcagcgacaagagcgtgtgtctgttcaccgacttcgacagccagaccaacgtgtcccagagcaaggactccgacgtgtacatcaccgataagtgcgtgctggacatgcggagcatggacttcaagagcaactccgccgtggcctggtccaacaagtccgatttcgcctgcgccaacgccttcaacaacagcattatccccgaggacacattcttcccaagccccgagagcagctgcgacgtgaagctggtggaaaagagcttcgagacagacaccaacctgaacttccagaacctgagcgtgatcggcttcagaatcctgctgctgaaagtggccggctttaacctgctgatgaccctgcggctgtggtccagctaa

SEQ ID NO: 1016 - DNA, 1866 bp, synthetic construct
  source 1..1866: mol_type = other DNA
atggccttaccagtgaccgccttgctcctgccgctggccttgctgctccacgccgccaggccggacatcgtgctgacacagagccctgatagcctggccgtgtctctgggagagagagccaccatcaactgtagagccagcgagagcgtggaatacttcggcacctctctgatgcactggtatcagcagaagcccggccagcctcctaagctgctgatctacgccgccagcaatgtggaaagcggagtgcctgccagattttccggctctggcagcggcaccgatttcaccctgacaatctctagcctgcaagccgaggacgtggccgtgtactactgtcagcagagcagaaaggtgccctacaccttcggccagggcaccaagctggaaatcaaactcgaggacctgaagaacgtgttcccacctgaggtggccgtgttcgagcctagcgaggccgagatcagccacacccagaaagccaccctcgtgtgcctggctaccggcttctaccccgaccatgtggaactgtcttggtgggtcaacggcaaagaggtgcacagcggcgtgtgtaccgacccccagccactgaaagaacagcccgccctgaacgacagccggtactgcctgagcagcagactgagagtgtccgccaccttctggcagaacccccggaaccacttcagatgccaggtgcagttctacggcctgagcgagaacgacgagtggacccaggacagagccaagcccgtgacccagatcgtgtctgccgaagcctggggcagagccgattgcggctttaccagcgagagctaccagcagggcgtgctgagcgccaccatcctgtacgagatcctgctgggcaaggccaccctgtacgccgtgctggtgtctgccctggtgctgatggctatggtcaagcggaaggacagccggggaagggccaagcgatctggatctggagcaacaaacttctcactactcaaacaagcaggtgacgtggaggagaatcccgggcctactagtatggactggatttggcgcatccttttccttgtcggcgctgctaccggcgcgcattccttcgaacaagttcagctgcaagagtctggccctggcctggtcaagcctagccaaacactgagcctgacctgtaccgtgtccggcaacagcatcaccagcgactacgcctggaactggatcagacagttccccggcaagcggctggaatggatcggctacatcagctacagcggcagcaccagctacaaccccagcctgaaaagcagagtgaccatcagccgggacaccagcaagaaccagttcagcctgaagctgagcagcgtgacagccgccgataccgccgtgtattattgtgccaccggctactactacggctccggcttttggggccagggcacactggttacagtgtcctctacgcgtatccagaaccctgatcctgccgtgtaccagctgcgggatagcaagagcagcgacaagagcgtgtgtctgttcaccgacttcgacagccagaccaacgtgtcccagagcaaggactccgacgtgtacatcaccgataagtgcgtgctggacatgcggagcatggacttcaagagcaactccgccgtggcctggtccaacaagtccgatttcgcctgcgccaacgccttcaacaacagcattatccccgaggacacattcttcccaagccccgagagcagctgcgacgtgaagctggtggaaaagagcttcgagacagacaccaacctgaacttccagaacctgagcgtgatcggcttcagaatcctgctgctgaaagtggccggctttaacctgctgatgaccctgcggctgtggtccagctaa

SEQ ID NO: 1017 - DNA, 2436 bp, synthetic construct
  source 1..2436: mol_type = other DNA
atggccttaccagtgaccgccttgctcctgccgctggccttgctgctccacgccgccaggccggacatccagatgacacagagccctagcagcctgtctgccagcgtgggagacagagtgaccatcacatgcaaggccagccaggatgtgggcacagccgtggattggtatcagcagaagcctggcaaggcccctaagctgctgatctactgggccagcacaagacacacaggcgtgcccagcagattttctggcagcggctctggcaccgacttcaccctgacaatatccagcctccagcctgaggacttcgccacctactactgccagcagtacaacagctaccctctgaccttcggccagggcaccaaggtggaaatcaaaagactcgaggacctgaagaacgtgttcccacctgaggtggccgtgttcgagcctagcgaggccgagatcagccacacccagaaagccaccctcgtgtgcctggctaccggcttctaccccgaccatgtggaactgtcttggtgggtcaacggcaaagaggtgcacagcggcgtgtctaccgacccccagccactgaaagaacagcccgccctgaacgacagccggtactgcctgagcagcagactgagagtgtccgccaccttctggcagaacccccggaaccacttcagatgccaggtgcagttctacggcctgagcgagaacgacgagtggacccaggacagagccaagcccgtgacccagatcgtgtctgccgaagcctggggcagagccgattgcggatcccagagcttcggcctgctggaccccaagctgtgctacctgctggatggcatcctgttcatctacggcgtgatcctgaccgccctgttcctgagagtgaagttcagcagaagcgccgacgcccctgcctaccagcagggacagaaccaactgtacaacgagctgaacctgggcagacgggaagagtacgacgtgctggacaagcggagaggcagggaccctgagatgggcggaaagccccagcggagaaagaacccccaggaaggactgtataacgaactccagaaagacaagatggccgaagcctacagcgagatcggcatgaagggcgagcggagaagaggcaagggccacgatggcctgtaccagggcctgagcaccgccaccaaggacacctatgacgccctgcacatgcaggccctgcctccaagaagggccaagcgatctggatctggagcaacaaacttctcactactcaaacaagcaggtgacgtggaggagaatcccgggcctactagtatggactggatttggcgcatccttttccttgtcggcgctgctaccggcgcgcattccttcgaagtgcagctggttgaatcaggtggcggcctggttcaacctggcggatctctgagactgagctgtgccgccagcggctacacctttaccgagtacacaatccactgggtccgacaggcccctggcaaaggacttgagtgggtcgccaacatcaaccccaacaatggcggcaccacctacaaccagaagttcgaggacagattcaccatcagccgggacaacagcaagaacaccctgtacctccagatgaactccctgagagccgaggacaccgccgtgtactattgtgccagaggctggaacttcgactactggggccagggaacactggtcaccgttagctctacgcgtatccagaaccctgatcctgccgtgtaccagctgcgggatagcaagagcagcgacaagagcgtgtgtctgttcaccgacttcgacagccagaccaacgtgtcccagagcaaggactccgacgtgtacatcaccgataagaccgtgctggacatgcggagcatggacttcaagagcaactccgccgtggcctggtccaacaagtccgatttcgcctgcgccaacgccttcaacaacagcattatccccgaggacacattcttcccaagccccgagagcagctgcggtacccagagttttgggttgttggaccctaaattgtgctatctgttggacggaatcctgttcatttacggagtgatcctgaccgcattgttcctgcgggttaagttttccagatccgcagacgcacccgcttaccaacaagggcagaaccaactctacaatgaacttaatttggggcggagggaagagtacgacgttctggacaaaaggaggggacgagatcccgagatgggcggaaagcctcagcgaaggaagaatccgcaagaggggctttataacgaactccagaaagataaaatggcagaagcctatagtgagattgggatgaagggagaaaggaggaggggtaaaggtcacgatgggttgtaccaaggattgagcacagccactaaagatacctatgatgcgctccacatgcaggccctgccgccaagataa

SEQ ID NO: 1018 - DNA, 2211 bp, synthetic construct
  source 1..2211: mol_type = other DNA
atggccttaccagtgaccgccttgctcctgccgctggccttgctgctccacgccgccaggccggacatccagatgacacagagccctagcagcctgtctgccagcgtgggagacagagtgaccatcacatgcaaggccagccaggatgtgggcacagccgtggattggtatcagcagaagcctggcaaggcccctaagctgctgatctactgggccagcacaagacacacaggcgtgcccagcagattttctggcagcggctctggcaccgacttcaccctgacaatatccagcctccagcctgaggacttcgccacctactactgccagcagtacaacagctaccctctgaccttcggccagggcaccaaggtggaaatcaaaagactcgaggacctgaagaacgtgttcccacctgaggtggccgtgttcgagcctagcgaggccgagatcagccacacccagaaagccaccctcgtgtgcctggctaccggcttctaccccgaccatgtggaactgtcttggtgggtcaacggcaaagaggtgcacagcggcgtgtctaccgacccccagccactgaaagaacagcccgccctgaacgacagccggtactgcctgagcagcagactgagagtgtccgccaccttctggcagaacccccggaaccacttcagatgccaggtgcagttctacggcctgagcgagaacgacgagtggacccaggacagagccaagcccgtgacccagatcgtgtctgccgaagcctggggcagagccgattgcggatcccagagcttcggcctgctggaccccaagctgtgctacctgctggatggcatcctgttcatctacggcgtgatcctgaccgccctgttcctgagagtgaagttcagcagaagcgccgacgcccctgcctaccagcagggacagaaccaactgtacaacgagctgaacctgggcagacgggaagagtacgacgtgctggacaagcggagaggcagggaccctgagatgggcggaaagccccagcggagaaagaacccccaggaaggactgtataacgaactccagaaagacaagatggccgaagcctacagcgagatcggcatgaagggcgagcggagaagaggcaagggccacgatggcctgtaccagggcctgagcaccgccaccaaggacacctatgacgccctgcacatgcaggccctgcctccaagaagggccaagcgatctggatctggagcaacaaacttctcactactcaaacaagcaggtgacgtggaggagaatcccgggcctactagtatggactggatttggcgcatccttttccttgtcggcgctgctaccggcgcgcattccttcgaagtgcagctggttgaatcaggtggcggcctggttcaacctggcggatctctgagactgagctgtgccgccagcggctacacctttaccgagtacacaatccactgggtccgacaggcccctggcaaaggacttgagtgggtcgccaacatcaaccccaacaatggcggcaccacctacaaccagaagttcgaggacagattcaccatcagccgggacaacagcaagaacaccctgtacctccagatgaactccctgagagccgaggacaccgccgtgtactattgtgccagaggctggaacttcgactactggggccagggaacactggtcaccgttagctctacgcgtatccagaaccctgatcctgccgtgtaccagctgcgggatagcaagagcagcgacaagagcgtgtgtctgttcaccgacttcgacagccagaccaacgtgtcccagagcaaggactccgacgtgtacatcaccgataagaccgtgctggacatgcggagcatggacttcaagagcaactccgccgtggcctggtccaacaagtccgatttcgcctgcgccaacgccttcaacaacagcattatccccgaggacacattcttcccaagccccgagagcagctgcggtaccctcggagaaccacagctctgttacattctggatgctatcctgttcctctatgggatcgtcctgacactcctgtattgcagactcaaaattcaagttcgcaaagccgccattacctcttacgagaagagtgatggggtgtacacaggactgtctacccggaatcaagaaacctacgaaaccctcaaacatgagaagccacctcagtaa

SEQ ID NO: 1019 - DNA, 2892 bp, synthetic construct
  source 1..2892: mol_type = other DNA
atggccttaccagtgaccgccttgctcctgccgctggccttgctgctccacgccgccaggccggacatccagatgacacagagccctagcagcctgtctgccagcgtgggagacagagtgaccatcacatgcaaggccagccaggatgtgggcacagccgtggattggtatcagcagaagcctggcaaggcccctaagctgctgatctactgggccagcacaagacacacaggcgtgcccagcagattttctggcagcggctctggcaccgacttcaccctgacaatatccagcctccagcctgaggacttcgccacctactactgccagcagtacaacagctaccctctgaccttcggccagggcaccaaggtggaaatcaaaagactcgaggacctgaagaacgtgttcccacctgaggtggccgtgttcgagcctagcgaggccgagatcagccacacccagaaagccaccctcgtgtgcctggctaccggcttctaccccgaccatgtggaactgtcttggtgggtcaacggcaaagaggtgcacagcggcgtgtctaccgacccccagccactgaaagaacagcccgccctgaacgacagccggtactgcctgagcagcagactgagagtgtccgccaccttctggcagaacccccggaaccacttcagatgccaggtgcagttctacggcctgagcgagaacgacgagtggacccaggacagagccaagcccgtgacccagatcgtgtctgccgaagcctggggcagagccgattgcggatcccagagcttcggcctgctggaccccaagctgtgctacctgctggatggcatcctgttcatctacggcgtgatcctgaccgccctgttcctgagagtgaagttcagcagaagcgccgacgcccctgcctaccagcagggacagaaccaactgtacaacgagctgaacctgggcagacgggaagagtacgacgtgctggacaagcggagaggcagggaccctgagatgggcggaaagccccagcggagaaagaacccccaggaaggactgtataacgaactccagaaagacaagatggccgaagcctacagcgagatcggcatgaagggcgagcggagaagaggcaagggccacgatggcctgtaccagggcctgagcaccgccaccaaggacacctatgacgccctgcacatgcaggccctgcctccaagaagggccaagcgatctggatctggagcaacaaacttctcactactcaaacaagcaggtgacgtggaggagaatcccgggcctactagtatggactggatttggcgcatccttttccttgtcggcgctgctaccggcgcgcattccttcgaagtgcagctggttgaatcaggtggcggcctggttcaacctggcggatctctgagactgagctgtgccgccagcggctacacctttaccgagtacacaatccactgggtccgacaggcccctggcaaaggacttgagtgggtcgccaacatcaaccccaacaatggcggcaccacctacaaccagaagttcgaggacagattcaccatcagccgggacaacagcaagaacaccctgtacctccagatgaactccctgagagccgaggacaccgccgtgtactattgtgccagaggctggaacttcgactactggggccagggaacactggtcaccgttagctctacgcgtatccagaaccctgatcctgccgtgtaccagctgcgggatagcaagagcagcgacaagagcgtgtgtctgttcaccgacttcgacagccagaccaacgtgtcccagagcaaggactccgacgtgtacatcaccgataagaccgtgctggacatgcggagcatggacttcaagagcaactccgccgtggcctggtccaacaagtccgatttcgcctgcgccaacgccttcaacaacagcattatccccgaggacacattcttcccaagccccgagagcagctgcggtaccatcactcaaggtttggcagtgtcaaccatctcatcattctttccacctggctaccaagtgtccttctgcctggtcatggtgctgctgttcgccgtggataccggcctgtacttcagcgtcaagaccaacatccggtccagcaccagagactggaaggaccacaagttcaagtggcggaaggaccctcaggacaagagggccaagcgatctggatctggagcaacaaacttctcactactcaaacaagcaggtgacgtggaggagaatcccgggccttctagaggccatatgaccgagtacaagcccacggtgcgcctcgccacccgcgacgacgtccccagggccgtacgcaccctcgccgccgcgttcgccgactaccccgccacgcgccacaccgtcgatccggaccgccacatcgagcgggtcaccgagctgcaagaactcttcctcacgcgcgtcgggctcgacatcggcaaggtgtgggtcgcggacgacggcgccgcggtggcggtctggaccacgccggagagcgtcgaagcgggggcggtgttcgccgagatcggcccgcgcatggccgagttgagcggttcccggctggccgcgcagcaacagatggaaggcctcctggcgccgcaccggcccaaggagcccgcgtggttcctggccaccgtcggcgtctcgcccgaccaccagggcaagggtctgggcagcgccgtcgtgctccccggagtggaggcggccgagcgcgccggggtgcccgccttcctggagacctccgcgccccgcaacctccccttctacgagcggctcggcttcaccgtcaccgccgacgtcgaggtgcccgaaggaccgcgcacctggtgcatgacccgcaagcccggtgcctga

SEQ ID NO: 1020 - DNA, 2562 bp, synthetic construct
  source 1..2562: mol_type = other DNA
atggccttaccagtgaccgccttgctcctgccgctggccttgctgctccacgccgccaggccggacatccagatgacacagagccctagcagcctgtctgccagcgtgggagacagagtgaccatcacatgcaaggccagccaggatgtgggcacagccgtggattggtatcagcagaagcctggcaaggcccctaagctgctgatctactgggccagcacaagacacacaggcgtgcccagcagattttctggcagcggctctggcaccgacttcaccctgacaatatccagcctccagcctgaggacttcgccacctactactgccagcagtacaacagctaccctctgaccttcggccagggcaccaaggtggaaatcaaaagactcgaggacctgaagaacgtgttcccacctgaggtggccgtgttcgagcctagcgaggccgagatcagccacacccagaaagccaccctcgtgtgcctggctaccggcttctaccccgaccatgtggaactgtcttggtgggtcaacggcaaagaggtgcacagcggcgtgtctaccgacccccagccactgaaagaacagcccgccctgaacgacagccggtactgcctgagcagcagactgagagtgtccgccaccttctggcagaacccccggaaccacttcagatgccaggtgcagttctacggcctgagcgagaacgacgagtggacccaggacagagccaagcccgtgacccagatcgtgtctgccgaagcctggggcagagccgattgcggatcccagagcttcggcctgctggaccccaagctgtgctacctgctggatggcatcctgttcatctacggcgtgatcctgaccgccctgttcctgagagtgaagttcagcagaagcgccgacgcccctgcctaccagcagggacagaaccaactgtacaacgagctgaacctgggcagacgggaagagtacgacgtgctggacaagcggagaggcagggaccctgagatgggcggaaagccccagcggagaaagaacccccaggaaggactgtataacgaactccagaaagacaagatggccgaagcctacagcgagatcggcatgaagggcgagcggagaagaggcaagggccacgatggcctgtaccagggcctgagcaccgccaccaaggacacctatgacgccctgcacatgcaggccctgcctccaagaagggccaagcgatctggatctggagcaacaaacttctcactactcaaacaagcaggtgacgtggaggagaatcccgggcctactagtatggactggatttggcgcatccttttccttgtcggcgctgctaccggcgcgcattccttcgaagtgcagctggttgaatcaggtggcggcctggttcaacctggcggatctctgagactgagctgtgccgccagcggctacacctttaccgagtacacaatccactgggtccgacaggcccctggcaaaggacttgagtgggtcgccaacatcaaccccaacaatggcggcaccacctacaaccagaagttcgaggacagattcaccatcagccgggacaacagcaagaacaccctgtacctccagatgaactccctgagagccgaggacaccgccgtgtactattgtgccagaggctggaacttcgactactggggccagggaacactggtcaccgttagctctacgcgtatccagaaccctgatcctgccgtgtaccagctgcgggatagcaagagcagcgacaagagcgtgtgtctgttcaccgacttcgacagccagaccaacgtgtcccagagcaaggactccgacgtgtacatcaccgataagaccgtgctggacatgcggagcatggacttcaagagcaactccgccgtggcctggtccaacaagtccgatttcgcctgcgccaacgccttcaacaacagcattatccccgaggacacattcttcccaagccccgagagcagctgcggtacccagagttttgggttgttggaccctaaattgtgctatctgttggacggaatcctgttcatttacggagtgatcctgaccgcattgttcctgaagagaggccggaagaagctgctgtacatcttcaagcagcctttcatgcggcccgtgcagaccacccaggaagaggacggctgctcctgccggttccccgaggaagaagaaggcggctgcgagctgcgggttaagttttccagatccgcagacgcacccgcttaccaacaagggcagaaccaactctacaatgaacttaatttggggcggagggaagagtacgacgttctggacaaaaggaggggacgagatcccgagatgggcggaaagcctcagcgaaggaagaatccgcaagaggggctttataacgaactccagaaagataaaatggcagaagcctatagtgagattgggatgaagggagaaaggaggaggggtaaaggtcacgatgggttgtaccaaggattgagcacagccactaaagatacctatgatgcgctccacatgcaggccctgccgccaagataa

SEQ ID NO: 1021 - DNA, 2217 bp, synthetic construct
  source 1..2217: mol_type = other DNA
atggccttaccagtgaccgccttgctcctgccgctggccttgctgctccacgccgccaggccggacatccagatgacacagagccctagcagcctgtctgccagcgtgggagacagagtgaccatcacctgtagagccagccaggacatcagcaactacctgaactggtatcagcagaagcccggcaaggcccctaagctgctgatctactacaccagcagactgcacagcggcgtgcccagcagattttctggctctggcagcggcaccgacttcaccctgacaatatctagcctccagcctgaggacttcgccacctactattgccagcagggcaacaccctgccttacacatttggacagggcaccaaggtggaaatcaagagactcgaggacctgaagaacgtgttcccacctgaggtggccgtgttcgagcctagcaaggccgagatcgcccacacccagaaagccaccctcgtgtgcctggctaccggcttctaccccgaccatgtggaactgtcttggtgggtcaacggcaaagaggtgcacagcggcgtgtgtaccgacccccagccactgaaagaacagcccgccctgaacgacagccggtactgcctgagcagcagactgagagtgtccgccaccttctggcagaacccccggaaccacttcagatgccaggtgcagttctacggcctgagcgagaacgacgagtggacccaggacagagccaagcccgtgacccagatcgtgtctgccgaagcctggggcagagccgattgcggatcccagagcttcggcctgctggaccccaagctgtgctacctgctggatggcatcctgttcatctacggcgtgatcctgaccgccctgttcctgagagtgaagttcagcagaagcgccgacgcccctgcctaccagcagggacagaaccaactgtacaacgagctgaacctgggcagacgggaagagtacgacgtgctggacaagcggagaggcagggaccctgagatgggcggaaagccccagcggagaaagaacccccaggaaggactgtataacgaactccagaaagacaagatggccgaagcctacagcgagatcggcatgaagggcgagcggagaagaggcaagggccacgatggcctgtaccagggcctgagcaccgccaccaaggacacctatgacgccctgcacatgcaggccctgcctccaagaagggccaagcgatctggatctggagcaacaaacttctcactactcaaacaagcaggtgacgtggaggagaatcccgggcctactagtatggactggatttggcgcatccttttccttgtcggcgctgctaccggcgcgcattccttcgaagtgcagctggttgaatcaggtggcggcctggttcaacctggcggatctctgagactgagctgtgccgccagcggctacaccttcagcgactactttatgagctgggtccgacaggcccctggcaaaggacttgaatgggtcgccaccatcagcaatggcggcacctacacttactaccccgacagcgtgaagggcagattcaccatctccagagacaacagcaagaacaccctgtacctccagatgaactccctgagagccgaggacaccgccgtgtactactgcgccagattcgacggctacatcttcgactattggggccagggcaccctggtcacagtctcttctacgcgtatccagaaccctgatcctgccgtgtaccagctgcgggatagcaagagcagcgacaagagcgtgtgtctgttcaccgacttcgacagccagaccaacgtgtcccagagcaaggactccgacgtgtacatcaccgataagtgcgtgctggacatgcggagcatggacttcaagagcaactccgccgtggcctggtccaacaagtccgatttcgcctgcgccaacgccttcaacaacagcattatccccgaggacacattcttcccaagcagcgacgtgccctgcggtaccctcggagaaccacagctctgttacattctggatgctatcctgttcctctatgggatcgtcctgacactcctgtattgcagactcaaaattcaagttcgcaaagccgccattacctcttacgagaagagtgatggggtgtacacaggactgtctacccggaatcaagaaacctacgaaaccctcaaacatgagaagccacctcagtaa

SEQ ID NO: 1022 - DNA, 2442 bp, synthetic construct
  source 1..2442: mol_type = other DNA
atggccttaccagtgaccgccttgctcctgccgctggccttgctgctccacgccgccaggccggacatccagatgacacagagccctagcagcctgtctgccagcgtgggagacagagtgaccatcacctgtagagccagccaggacatcagcaactacctgaactggtatcagcagaagcccggcaaggcccctaagctgctgatctactacaccagcagactgcacagcggcgtgcccagcagattttctggctctggcagcggcaccgacttcaccctgacaatatctagcctccagcctgaggacttcgccacctactattgccagcagggcaacaccctgccttacacatttggacagggcaccaaggtggaaatcaagagactcgaggacctgaagaacgtgttcccacctgaggtggccgtgttcgagcctagcaaggccgagatcgcccacacccagaaagccaccctcgtgtgcctggctaccggcttctaccccgaccatgtggaactgtcttggtgggtcaacggcaaagaggtgcacagcggcgtgtgtaccgacccccagccactgaaagaacagcccgccctgaacgacagccggtactgcctgagcagcagactgagagtgtccgccaccttctggcagaacccccggaaccacttcagatgccaggtgcagttctacggcctgagcgagaacgacgagtggacccaggacagagccaagcccgtgacccagatcgtgtctgccgaagcctggggcagagccgattgcggatcccagagcttcggcctgctggaccccaagctgtgctacctgctggatggcatcctgttcatctacggcgtgatcctgaccgccctgttcctgagagtgaagttcagcagaagcgccgacgcccctgcctaccagcagggacagaaccaactgtacaacgagctgaacctgggcagacgggaagagtacgacgtgctggacaagcggagaggcagggaccctgagatgggcggaaagccccagcggagaaagaacccccaggaaggactgtataacgaactccagaaagacaagatggccgaagcctacagcgagatcggcatgaagggcgagcggagaagaggcaagggccacgatggcctgtaccagggcctgagcaccgccaccaaggacacctatgacgccctgcacatgcaggccctgcctccaagaagggccaagcgatctggatctggagcaacaaacttctcactactcaaacaagcaggtgacgtggaggagaatcccgggcctactagtatggactggatttggcgcatccttttccttgtcggcgctgctaccggcgcgcattccttcgaagtgcagctggttgaatcaggtggcggcctggttcaacctggcggatctctgagactgagctgtgccgccagcggctacaccttcagcgactactttatgagctgggtccgacaggcccctggcaaaggacttgaatgggtcgccaccatcagcaatggcggcacctacacttactaccccgacagcgtgaagggcagattcaccatctccagagacaacagcaagaacaccctgtacctccagatgaactccctgagagccgaggacaccgccgtgtactactgcgccagattcgacggctacatcttcgactattggggccagggcaccctggtcacagtctcttctacgcgtatccagaaccctgatcctgccgtgtaccagctgcgggatagcaagagcagcgacaagagcgtgtgtctgttcaccgacttcgacagccagaccaacgtgtcccagagcaaggactccgacgtgtacatcaccgataagtgcgtgctggacatgcggagcatggacttcaagagcaactccgccgtggcctggtccaacaagtccgatttcgcctgcgccaacgccttcaacaacagcattatccccgaggacacattcttcccaagcagcgacgtgccctgcggtacccagagttttgggttgttggaccctaaattgtgctatctgttggacggaatcctgttcatttacggagtgatcctgaccgcattgttcctgcgggttaagttttccagatccgcagacgcacccgcttaccaacaagggcagaaccaactctacaatgaacttaatttggggcggagggaagagtacgacgttctggacaaaaggaggggacgagatcccgagatgggcggaaagcctcagcgaaggaagaatccgcaagaggggctttataacgaactccagaaagataaaatggcagaagcctatagtgagattgggatgaagggagaaaggaggaggggtaaaggtcacgatgggttgtaccaaggattgagcacagccactaaagatacctatgatgcgctccacatgcaggccctgccgccaagataa

SEQ ID NO: 1023 - DNA, 2898 bp, synthetic construct
  source 1..2898: mol_type = other DNA
atggccttaccagtgaccgccttgctcctgccgctggccttgctgctccacgccgccaggccggacatccagatgacacagagccctagcagcctgtctgccagcgtgggagacagagtgaccatcacctgtagagccagccaggacatcagcaactacctgaactggtatcagcagaagcccggcaaggcccctaagctgctgatctactacaccagcagactgcacagcggcgtgcccagcagattttctggctctggcagcggcaccgacttcaccctgacaatatctagcctccagcctgaggacttcgccacctactattgccagcagggcaacaccctgccttacacatttggacagggcaccaaggtggaaatcaagagactcgaggacctgaagaacgtgttcccacctgaggtggccgtgttcgagcctagcaaggccgagatcgcccacacccagaaagccaccctcgtgtgcctggctaccggcttctaccccgaccatgtggaactgtcttggtgggtcaacggcaaagaggtgcacagcggcgtgtgtaccgacccccagccactgaaagaacagcccgccctgaacgacagccggtactgcctgagcagcagactgagagtgtccgccaccttctggcagaacccccggaaccacttcagatgccaggtgcagttctacggcctgagcgagaacgacgagtggacccaggacagagccaagcccgtgacccagatcgtgtctgccgaagcctggggcagagccgattgcggatcccagagcttcggcctgctggaccccaagctgtgctacctgctggatggcatcctgttcatctacggcgtgatcctgaccgccctgttcctgagagtgaagttcagcagaagcgccgacgcccctgcctaccagcagggacagaaccaactgtacaacgagctgaacctgggcagacgggaagagtacgacgtgctggacaagcggagaggcagggaccctgagatgggcggaaagccccagcggagaaagaacccccaggaaggactgtataacgaactccagaaagacaagatggccgaagcctacagcgagatcggcatgaagggcgagcggagaagaggcaagggccacgatggcctgtaccagggcctgagcaccgccaccaaggacacctatgacgccctgcacatgcaggccctgcctccaagaagggccaagcgatctggatctggagcaacaaacttctcactactcaaacaagcaggtgacgtggaggagaatcccgggcctactagtatggactggatttggcgcatccttttccttgtcggcgctgctaccggcgcgcattccttcgaagtgcagctggttgaatcaggtggcggcctggttcaacctggcggatctctgagactgagctgtgccgccagcggctacaccttcagcgactactttatgagctgggtccgacaggcccctggcaaaggacttgaatgggtcgccaccatcagcaatggcggcacctacacttactaccccgacagcgtgaagggcagattcaccatctccagagacaacagcaagaacaccctgtacctccagatgaactccctgagagccgaggacaccgccgtgtactactgcgccagattcgacggctacatcttcgactattggggccagggcaccctggtcacagtctcttctacgcgtatccagaaccctgatcctgccgtgtaccagctgcgggatagcaagagcagcgacaagagcgtgtgtctgttcaccgacttcgacagccagaccaacgtgtcccagagcaaggactccgacgtgtacatcaccgataagtgcgtgctggacatgcggagcatggacttcaagagcaactccgccgtggcctggtccaacaagtccgatttcgcctgcgccaacgccttcaacaacagcattatccccgaggacacattcttcccaagcagcgacgtgccctgcggtaccatcactcaaggtttggcagtgtcaaccatctcatcattctttccacctggctaccaagtgtccttctgcctggtcatggtgctgctgttcgccgtggataccggcctgtacttcagcgtcaagaccaacatccggtccagcaccagagactggaaggaccacaagttcaagtggcggaaggaccctcaggacaagagggccaagcgatctggatctggagcaacaaacttctcactactcaaacaagcaggtgacgtggaggagaatcccgggccttctagaggccatatgaccgagtacaagcccacggtgcgcctcgccacccgcgacgacgtccccagggccgtacgcaccctcgccgccgcgttcgccgactaccccgccacgcgccacaccgtcgatccggaccgccacatcgagcgggtcaccgagctgcaagaactcttcctcacgcgcgtcgggctcgacatcggcaaggtgtgggtcgcggacgacggcgccgcggtggcggtctggaccacgccggagagcgtcgaagcgggggcggtgttcgccgagatcggcccgcgcatggccgagttgagcggttcccggctggccgcgcagcaacagatggaaggcctcctggcgccgcaccggcccaaggagcccgcgtggttcctggccaccgtcggcgtctcgcccgaccaccagggcaagggtctgggcagcgccgtcgtgctccccggagtggaggcggccgagcgcgccggggtgcccgccttcctggagacctccgcgccccgcaacctccccttctacgagcggctcggcttcaccgtcaccgccgacgtcgaggtgcccgaaggaccgcgcacctggtgcatgacccgcaagcccggtgcctga

SEQ ID NO: 1024 - DNA, 3633 bp, synthetic construct
  source 1..3633: mol_type = other DNA
atggccttaccagtgaccgccttgctcctgccgctggccttgctgctccacgccgccaggccggacatccagatgacacagagccctagcagcctgtctgccagcgtgggagacagagtgaccatcacatgcaaggccagcgaccacatcaacaactggctggcctggtatcagcagaagcctggacaggcccctaagctgctgatctacggcgctaccacactggaaacaggcgtgcccagcagattttctggcagcggctctggcaccgactacaccctgacaatatccagcctccagcctgaggacttcgccacctactactgtcagcagagctggaacaccccttggacattcggccagggcaccaagctggaaatcaagagactcgagggacagcctaaggccaatcctaccgtgacactgttccctccaagcagcgaagaactccaggccaacaaggccacacttgtgtgcctgatctccgacttctaccctggggctgtgacagtggcttggaaggccgatggatctcctgtgaaagccggcgtggaaaccaccaagccatccaagcagagcaacaacaaatacgccgccagctcctacctgagcctgacacctgagcagtggaagtcccacagatcctacagctgccaagtgacccacgaaggcagcaccgtggaaaagacagtggcccctacagagtgcagcggatcccagagcttcggcctgctggaccccaagctgagctacctgctggatggcatcctgttcatctacggcgtgatcctgaccgccctgttcctgtggcggcggaagcggaaagagaagcagtctgagacaagccccaaagagttcctgaccatctacgaggacgtgaaggacctgaaaacccggcggaaccacgaacaagagcagacctttcctggcggaggcagcaccatctacagcatgatccagagccagagcagcgcccctacaagccaagagcctgcctacacactgtactccctgatccagcctagcagaaagagcggcagccggaagagaaatcacagccccagcttcaacagcacgatctacgaagtgatcggcaagagccagccaaaggctcagaaccctgccagactgagccggaaagagctggaaaacttcgacgtgtacagcactagtagagtgaagttcagcagaagcgccgacgcccctgcctaccagcagggacagaaccaactgtacaacgagctgaacctgggcagacgggaagagtacgacgtgctggacaagcggagaggcagggaccctgagatgggcggaaagccccagcggagaaagaacccccaggaaggactgtataacgaactccagaaagacaagatggccgaagcctacagcgagatcggcatgaagggcgagcggagaagaggcaagggccacgatggcctgtaccagggcctgagcaccgccaccaaggacacctatgacgccctgcacatgcaggccctgcctccaagaagggccaagcgatctggatctggagcaacaaacttctcactactcaaacaagcaggtgacgtggaggagaatcccgggcctatggactggatttggcgcatccttttccttgtcggcgctgctaccggcgcgcattccttcgaacaagttcagcttcaacagcctggcgctgagctggtcaaacctggcgcttctgtgaagatgagctgcaaagccagcggctacgccttcagcagctactggatcaactggatgaagcagaaacccggccagggactcgaatggatcggccaaatctatcccggcgacggcgacaccaactacaacggcaagttcaagggcagagccacactgaccgccgatacctctagcagcacagcctacatgcagctgagcagcctgaccagcgaagatagcgccgtgtacttctgtgcccggtccatcacaacagtcgtgggctgcgctatggactattggggccagggaacaagcgtgaccgtgtctagtacgcgtgcctctacaaagggaccctccgtgtttcctctggctcccagcagcaagtctacaagcggaggaacagccgctctgggctgcctggtcaaggattactttcccgagcctgtgaccgtgtcctggaatagcggagcactgacaagcggcgtgcacacctttccagccgtgctgcaaagcagcggcctgtactctctgagcagcgtggtcacagtgcctagctctagcctgggcacccagacctacatctgcaatgtgaaccacaagcctagcaacaccaaggtggacaagagagtggaacccaagagctgtggtacctctggacaggtgctgctggaaagcaacatcaaggtgctgcccacctggtccacccccgtgcagcctatggctctgattgtgctgggcggagtggccggactgctgctgtttattggcctgggcatcttcttttgcgtgcggtgcagacaccggcggagacaggccgagagaatgagccagatcaagagactgctgtccgagaagaaaacctgccagtgcccccacagattccagaaaacatgcagccccatctctagacgggttaagttttccagatccgcagacgcacccgcttaccaacaagggcagaaccaactctacaatgaacttaatttggggcggagggaagagtacgacgttctggacaaaaggaggggacgagatcccgagatgggcggaaagcctcagcgaaggaagaatccgcaagaggggctttataacgaactccagaaagataaaatggcagaagcctatagtgagattgggatgaagggagaaaggaggaggggtaaaggtcacgatgggttgtaccaaggattgagcacagccactaaagatacctatgatgcgctccacatgcaggccctgccgccaagacgcgccaagagaagcggatctggcgtgaagcagaccctgaatttcgacctgctgaagctggctggcgacgtggaatccaacccaggccctggccatatgaccgagtacaagcccacggtgcgcctcgccacccgcgacgacgtccccagggccgtacgcaccctcgccgccgcgttcgccgactaccccgccacgcgccacaccgtcgatccggaccgccacatcgagcgggtcaccgagctgcaagaactcttcctcacgcgcgtcgggctcgacatcggcaaggtgtgggtcgcggacgacggcgccgcggtggcggtctggaccacgccggagagcgtcgaagcgggggcggtgttcgccgagatcggcccgcgcatggccgagttgagcggttcccggctggccgcgcagcaacagatggaaggcctcctggcgccgcaccggcccaaggagcccgcgtggttcctggccaccgtcggcgtctcgcccgaccaccagggcaagggtctgggcagcgccgtcgtgctccccggagtggaggcggccgagcgcgccggggtgcccgccttcctggagacctccgcgccccgcaacctccccttctacgagcggctcggcttcaccgtcaccgccgacgtcgaggtgcccgaaggaccgcgcacctggtgcatgacccgcaagcccggtgcctga

SEQ ID NO: 1025 - DNA, 3567 bp, synthetic construct
  source 1..3567: mol_type = other DNA
atggccttaccagtgaccgccttgctcctgccgctggccttgctgctccacgccgccaggccggacatccagatgacacagagccctagcagcctgtctgccagcgtgggagacagagtgaccatcacatgcaaggccagcgaccacatcaacaactggctggcctggtatcagcagaagcctggacaggcccctaagctgctgatctacggcgctaccacactggaaacaggcgtgcccagcagattttctggcagcggctctggcaccgactacaccctgacaatatccagcctccagcctgaggacttcgccacctactactgtcagcagagctggaacaccccttggacattcggccagggcaccaagctggaaatcaagagactcgagggacagcctaaggccaatcctaccgtgacactgttccctccaagcagcgaagaactccaggccaacaaggccacacttgtgtgcctgatctccgacttctaccctggggctgtgacagtggcttggaaggccgatggatctcctgtgaaagccggcgtggaaaccaccaagccatccaagcagagcaacaacaaatacgccgccagctcctacctgagcctgacacctgagcagtggaagtcccacagatcctacagctgccaagtgacccacgaaggcagcaccgtggaaaagacagtggcccctacagagtgcagcggatcccagagcttcggcctgctggaccccaagctgagctacctgctggatggcatcctgttcatctacggcgtgatcctgaccgccctgttcctgtggcggcggaagcggaaagagaagcagtctgagacaagccccaaagagttcctgaccatctacgaggacgtgaaggacctgaaaacccggcggaaccacgaacaagagcagacctttcctggcggaggcagcaccatctacagcatgatccagagccagagcagcgcccctacaagccaagagcctgcctacacactgtactccctgatccagcctagcagaaagagcggcagccggaagagaaatcacagccccagcttcaacagcacgatctacgaagtgatcggcaagagccagccaaaggctcagaaccctgccagactgagccggaaagagctggaaaacttcgacgtgtacagcactagtagagtgaagttcagcagaagcgccgacgcccctgcctaccagcagggacagaaccaactgtacaacgagctgaacctgggcagacgggaagagtacgacgtgctggacaagcggagaggcagggaccctgagatgggcggaaagccccagcggagaaagaacccccaggaaggactgtataacgaactccagaaagacaagatggccgaagcctacagcgagatcggcatgaagggcgagcggagaagaggcaagggccacgatggcctgtaccagggcctgagcaccgccaccaaggacacctatgacgccctgcacatgcaggccctgcctccaagaagggccaagcgatctggatctggagcaacaaacttctcactactcaaacaagcaggtgacgtggaggagaatcccgggcctatggactggatttggcgcatccttttccttgtcggcgctgctaccggcgcgcattccttcgaacaagttcagcttcaacagcctggcgctgagctggtcaaacctggcgcttctgtgaagatgagctgcaaagccagcggctacgccttcagcagctactggatcaactggatgaagcagaaacccggccagggactcgaatggatcggccaaatctatcccggcgacggcgacaccaactacaacggcaagttcaagggcagagccacactgaccgccgatacctctagcagcacagcctacatgcagctgagcagcctgaccagcgaagatagcgccgtgtacttctgtgcccggtccatcacaacagtcgtgggctgcgctatggactattggggccagggaacaagcgtgaccgtgtctagtacgcgtgcctctacaaagggaccctccgtgtttcctctggctcccagcagcaagtctacaagcggaggaacagccgctctgggctgcctggtcaaggattactttcccgagcctgtgaccgtgtcctggaatagcggagcactgacaagcggcgtgcacacctttccagccgtgctgcaaagcagcggcctgtactctctgagcagcgtggtcacagtgcctagctctagcctgggcacccagacctacatctgcaatgtgaaccacaagcctagcaacaccaaggtggacaagagagtggaacccaagagctgtggtaccatggctctgattgtgctgggcggagtggccggactgctgctgtttattggcctgggcatcttcttttgcgtgcggtgcagacaccggcggagacaggccgagagaatgagccagatcaagagactgctgtccgagaagaaaacctgccagtgcccccacagattccagaaaacatgcagccccatctctagacgggttaagttttccagatccgcagacgcacccgcttaccaacaagggcagaaccaactctacaatgaacttaatttggggcggagggaagagtacgacgttctggacaaaaggaggggacgagatcccgagatgggcggaaagcctcagcgaaggaagaatccgcaagaggggctttataacgaactccagaaagataaaatggcagaagcctatagtgagattgggatgaagggagaaaggaggaggggtaaaggtcacgatgggttgtaccaaggattgagcacagccactaaagatacctatgatgcgctccacatgcaggccctgccgccaagacgcgccaagagaagcggatctggcgtgaagcagaccctgaatttcgacctgctgaagctggctggcgacgtggaatccaacccaggccctggccatatgaccgagtacaagcccacggtgcgcctcgccacccgcgacgacgtccccagggccgtacgcaccctcgccgccgcgttcgccgactaccccgccacgcgccacaccgtcgatccggaccgccacatcgagcgggtcaccgagctgcaagaactcttcctcacgcgcgtcgggctcgacatcggcaaggtgtgggtcgcggacgacggcgccgcggtggcggtctggaccacgccggagagcgtcgaagcgggggcggtgttcgccgagatcggcccgcgcatggccgagttgagcggttcccggctggccgcgcagcaacagatggaaggcctcctggcgccgcaccggcccaaggagcccgcgtggttcctggccaccgtcggcgtctcgcccgaccaccagggcaagggtctgggcagcgccgtcgtgctccccggagtggaggcggccgagcgcgccggggtgcccgccttcctggagacctccgcgccccgcaacctccccttctacgagcggctcggcttcaccgtcaccgccgacgtcgaggtgcccgaaggaccgcgcacctggtgcatgacccgcaagcccggtgcctga

SEQ ID NO: 1026 - DNA, 3318 bp, synthetic construct
  source 1..3318: mol_type = other DNA
atggccttaccagtgaccgccttgctcctgccgctggccttgctgctccacgccgccaggccggacatccagatgacacagagccctagcagcctgtctgccagcgtgggagacagagtgaccatcacatgcaaggccagcgaccacatcaacaactggctggcctggtatcagcagaagcctggacaggcccctaagctgctgatctacggcgctaccacactggaaacaggcgtgcccagcagattttctggcagcggctctggcaccgactacaccctgacaatatccagcctccagcctgaggacttcgccacctactactgtcagcagagctggaacaccccttggacattcggccagggcaccaagctggaaatcaagagactcgaggacctgaagaacgtgttcccacctgaggtggccgtgttcgagcctagcgaggccgagatcagccacacccagaaagccaccctcgtgtgcctggctaccggcttctaccccgaccatgtggaactgtcttggtgggtcaacggcaaagaggtgcacagcggcgtgtctaccgacccccagccactgaaagaacagcccgccctgaacgacagccggtactgcctgagcagcagactgagagtgtccgccaccttctggcagaacccccggaaccacttcagatgccaggtgcagttctacggcctgagcgagaacgacgagtggacccaggacagagccaagcccgtgacccagatcgtgtctgccgaagcctggggcagagccgattgcggatcccagagcttcggcctgctggaccccaagctgtgctacctgctggatggcatcctgttcatctacggcgtgatcctgaccgccctgttcctgagagtgaagttcagcagaagcgccgacgcccctgcctaccagcagggacagaaccaactgtacaacgagctgaacctgggcagacgggaagagtacgacgtgctggacaagcggagaggcagggaccctgagatgggcggaaagccccagcggagaaagaacccccaggaaggactgtataacgaactccagaaagacaagatggccgaagcctacagcgagatcggcatgaagggcgagcggagaagaggcaagggccacgatggcctgtaccagggcctgagcaccgccaccaaggacacctatgacgccctgcacatgcaggccctgcctccaagaagggccaagcgatctggatctggagcaacaaacttctcactactcaaacaagcaggtgacgtggaggagaatcccgggcctactagtatggactggatttggcgcatccttttccttgtcggcgctgctaccggcgcgcattccttcgaacaagttcagcttcaacagcctggcgctgagctggtcaaacctggcgcttctgtgaagatgagctgcaaagccagcggctacgccttcagcagctactggatcaactggatgaagcagaaacccggccagggactcgaatggatcggccaaatctatcccggcgacggcgacaccaactacaacggcaagttcaagggcagagccacactgaccgccgatacctctagcagcacagcctacatgcagctgagcagcctgaccagcgaagatagcgccgtgtacttctgtgcccggtccatcacaacagtcgtgggctgcgctatggactattggggccagggaacaagcgtgaccgtgtctagtacgcgtatccagaaccctgatcctgccgtgtaccagctgcgggatagcaagagcagcgacaagagcgtgtgtctgttcaccgacttcgacagccagaccaacgtgtcccagagcaaggactccgacgtgtacatcaccgataagaccgtgctggacatgcggagcatggacttcaagagcaactccgccgtggcctggtccaacaagtccgatttcgcctgcgccaacgccttcaacaacagcattatccccgaggacacattcttcccaagccccgagagcagctgcggtacctctggacaggtgctgctggaaagcaacatcaaggtgctgcccacctggtccacccccgtgcagcctatggctctgattgtgctgggcggagtggccggactgctgctgtttattggcctgggcatcttcttttgcgtgcggtgcagacaccggcggagacaggccgagagaatgagccagatcaagagactgctgtccgagaagaaaacctgccagtgcccccacagattccagaaaacatgcagccccatctctagacgggttaagttttccagatccgcagacgcacccgcttaccaacaagggcagaaccaactctacaatgaacttaatttggggcggagggaagagtacgacgttctggacaaaaggaggggacgagatcccgagatgggcggaaagcctcagcgaaggaagaatccgcaagaggggctttataacgaactccagaaagataaaatggcagaagcctatagtgagattgggatgaagggagaaaggaggaggggtaaaggtcacgatgggttgtaccaaggattgagcacagccactaaagatacctatgatgcgctccacatgcaggccctgccgccaagacgcgccaagagaagcggatctggcgtgaagcagaccctgaatttcgacctgctgaagctggctggcgacgtggaatccaacccaggccctggccatatgaccgagtacaagcccacggtgcgcctcgccacccgcgacgacgtccccagggccgtacgcaccctcgccgccgcgttcgccgactaccccgccacgcgccacaccgtcgatccggaccgccacatcgagcgggtcaccgagctgcaagaactcttcctcacgcgcgtcgggctcgacatcggcaaggtgtgggtcgcggacgacggcgccgcggtggcggtctggaccacgccggagagcgtcgaagcgggggcggtgttcgccgagatcggcccgcgcatggccgagttgagcggttcccggctggccgcgcagcaacagatggaaggcctcctggcgccgcaccggcccaaggagcccgcgtggttcctggccaccgtcggcgtctcgcccgaccaccagggcaagggtctgggcagcgccgtcgtgctccccggagtggaggcggccgagcgcgccggggtgcccgccttcctggagacctccgcgccccgcaacctccccttctacgagcggctcggcttcaccgtcaccgccgacgtcgaggtgcccgaaggaccgcgcacctggtgcatgacccgcaagcccggtgcctga

SEQ ID NO: 1027 - DNA, 3252 bp, synthetic construct
  source 1..3252: mol_type = other DNA
atggccttaccagtgaccgccttgctcctgccgctggccttgctgctccacgccgccaggccggacatccagatgacacagagccctagcagcctgtctgccagcgtgggagacagagtgaccatcacatgcaaggccagcgaccacatcaacaactggctggcctggtatcagcagaagcctggacaggcccctaagctgctgatctacggcgctaccacactggaaacaggcgtgcccagcagattttctggcagcggctctggcaccgactacaccctgacaatatccagcctccagcctgaggacttcgccacctactactgtcagcagagctggaacaccccttggacattcggccagggcaccaagctggaaatcaagagactcgaggacctgaagaacgtgttcccacctgaggtggccgtgttcgagcctagcgaggccgagatcagccacacccagaaagccaccctcgtgtgcctggctaccggcttctaccccgaccatgtggaactgtcttggtgggtcaacggcaaagaggtgcacagcggcgtgtctaccgacccccagccactgaaagaacagcccgccctgaacgacagccggtactgcctgagcagcagactgagagtgtccgccaccttctggcagaacccccggaaccacttcagatgccaggtgcagttctacggcctgagcgagaacgacgagtggacccaggacagagccaagcccgtgacccagatcgtgtctgccgaagcctggggcagagccgattgcggatcccagagcttcggcctgctggaccccaagctgtgctacctgctggatggcatcctgttcatctacggcgtgatcctgaccgccctgttcctgagagtgaagttcagcagaagcgccgacgcccctgcctaccagcagggacagaaccaactgtacaacgagctgaacctgggcagacgggaagagtacgacgtgctggacaagcggagaggcagggaccctgagatgggcggaaagccccagcggagaaagaacccccaggaaggactgtataacgaactccagaaagacaagatggccgaagcctacagcgagatcggcatgaagggcgagcggagaagaggcaagggccacgatggcctgtaccagggcctgagcaccgccaccaaggacacctatgacgccctgcacatgcaggccctgcctccaagaagggccaagcgatctggatctggagcaacaaacttctcactactcaaacaagcaggtgacgtggaggagaatcccgggcctactagtatggactggatttggcgcatccttttccttgtcggcgctgctaccggcgcgcattccttcgaacaagttcagcttcaacagcctggcgctgagctggtcaaacctggcgcttctgtgaagatgagctgcaaagccagcggctacgccttcagcagctactggatcaactggatgaagcagaaacccggccagggactcgaatggatcggccaaatctatcccggcgacggcgacaccaactacaacggcaagttcaagggcagagccacactgaccgccgatacctctagcagcacagcctacatgcagctgagcagcctgaccagcgaagatagcgccgtgtacttctgtgcccggtccatcacaacagtcgtgggctgcgctatggactattggggccagggaacaagcgtgaccgtgtctagtacgcgtatccagaaccctgatcctgccgtgtaccagctgcgggatagcaagagcagcgacaagagcgtgtgtctgttcaccgacttcgacagccagaccaacgtgtcccagagcaaggactccgacgtgtacatcaccgataagaccgtgctggacatgcggagcatggacttcaagagcaactccgccgtggcctggtccaacaagtccgatttcgcctgcgccaacgccttcaacaacagcattatccccgaggacacattcttcccaagccccgagagcagctgcggtaccatggctctgattgtgctgggcggagtggccggactgctgctgtttattggcctgggcatcttcttttgcgtgcggtgcagacaccggcggagacaggccgagagaatgagccagatcaagagactgctgtccgagaagaaaacctgccagtgcccccacagattccagaaaacatgcagccccatctctagacgggttaagttttccagatccgcagacgcacccgcttaccaacaagggcagaaccaactctacaatgaacttaatttggggcggagggaagagtacgacgttctggacaaaaggaggggacgagatcccgagatgggcggaaagcctcagcgaaggaagaatccgcaagaggggctttataacgaactccagaaagataaaatggcagaagcctatagtgagattgggatgaagggagaaaggaggaggggtaaaggtcacgatgggttgtaccaaggattgagcacagccactaaagatacctatgatgcgctccacatgcaggccctgccgccaagacgcgccaagagaagcggatctggcgtgaagcagaccctgaatttcgacctgctgaagctggctggcgacgtggaatccaacccaggccctggccatatgaccgagtacaagcccacggtgcgcctcgccacccgcgacgacgtccccagggccgtacgcaccctcgccgccgcgttcgccgactaccccgccacgcgccacaccgtcgatccggaccgccacatcgagcgggtcaccgagctgcaagaactcttcctcacgcgcgtcgggctcgacatcggcaaggtgtgggtcgcggacgacggcgccgcggtggcggtctggaccacgccggagagcgtcgaagcgggggcggtgttcgccgagatcggcccgcgcatggccgagttgagcggttcccggctggccgcgcagcaacagatggaaggcctcctggcgccgcaccggcccaaggagcccgcgtggttcctggccaccgtcggcgtctcgcccgaccaccagggcaagggtctgggcagcgccgtcgtgctccccggagtggaggcggccgagcgcgccggggtgcccgccttcctggagacctccgcgccccgcaacctccccttctacgagcggctcggcttcaccgtcaccgccgacgtcgaggtgcccgaaggaccgcgcacctggtgcatgacccgcaagcccggtgcctga

SEQ ID NO: 1028 - DNA, 3252 bp, synthetic construct
  source 1..3252: mol_type = other DNA
atggccttaccagtgaccgccttgctcctgccgctggccttgctgctccacgccgccaggccggacatccagatgacacagagccctagcagcctgtctgccagcgtgggagacagagtgaccatcacatgcaaggccagcgaccacatcaacaactggctggcctggtatcagcagaagcctggacaggcccctaagctgctgatctacggcgctaccacactggaaacaggcgtgcccagcagattttctggcagcggctctggcaccgactacaccctgacaatatccagcctccagcctgaggacttcgccacctactactgtcagcagagctggaacaccccttggacattcggccagggcaccaagctggaaatcaagagactcgaggacctgaagaacgtgttcccacctgaggtggccgtgttcgagcctagcgaggccgagatcagccacacccagaaagccaccctcgtgtgcctggctaccggcttctaccccgaccatgtggaactgtcttggtgggtcaacggcaaagaggtgcacagcggcgtgtctaccgacccccagccactgaaagaacagcccgccctgaacgacagccggtactgcctgagcagcagactgagagtgtccgccaccttctggcagaacccccggaaccacttcagatgccaggtgcagttctacggcctgagcgagaacgacgagtggacccaggacagagccaagcccgtgacccagatcgtgtctgccgaagcctggggcagagccgattgcggatcccagagcttcggcctgctggaccccaagctgtgctacctgctggatggcatcctgttcatctacggcgtgatcctgaccgccctgttcctgagagtgaagttcagcagaagcgccgacgcccctgcctaccagcagggacagaaccaactgtacaacgagctgaacctgggcagacgggaagagtacgacgtgctggacaagcggagaggcagggaccctgagatgggcggaaagccccagcggagaaagaacccccaggaaggactgtataacgaactccagaaagacaagatggccgaagcctacagcgagatcggcatgaagggcgagcggagaagaggcaagggccacgatggcctgtaccagggcctgagcaccgccaccaaggacacctatgacgccctgcacatgcaggccctgcctccaagaagggccaagcgatctggatctggagcaacaaacttctcactactcaaacaagcaggtgacgtggaggagaatcccgggcctactagtatggactggatttggcgcatccttttccttgtcggcgctgctaccggcgcgcattccttcgaacaagttcagcttcaacagcctggcgctgagctggtcaaacctggcgcttctgtgaagatgagctgcaaagccagcggctacgccttcagcagctactggatcaactggatgaagcagaaacccggccagggactcgaatggatcggccaaatctatcccggcgacggcgacaccaactacaacggcaagttcaagggcagagccacactgaccgccgatacctctagcagcacagcctacatgcagctgagcagcctgaccagcgaagatagcgccgtgtacttctgtgcccggtccatcacaacagtcgtgggctgcgctatggactattggggccagggaacaagcgtgaccgtgtctagtacgcgtatccagaaccctgatcctgccgtgtaccagctgcgggatagcaagagcagcgacaagagcgtgtgtctgttcaccgacttcgacagccagaccaacgtgtcccagagcaaggactccgacgtgtacatcaccgataagaccgtgctggacatgcggagcatggacttcaagagcaactccgccgtggcctggtccaacaagtccgatttcgcctgcgccaacgccttcaacaacagcattatccccgaggacacattcttcccaagccccgagagcagctgcggtacccagagttttgggttgttggaccctaaattgtgctatctgttggacggaatcctgttcatttacggagtgatcctgaccgcattgttcctgctgtactgcaaccaccggaacaggcggagagtgtgcaagtgccctagacctgtggtcaagagcggcgacaagcctagcctgagcgccagatatgttcgggttaagttttccagatccgcagacgcacccgcttaccaacaagggcagaaccaactctacaatgaacttaatttggggcggagggaagagtacgacgttctggacaaaaggaggggacgagatcccgagatgggcggaaagcctcagcgaaggaagaatccgcaagaggggctttataacgaactccagaaagataaaatggcagaagcctatagtgagattgggatgaagggagaaaggaggaggggtaaaggtcacgatgggttgtaccaaggattgagcacagccactaaagatacctatgatgcgctccacatgcaggccctgccgccaagacgcgccaagagaagcggatctggcgtgaagcagaccctgaatttcgacctgctgaagctggctggcgacgtggaatccaacccaggcccttctagaggccatatgaccgagtacaagcccacggtgcgcctcgccacccgcgacgacgtccccagggccgtacgcaccctcgccgccgcgttcgccgactaccccgccacgcgccacaccgtcgatccggaccgccacatcgagcgggtcaccgagctgcaagaactcttcctcacgcgcgtcgggctcgacatcggcaaggtgtgggtcgcggacgacggcgccgcggtggcggtctggaccacgccggagagcgtcgaagcgggggcggtgttcgccgagatcggcccgcgcatggccgagttgagcggttcccggctggccgcgcagcaacagatggaaggcctcctggcgccgcaccggcccaaggagcccgcgtggttcctggccaccgtcggcgtctcgcccgaccaccagggcaagggtctgggcagcgccgtcgtgctccccggagtggaggcggccgagcgcgccggggtgcccgccttcctggagacctccgcgccccgcaacctccccttctacgagcggctcggcttcaccgtcaccgccgacgtcgaggtgcccgaaggaccgcgcacctggtgcatgacccgcaagcccggtgcctga

SEQ ID NO: 1029 - DNA, 3276 bp, synthetic construct
  source 1..3276: mol_type = other DNA
atggccttaccagtgaccgccttgctcctgccgctggccttgctgctccacgccgccaggccggacatccagatgacacagagccctagcagcctgtctgccagcgtgggagacagagtgaccatcacatgcaaggccagcgaccacatcaacaactggctggcctggtatcagcagaagcctggacaggcccctaagctgctgatctacggcgctaccacactggaaacaggcgtgcccagcagattttctggcagcggctctggcaccgactacaccctgacaatatccagcctccagcctgaggacttcgccacctactactgtcagcagagctggaacaccccttggacattcggccagggcaccaagctggaaatcaagagactcgaggacctgaagaacgtgttcccacctgaggtggccgtgttcgagcctagcgaggccgagatcagccacacccagaaagccaccctcgtgtgcctggctaccggcttctaccccgaccatgtggaactgtcttggtgggtcaacggcaaagaggtgcacagcggcgtgtctaccgacccccagccactgaaagaacagcccgccctgaacgacagccggtactgcctgagcagcagactgagagtgtccgccaccttctggcagaacccccggaaccacttcagatgccaggtgcagttctacggcctgagcgagaacgacgagtggacccaggacagagccaagcccgtgacccagatcgtgtctgccgaagcctggggcagagccgattgcggatcccagagcttcggcctgctggaccccaagctgtgctacctgctggatggcatcctgttcatctacggcgtgatcctgaccgccctgttcctgagagtgaagttcagcagaagcgccgacgcccctgcctaccagcagggacagaaccaactgtacaacgagctgaacctgggcagacgggaagagtacgacgtgctggacaagcggagaggcagggaccctgagatgggcggaaagccccagcggagaaagaacccccaggaaggactgtataacgaactccagaaagacaagatggccgaagcctacagcgagatcggcatgaagggcgagcggagaagaggcaagggccacgatggcctgtaccagggcctgagcaccgccaccaaggacacctatgacgccctgcacatgcaggccctgcctccaagaagggccaagcgatctggatctggagcaacaaacttctcactactcaaacaagcaggtgacgtggaggagaatcccgggcctactagtatggactggatttggcgcatccttttccttgtcggcgctgctaccggcgcgcattccttcgaacaagttcagcttcaacagcctggcgctgagctggtcaaacctggcgcttctgtgaagatgagctgcaaagccagcggctacgccttcagcagctactggatcaactggatgaagcagaaacccggccagggactcgaatggatcggccaaatctatcccggcgacggcgacaccaactacaacggcaagttcaagggcagagccacactgaccgccgatacctctagcagcacagcctacatgcagctgagcagcctgaccagcgaagatagcgccgtgtacttctgtgcccggtccatcacaacagtcgtgggctgcgctatggactattggggccagggaacaagcgtgaccgtgtctagtacgcgtatccagaaccctgatcctgccgtgtaccagctgcgggatagcaagagcagcgacaagagcgtgtgtctgttcaccgacttcgacagccagaccaacgtgtcccagagcaaggactccgacgtgtacatcaccgataagaccgtgctggacatgcggagcatggacttcaagagcaactccgccgtggcctggtccaacaagtccgatttcgcctgcgccaacgccttcaacaacagcattatccccgaggacacattcttcccaagccccgagagcagctgcggtacccagagttttgggttgttggaccctaaattgtgctatctgttggacggaatcctgttcatttacggagtgatcctgaccgcattgttcctgtgtgtgaggtgccgccatcgacggaggcaggcagaaagaatgtcccagataaagcggttgcttagtgaaaagaaaacctgccagtgtcctcaccgattccagaagacgtgctcccccattcgggttaagttttccagatccgcagacgcacccgcttaccaacaagggcagaaccaactctacaatgaacttaatttggggcggagggaagagtacgacgttctggacaaaaggaggggacgagatcccgagatgggcggaaagcctcagcgaaggaagaatccgcaagaggggctttataacgaactccagaaagataaaatggcagaagcctatagtgagattgggatgaagggagaaaggaggaggggtaaaggtcacgatgggttgtaccaaggattgagcacagccactaaagatacctatgatgcgctccacatgcaggccctgccgccaagacgcgccaagagaagcggatctggcgtgaagcagaccctgaatttcgacctgctgaagctggctggcgacgtggaatccaacccaggcccttctagaggccatatgaccgagtacaagcccacggtgcgcctcgccacccgcgacgacgtccccagggccgtacgcaccctcgccgccgcgttcgccgactaccccgccacgcgccacaccgtcgatccggaccgccacatcgagcgggtcaccgagctgcaagaactcttcctcacgcgcgtcgggctcgacatcggcaaggtgtgggtcgcggacgacggcgccgcggtggcggtctggaccacgccggagagcgtcgaagcgggggcggtgttcgccgagatcggcccgcgcatggccgagttgagcggttcccggctggccgcgcagcaacagatggaaggcctcctggcgccgcaccggcccaaggagcccgcgtggttcctggccaccgtcggcgtctcgcccgaccaccagggcaagggtctgggcagcgccgtcgtgctccccggagtggaggcggccgagcgcgccggggtgcccgccttcctggagacctccgcgccccgcaacctccccttctacgagcggctcggcttcaccgtcaccgccgacgtcgaggtgcccgaaggaccgcgcacctggtgcatgacccgcaagcccggtgcctga

SEQ ID NO: 1030 - DNA, 2268 bp, synthetic construct
  source 1..2268: mol_type = other DNA
atggccttaccagtgaccgccttgctcctgccgctggccttgctgctccacgccgccaggccggacatccagatgacacagagccctagcagcctgtctgccagcgtgggagacagagtgaccatcacatgcaaggccagcgaccacatcaacaactggctggcctggtatcagcagaagcctggacaggcccctaagctgctgatctacggcgctaccacactggaaacaggcgtgcccagcagattttctggcagcggctctggcaccgactacaccctgacaatatccagcctccagcctgaggacttcgccacctactactgtcagcagagctggaacaccccttggacattcggccagggcaccaagctggaaatcaagagactcgaggacctgaagaacgtgttcccacctgaggtggccgtgttcgagcctagcgaggccgagatcagccacacccagaaagccaccctcgtgtgcctggctaccggcttctaccccgaccatgtggaactgtcttggtgggtcaacggcaaagaggtgcacagcggcgtgtctaccgacccccagccactgaaagaacagcccgccctgaacgacagccggtactgcctgagcagcagactgagagtgtccgccaccttctggcagaacccccggaaccacttcagatgccaggtgcagttctacggcctgagcgagaacgacgagtggacccaggacagagccaagcccgtgacccagatcgtgtctgccgaagcctggggcagagccgattgcggatcccagagcttcggcctgctggaccccaagctgtgctacctgctggatggcatcctgttcatctacggcgtgatcctgaccgccctgttcctgagagtgaagttcagcagaagcgccgacgcccctgcctaccagcagggacagaaccaactgtacaacgagctgaacctgggcagacgggaagagtacgacgtgctggacaagcggagaggcagggaccctgagatgggcggaaagccccagcggagaaagaacccccaggaaggactgtataacgaactccagaaagacaagatggccgaagcctacagcgagatcggcatgaagggcgagcggagaagaggcaagggccacgatggcctgtaccagggcctgagcaccgccaccaaggacacctatgacgccctgcacatgcaggccctgcctccaagaagggccaagcgatctggatctggagcaacaaacttctcactactcaaacaagcaggtgacgtggaggagaatcccgggcctactagtatggactggatttggcgcatccttttccttgtcggcgctgctaccggcgcgcattccttcgaacaagttcagcttcaacagcctggcgctgagctggtcaaacctggcgcttctgtgaagatgagctgcaaagccagcggctacgccttcagcagctactggatcaactggatgaagcagaaacccggccagggactcgaatggatcggccaaatctatcccggcgacggcgacaccaactacaacggcaagttcaagggcagagccacactgaccgccgatacctctagcagcacagcctacatgcagctgagcagcctgaccagcgaagatagcgccgtgtacttctgtgcccggtccatcacaacagtcgtgggctgcgctatggactattggggccagggaacaagcgtgaccgtgtctagtacgcgtatccagaaccctgatcctgccgtgtaccagctgcgggatagcaagagcagcgacaagagcgtgtgtctgttcaccgacttcgacagccagaccaacgtgtcccagagcaaggactccgacgtgtacatcaccgataagaccgtgctggacatgcggagcatggacttcaagagcaactccgccgtggcctggtccaacaagtccgatttcgcctgcgccaacgccttcaacaacagcattatccccgaggacacattcttcccaagccccgagagcagctgcggtaccatgtgccagaactgcatcgagctgaacgccgctaccatcagcggctttctgttcgccgagatcgtgtccatcttcgtgctggccgtgggcgtgtactttatcgctggacaggatggcgtgcggcagagcagagcttccgataagcaaaccctgctgcctaacgaccagctgtaccagcctctgaaggacagagaggacgaccagtacagccacctccagggcaatcagctgagaagaaactaa

SEQ ID NO: 1031 - DNA, 3396 bp, synthetic construct; identical to SEQ ID NO: 1012
  source 1..3396: mol_type = other DNA

SEQ ID NO: 1032 - DNA, 3273 bp, synthetic construct
  source 1..3273: mol_type = other DNA
atggccttaccagtgaccgccttgctcctgccgctggccttgctgctccacgccgccaggccggacatccagatgacacagagccctagcagcctgtctgccagcgtgggagacagagtgaccatcacatgcaaggccagcgaccacatcaacaactggctggcctggtatcagcagaagcctggacaggcccctaagctgctgatctacggcgctaccacactggaaacaggcgtgcccagcagattttctggcagcggctctggcaccgactacaccctgacaatatccagcctccagcctgaggacttcgccacctactactgtcagcagagctggaacaccccttggacattcggccagggcaccaagctggaaatcaagagactcgagggacagcctaaggccaatcctaccgtgacactgttccctccaagcagcgaagaactccaggccaacaaggccacacttgtgtgcctgatctccgacttctaccctggggctgtgacagtggcttggaaggccgatggatctcctgtgaaagccggcgtggaaaccaccaagccatccaagcagagcaacaacaaatacgccgccagctcctacctgagcctgacacctgagcagtggaagtcccacagatcctacagctgccaagtgacccacgaaggcagcaccgtggaaaagacagtggcccctacagagtgcagcggatcccagagcttcggcctgctggaccccaagctgtgctacctgctggatggcatcctgttcatctacggcgtgatcctgaccgccctgttcctgagagtgaagttcagcagaagcgccgacgcccctgcctaccagcagggacagaaccaactgtacaacgagctgaacctgggcagacgggaagagtacgacgtgctggacaagcggagaggcagggaccctgagatgggcggaaagccccagcggagaaagaacccccaggaaggactgtataacgaactccagaaagacaagatggccgaagcctacagcgagatcggcatgaagggcgagcggagaagaggcaagggccacgatggcctgtaccagggcctgagcaccgccaccaaggacacctatgacgccctgcacatgcaggccctgcctccaagaagggccaagcgatctggatctggagcaacaaacttctcactactcaaacaagcaggtgacgtggaggagaatcccgggcctactagtatggactggatttggcgcatccttttccttgtcggcgctgctaccggcgcgcattccttcgaacaagttcagcttcaacagcctggcgctgagctggtcaaacctggcgcttctgtgaagatgagctgcaaagccagcggctacgccttcagcagctactggatcaactggatgaagcagaaacccggccagggactcgaatggatcggccaaatctatcccggcgacggcgacaccaactacaacggcaagttcaagggcagagccacactgaccgccgatacctctagcagcacagcctacatgcagctgagcagcctgaccagcgaagatagcgccgtgtacttctgtgcccggtccatcacaacagtcgtgggctgcgctatggactattggggccagggaacaagcgtgaccgtgtctagtacgcgtgcctctacaaagggaccctccgtgtttcctctggctcccagcagcaagtctacaagcggaggaacagccgctctgggctgcctggtcaaggattactttcccgagcctgtgaccgtgtcctggaatagcggagcactgacaagcggcgtgcacacctttccagccgtgctgcaaagcagcggcctgtactctctgagcagcgtggtcacagtgcctagctctagcctgggcacccagacctacatctgcaatgtgaaccacaagcctagcaacaccaaggtggacaagagagtggaacccaagagctgtggtacctctggacaggtgctgctggaaagcaacatcaaggtgctgcccacctggtccacccccgtgcagcctatggctctgattgtgctgggcggagtggccggactgctgctgtttattggcctgggcatcttcttttgcgtgcggtgcagacaccggcggagacaggccgagagaatgagccagatcaagagactgctgtccgagaagaaaacctgccagtgcccccacagattccagaaaacatgcagccccatctctagacgggttaagttttccagatccgcagacgcacccgcttaccaacaagggcagaaccaactctacaatgaacttaatttggggcggagggaagagtacgacgttctggacaaaaggaggggacgagatcccgagatgggcggaaagcctcagcgaaggaagaatccgcaagaggggctttataacgaactccagaaagataaaatggcagaagcctatagtgagattgggatgaagggagaaaggaggaggggtaaaggtcacgatgggttgtaccaaggattgagcacagccactaaagatacctatgatgcgctccacatgcaggccctgccgccaagacgcgccaagagaagcggatctggcgtgaagcagaccctgaatttcgacctgctgaagctggctggcgacgtggaatccaacccaggccctggccatatgaccgagtacaagcccacggtgcgcctcgccacccgcgacgacgtccccagggccgtacgcaccctcgccgccgcgttcgccgactaccccgccacgcgccacaccgtcgatccggaccgccacatcgagcgggtcaccgagctgcaagaactcttcctcacgcgcgtcgggctcgacatcggcaaggtgtgggtcgcggacgacggcgccgcggtggcggtctggaccacgccggagagcgtcgaagcgggggcggtgttcgccgagatcggcccgcgcatggccgagttgagcggttcccggctggccgcgcagcaacagatggaaggcctcctggcgccgcaccggcccaaggagcccgcgtggttcctggccaccgtcggcgtctcgcccgaccaccagggcaagggtctgggcagcgccgtcgtgctccccggagtggaggcggccgagcgcgccggggtgcccgccttcctggagacctccgcgccccgcaacctccccttctacgagcggctcggcttcaccgtcaccgccgacgtcgaggtgcccgaaggaccgcgcacctggtgcatgacccgcaagcccggtgcctga

SEQ ID NO: 1033 - DNA, 3207 bp, synthetic construct
  source 1..3207: mol_type = other DNA
atggccttaccagtgaccgccttgctcctgccgctggccttgctgctccacgccgccaggccggacatccagatgacacagagccctagcagcctgtctgccagcgtgggagacagagtgaccatcacatgcaaggccagcgaccacatcaacaactggctggcctggtatcagcagaagcctggacaggcccctaagctgctgatctacggcgctaccacactggaaacaggcgtgcccagcagattttctggcagcggctctggcaccgactacaccctgacaatatccagcctccagcctgaggacttcgccacctactactgtcagcagagctggaacaccccttggacattcggccagggcaccaagctggaaatcaagagactcgagggacagcctaaggccaatcctaccgtgacactgttccctccaagcagcgaagaactccaggccaacaaggccacacttgtgtgcctgatctccgacttctaccctggggctgtgacagtggcttggaaggccgatggatctcctgtgaaagccggcgtggaaaccaccaagccatccaagcagagcaacaacaaatacgccgccagctcctacctgagcctgacacctgagcagtggaagtcccacagatcctacagctgccaagtgacccacgaaggcagcaccgtggaaaagacagtggcccctacagagtgcagcggatcccagagcttcggcctgctggaccccaagctgtgctacctgctggatggcatcctgttcatctacggcgtgatcctgaccgccctgttcctgagagtgaagttcagcagaagcgccgacgcccctgcctaccagcagggacagaaccaactgtacaacgagctgaacctgggcagacgggaagagtacgacgtgctggacaagcggagaggcagggaccctgagatgggcggaaagccccagcggagaaagaacccccaggaaggactgtataacgaactccagaaagacaagatggccgaagcctacagcgagatcggcatgaagggcgagcggagaagaggcaagggccacgatggcctgtaccagggcctgagcaccgccaccaaggacacctatgacgccctgcacatgcaggccctgcctccaagaagggccaagcgatctggatctggagcaacaaacttctcactactcaaacaagcaggtgacgtggaggagaatcccgggcctactagtatggactggatttggcgcatccttttccttgtcggcgctgctaccggcgcgcattccttcgaacaagttcagcttcaacagcctggcgctgagctggtcaaacctggcgcttctgtgaagatgagctgcaaagccagcggctacgccttcagcagctactggatcaactggatgaagcagaaacccggccagggactcgaatggatcggccaaatctatcccggcgacggcgacaccaactacaacggcaagttcaagggcagagccacactgaccgccgatacctctagcagcacagcctacatgcagctgagcagcctgaccagcgaagatagcgccgtgtacttctgtgcccggtccatcacaacagtcgtgggctgcgctatggactattggggccagggaacaagcgtgaccgtgtctagtacgcgtgcctctacaaagggaccctccgtgtttcctctggctcccagcagcaagtctacaagcggaggaacagccgctctgggctgcctggtcaaggattactttcccgagcctgtgaccgtgtcctggaatagcggagcactgacaagcggcgtgcacacctttccagccgtgctgcaaagcagcggcctgtactctctgagcagcgtggtcacagtgcctagctctagcctgggcacccagacctacatctgcaatgtgaaccacaagcctagcaacaccaaggtggacaagagagtggaacccaagagctgtggtaccatggctctgattgtgctgggcggagtggccggactgctgctgtttattggcctgggcatcttcttttgcgtgcggtgcagacaccggcggagacaggccgagagaatgagccagatcaagagactgctgtccgagaagaaaacctgccagtgcccccacagattccagaaaacatgcagccccatctctagacgggttaagttttccagatccgcagacgcacccgcttaccaacaagggcagaaccaactctacaatgaacttaatttggggcggagggaagagtacgacgttctggacaaaaggaggggacgagatcccgagatgggcggaaagcctcagcgaaggaagaatccgcaagaggggctttataacgaactccagaaagataaaatggcagaagcctatagtgagattgggatgaagggagaaaggaggaggggtaaaggtcacgatgggttgtaccaaggattgagcacagccactaaagatacctatgatgcgctccacatgcaggccctgccgccaagacgcgccaagagaagcggatctggcgtgaagcagaccctgaatttcgacctgctgaagctggctggcgacgtggaatccaacccaggccctggccatatgaccgagtacaagcccacggtgcgcctcgccacccgcgacgacgtccccagggccgtacgcaccctcgccgccgcgttcgccgactaccccgccacgcgccacaccgtcgatccggaccgccacatcgagcgggtcaccgagctgcaagaactcttcctcacgcgcgtcgggctcgacatcggcaaggtgtgggtcgcggacgacggcgccgcggtggcggtctggaccacgccggagagcgtcgaagcgggggcggtgttcgccgagatcggcccgcgcatggccgagttgagcggttcccggctggccgcgcagcaacagatggaaggcctcctggcgccgcaccggcccaaggagcccgcgtggttcctggccaccgtcggcgtctcgcccgaccaccagggcaagggtctgggcagcgccgtcgtgctccccggagtggaggcggccgagcgcgccggggtgcccgccttcctggagacctccgcgccccgcaacctccccttctacgagcggctcggcttcaccgtcaccgccgacgtcgaggtgcccgaaggaccgcgcacctggtgcatgacccgcaagcccggtgcctga

SEQ ID NO: 1034 - DNA, 3678 bp, synthetic construct
  source 1..3678: mol_type = other DNA
atggccttaccagtgaccgccttgctcctgccgctggccttgctgctccacgccgccaggccggacatccagatgacacagagccctagcagcctgtctgccagcgtgggagacagagtgaccatcacatgcaaggccagcgaccacatcaacaactggctggcctggtatcagcagaagcctggacaggcccctaagctgctgatctacggcgctaccacactggaaacaggcgtgcccagcagattttctggcagcggctctggcaccgactacaccctgacaatatccagcctccagcctgaggacttcgccacctactactgtcagcagagctggaacaccccttggacattcggccagggcaccaagctggaaatcaagagactcgaggacctgaagaacgtgttcccacctgaggtggccgtgttcgagcctagcgaggccgagatcagccacacccagaaagccaccctcgtgtgcctggctaccggcttctaccccgaccatgtggaactgtcttggtgggtcaacggcaaagaggtgcacagcggcgtgtctaccgacccccagccactgaaagaacagcccgccctgaacgacagccggtactgcctgagcagcagactgagagtgtccgccaccttctggcagaacccccggaaccacttcagatgccaggtgcagttctacggcctgagcgagaacgacgagtggacccaggacagagccaagcccgtgacccagatcgtgtctgccgaagcctggggcagagccgattgcggatcccagagcttcggcctgctggaccccaagctgagctacctgctggatggcatcctgttcatctacggcgtgatcctgaccgccctgttcctgtggcggcggaagcggaaagagaagcagtctgagacaagccccaaagagttcctgaccatctacgaggacgtgaaggacctgaaaacccggcggaaccacgaacaagagcagacctttcctggcggaggcagcaccatctacagcatgatccagagccagagcagcgcccctacaagccaagagcctgcctacacactgtactccctgatccagcctagcagaaagagcggcagccggaagagaaatcacagccccagcttcaacagcacgatctacgaagtgatcggcaagagccagccaaaggctcagaaccctgccagactgagccggaaagagctggaaaacttcgacgtgtacagcactagtagagtgaagttcagcagaagcgccgacgcccctgcctaccagcagggacagaaccaactgtacaacgagctgaacctgggcagacgggaagagtacgacgtgctggacaagcggagaggcagggaccctgagatgggcggaaagccccagcggagaaagaacccccaggaaggactgtataacgaactccagaaagacaagatggccgaagcctacagcgagatcggcatgaagggcgagcggagaagaggcaagggccacgatggcctgtaccagggcctgagcaccgccaccaaggacacctatgacgccctgcacatgcaggccctgcctccaagaagggccaagcgatctggatctggagcaacaaacttctcactactcaaacaagcaggtgacgtggaggagaatcccgggcctatggactggatttggcgcatccttttccttgtcggcgctgctaccggcgcgcattccttcgaacaagttcagcttcaacagcctggcgctgagctggtcaaacctggcgcttctgtgaagatgagctgcaaagccagcggctacgccttcagcagctactggatcaactggatgaagcagaaacccggccagggactcgaatggatcggccaaatctatcccggcgacggcgacaccaactacaacggcaagttcaagggcagagccacactgaccgccgatacctctagcagcacagcctacatgcagctgagcagcctgaccagcgaagatagcgccgtgtacttctgtgcccggtccatcacaacagtcgtgggctgcgctatggactattggggccagggaacaagcgtgaccgtgtctagtacgcgtatccagaaccctgatcctgccgtgtaccagctgcgggatagcaagagcagcgacaagagcgtgtgtctgttcaccgacttcgacagccagaccaacgtgtcccagagcaaggactccgacgtgtacatcaccgataagaccgtgctggacatgcggagcatggacttcaagagcaactccgccgtggcctggtccaacaagtccgatttcgcctgcgccaacgccttcaacaacagcattatccccgaggacacattcttcccaagccccgagagcagctgcggtacctctggacaggtgctgctggaaagcaacatcaaggtgctgcccacctggtccacccccgtgcagcctatggctctgattgtgctgggcggagtggccggactgctgctgtttattggcctgggcatcttcttttgcgtgcggtgcagacaccggcggagacaggccgagagaatgagccagatcaagagactgctgtccgagaagaaaacctgccagtgcccccacagattccagaaaacatgcagccccatctctagacgggttaagttttccagatccgcagacgcacccgcttaccaacaagggcagaaccaactctacaatgaacttaatttggggcggagggaagagtacgacgttctggacaaaaggaggggacgagatcccgagatgggcggaaagcctcagcgaaggaagaatccgcaagaggggctttataacgaactccagaaagataaaatggcagaagcctatagtgagattgggatgaagggagaaaggaggaggggtaaaggtcacgatgggttgtaccaaggattgagcacagccactaaagatacctatgatgcgctccacatgcaggccctgccgccaagacgcgccaagagaagcggatctggcgtgaagcagaccctgaatttcgacctgctgaagctggctggcgacgtggaatccaacccaggccctggccatatgaccgagtacaagcccacggtgcgcctcgccacccgcgacgacgtccccagggccgtacgcaccctcgccgccgcgttcgccgactaccccgccacgcgccacaccgtcgatccggaccgccacatcgagcgggtcaccgagctgcaagaactcttcctcacgcgcgtcgggctcgacatcggcaaggtgtgggtcgcggacgacggcgccgcggtggcggtctggaccacgccggagagcgtcgaagcgggggcggtgttcgccgagatcggcccgcgcatggccgagttgagcggttcccggctggccgcgcagcaacagatggaaggcctcctggcgccgcaccggcccaaggagcccgcgtggttcctggccaccgtcggcgtctcgcccgaccaccagggcaagggtctgggcagcgccgtcgtgctccccggagtggaggcggccgagcgcgccggggtgcccgccttcctggagacctccgcgccccgcaacctccccttctacgagcggctcggcttcaccgtcaccgccgacgtcgaggtgcccgaaggaccgcgcacctggtgcatgacccgcaagcccggtgcctga

SEQ ID NO: 1035 - DNA, 2457 bp, synthetic construct; identical to SEQ ID NO: 999
  source 1..2457: mol_type = other DNA

SEQ ID NO: 1036 - DNA, 2454 bp, synthetic construct; identical to SEQ ID NO: 1000
  source 1..2454: mol_type = other DNA

SEQ ID NO: 1037 - DNA, 2454 bp, synthetic construct; identical to SEQ ID NO: 1000
  source 1..2454: mol_type = other DNA

SEQ ID NO: 1038 - DNA, 2697 bp, synthetic construct
  source 1..2697: mol_type = other DNA
atggccttaccagtgaccgccttgctcctgccgctggccttgctgctccacgccgccaggccggaagtgcagctggttgaatctggcggaggactggttcaggctggcggatctctgagactgtcttgtgccgccagcggcagaacctttagcatgggctggtttagacaggcccctggcaaagagagagagttcgtcgccgccatcacatactctggcggcagcccttactacgccgactctgtgaagggcagattcaccatcagccgggacaacgccaagaacaccgtgtacctccagatgaacagcctgaagcctgaggacaccgccgtgtactactgcgccgccaatccaacatacggcagcgactggaacgccgagaattggggccagggaacccaagtgacagtgtctagcggtaccggcggaggcggatctggcggcggaggtagcggtggcggaggatctgaattcgacatccagatgacacagagccctagcagcctgtctgccagcgtgggagacagagtgaccatcacatgcaaggccagcgaccacatcaacaactggctggcctggtatcagcagaagcctggacaggcccctaagctgctgatctacggcgctaccacactggaaacaggcgtgcccagcagattttctggcagcggctctggcaccgactacaccctgacaatatccagcctccagcctgaggacttcgccacctactactgtcagcagagctggaacaccccttggacattcggccagggcaccaagctggaaatcaagagactcgaggacctgaagaacgtgttcccacctgaggtggccgtgttcgagcctagcgaggccgagatcagccacacccagaaagccaccctcgtgtgcctggctaccggcttctaccccgaccatgtggaactgtcttggtgggtcaacggcaaagaggtgcacagcggcgtgtgtaccgacccccagccactgaaagaacagcccgccctgaacgacagccggtactgcctgagcagcagactgagagtgtccgccaccttctggcagaacccccggaaccacttcagatgccaggtgcagttctacggcctgagcgagaacgacgagtggacccaggacagagccaagcccgtgacccagatcgtgtctgccgaagcctggggcagagccgattgcggctttaccagcgagagctaccagcagggcgtgctgagcgccaccatcctgtacgagatcctgctgggcaaggccaccctgtacgccgtgctggtgtctgccctggtgctgatggctatggtcaagcggaaggacagccggggaagggccaagcgatctggatctggagcaacaaacttctcactactcaaacaagcaggtgacgtggaggagaatcccgggcctactagtaccatggactggatttggcgcatccttttccttgtcggcgctgctaccggcgcccattccgggccccaagtgcagctccaagaaagtggcggtggccttgtgcaggctggtggttctctgagactgagctgtgctgccagcggctccatcagcagaatcggcgacatgggatggtataggcaggctccagggaaagaacgcgagttcgtggccgctattgcagccggcggaaccacatattacgccgacagcgtgaaaggccggttcaccatctccagagataatgccaagaatacggtctacttgcaaatgaactctctcaagcccgaggatacggctgtgtattactgcgccgccagccacgaaacccagcctacacagctggtgtattggggagccggaacacaagtgaccgtcagctctggatccggcggcggaggatctggcggaggcggatctgggggcggaggctctttcgaacaagttcagcttcaacagcctggcgctgagctggtcaaacctggcgcttctgtgaagatgagctgcaaagccagcggctacgccttcagcagctactggatcaactggatgaagcagaaacccggccagggactcgaatggatcggccaaatctatcccggcgacggcgacaccaactacaacggcaagttcaagggcagagccacactgaccgccgatacctctagcagcacagcctacatgcagctgagcagcctgaccagcgaagatagcgccgtgtacttctgtgcccggtccatcacaacagtcgtgggctgcgctatggactattggggccagggaacaagcgtgaccgtgtctagtacgcgtatccagaaccctgatcctgccgtgtaccagctgcgggatagcaagagcagcgacaagagcgtgtgtctgttcaccgacttcgacagccagaccaacgtgtcccagagcaaggactccgacgtgtacatcaccgataagtgcgtgctggacatgcggagcatggacttcaagagcaactccgccgtggcctggtccaacaagtccgatttcgcctgcgccaacgccttcaacaacagcattatccccgaggacacattcttcccaagccccgagagcagctgcgacgtgaagctggtggaaaagagcttcgagacagacaccaacctgaacttccagaacctgagcgtgatcggcttcagaatcctgctgctgaaagtggccggctttaacctgctgatgaccctgcggctgtggtccagctaa

SEQ ID NO: 1039 - DNA, 3405 bp, synthetic construct
  source 1..3405: mol_type = other DNA
atggccttaccagtgaccgccttgctcctgccgctggccttgctgctccacgccgccaggccggcatgcgaagtgcagctgcttgaaagtggcggcggactgattcagcctggcggatctctgagactgagctgtgccgccagcggcttcaccttttctagccacgccatgacctgggtccgacaggcacctggaaaagggcttgaatgggtgtccgccatcagcggctctggcgattacacacactacgccgacagcgtgaagggcagattcaccatcagcagagacaacagcaagaacaccgtgtacctccagatgaacagcctgagagccgaggacagcgccgtgtattattgcgccaaggatgaggatggcggcagcctgcttggacacagaggacaaggcaccctggtcaccgtttcttccggtaccggcggaggcggatctggcggcggaggtagcggtggcggaggatctgaattcgacatccagatgacacagagccctagcagcctgtctgccagcgtgggagacagagtgaccatcacatgcaaggccagcgaccacatcaacaactggctggcctggtatcagcagaagcctggacaggcccctaagctgctgatctacggcgctaccacactggaaacaggcgtgcccagcagattttctggcagcggctctggcaccgactacaccctgacaatatccagcctccagcctgaggacttcgccacctactactgtcagcagagctggaacaccccttggacattcggccagggcaccaagctggaaatcaagagactcgaggacctgaagaacgtgttcccacctgaggtggccgtgttcgagcctagcgaggccgagatcagccacacccagaaagccaccctcgtgtgcctggctaccggcttctaccccgaccatgtggaactgtcttggtgggtcaacggcaaagaggtgcacagcggcgtgtgtaccgacccccagccactgaaagaacagcccgccctgaacgacagccggtactgcctgagcagcagactgagagtgtccgccaccttctggcagaacccccggaaccacttcagatgccaggtgcagttctacggcctgagcgagaacgacgagtggacccaggacagagccaagcccgtgacccagatcgtgtctgccgaagcctggggcagagccgattgcggctttaccagcgagagctaccagcagggcgtgctgagcgccaccatcctgtacgagatcctgctgggcaaggccaccctgtacgccgtgctggtgtctgccctggtgctgatggctatggtcaagcggaaggacagccggggaagggccaagcgatctggatctggagcaacaaacttctcactactcaaacaagcaggtgacgtggaggagaatcccgggcctactagtaccatggactggatttggcgcatccttttccttgtcggcgctgctaccggcgcccattccgggccccaagtgcagctccaagaaagtggcggtggccttgtgcaggctggtggttctctgagactgagctgtgctgccagcggctccatcagcagaatcggcgacatgggatggtataggcaggctccagggaaagaacgcgagttcgtggccgctattgcagccggcggaaccacatattacgccgacagcgtgaaaggccggttcaccatctccagagataatgccaagaatacggtctacttgcaaatgaactctctcaagcccgaggatacggctgtgtattactgcgccgccagccacgaaacccagcctacacagctggtgtattggggagccggaacacaagtgaccgtcagctctggatccggcggcggaggatctggcggaggcggatctgggggcggaggctctttcgaacaagttcagcttcaacagcctggcgctgagctggtcaaacctggcgcttctgtgaagatgagctgcaaagccagcggctacgccttcagcagctactggatcaactggatgaagcagaaacccggccagggactcgaatggatcggccaaatctatcccggcgacggcgacaccaactacaacggcaagttcaagggcagagccacactgaccgccgatacctctagcagcacagcctacatgcagctgagcagcctgaccagcgaagatagcgccgtgtacttctgtgcccggtccatcacaacagtcgtgggctgcgctatggactattggggccagggaacaagcgtgaccgtgtctagtacgcgtatccagaaccctgatcctgccgtgtaccagctgcgggatagcaagagcagcgacaagagcgtgtgtctgttcaccgacttcgacagccagaccaacgtgtcccagagcaaggactccgacgtgtacatcaccgataagtgcgtgctggacatgcggagcatggacttcaagagcaactccgccgtggcctggtccaacaagtccgatttcgcctgcgccaacgccttcaacaacagcattatccccgaggacacattcttcccaagccccgagagcagctgcgacgtgaagctggtggaaaagagcttcgagacagacaccaacctgaacttccagaacctgagcgtgatcggcttcagaatcctgctgctgaaagtggccggctttaacctgctgatgaccctgcggctgtggtccagccgcgccaagagaagcggatctggcgtgaagcagaccctgaatttcgacctgctgaagctggctggcgacgtggaatccaacccaggcccttctagaggccatatgaccgagtacaagcccacggtgcgcctcgccacccgcgacgacgtccccagggccgtacgcaccctcgccgccgcgttcgccgactaccccgccacgcgccacaccgtcgatccggaccgccacatcgagcgggtcaccgagctgcaagaactcttcctcacgcgcgtcgggctcgacatcggcaaggtgtgggtcgcggacgacggcgccgcggtggcggtctggaccacgccggagagcgtcgaagcgggggcggtgttcgccgagatcggcccgcgcatggccgagttgagcggttcccggctggccgcgcagcaacagatggaaggcctcctggcgccgcaccggcccaaggagcccgcgtggttcctggccaccgtcggcgtctcgcccgaccaccagggcaagggtctgggcagcgccgtcgtgctccccggagtggaggcggccgagcgcgccggggtgcccgccttcctggagacctccgcgccccgcaacctccccttctacgagcggctcggcttcaccgtcaccgccgacgtcgaggtgcccgaaggaccgcgcacctggtgcatgacccgcaagcccggtgcctga

SEQ ID NO: 1040 - DNA, 3492 bp, synthetic construct
  source 1..3492: mol_type = other DNA
atggccttaccagtgaccgccttgctcctgccgctggccttgctgctccacgccgccaggccggacatccagatgacacagagccctagcagcctgtctgccagcgtgggagacagagtgaccatcacatgcaaggccagcgaccacatcaacaactggctggcctggtatcagcagaagcctggacaggcccctaagctgctgatctacggcgctaccacactggaaacaggcgtgcccagcagattttctggcagcggctctggcaccgactacaccctgacaatatccagcctccagcctgaggacttcgccacctactactgtcagcagagctggaacaccccttggacattcggccagggcaccaagctggaaatcaagagactcgaggacctgaagaacgtgttcccacctgaggtggccgtgttcgagcctagcgaggccgagatcagccacacccagaaagccaccctcgtgtgcctggctaccggcttctaccccgaccatgtggaactgtcttggtgggtcaacggcaaagaggtgcacagcggcgtgtctaccgacccccagccactgaaagaacagcccgccctgaacgacagccggtactgcctgagcagcagactgagagtgtccgccaccttctggcagaacccccggaaccacttcagatgccaggtgcagttctacggcctgagcgagaacgacgagtggacccaggacagagccaagcccgtgacccagatcgtgtctgccgaagcctggggcagagccgattgcggatcccagagcttcggcctgctggaccccaagctgtgctacctgctggatggcatcctgttcatctacggcgtgatcctgaccgccctgttcctgagagtgaagttcagcagaagcgccgacgcccctgcctaccagcagggacagaaccaactgtacaacgagctgaacctgggcagacgggaagagtacgacgtgctggacaagcggagaggcagggaccctgagatgggcggaaagccccagcggagaaagaacccccaggaaggactgtataacgaactccagaaagacaagatggccgaagcctacagcgagatcggcatgaagggcgagcggagaagaggcaagggccacgatggcctgtaccagggcctgagcaccgccaccaaggacacctatgacgccctgcacatgcaggccctgcctccaagaagggccaagcgatctggatctggagcaacaaacttctcactactcaaacaagcaggtgacgtggaggagaatcccgggcctactagtatggactggatttggcgcatccttttccttgtcggcgctgctaccggcgcgcattccttcgaacaagttcagcttcaacagcctggcgctgagctggtcaaacctggcgcttctgtgaagatgagctgcaaagccagcggctacgccttcagcagctactggatcaactggatgaagcagaaacccggccagggactcgaatggatcggccaaatctatcccggcgacggcgacaccaactacaacggcaagttcaagggcagagccacactgaccgccgatacctctagcagcacagcctacatgcagctgagcagcctgaccagcgaagatagcgccgtgtacttctgtgcccggtccatcacaacagtcgtgggctgcgctatggactattggggccagggaacaagcgtgaccgtgtctagtacgcgtatccagaaccctgatcctgccgtgtaccagctgcgggatagcaagagcagcgacaagagcgtgtgtctgttcaccgacttcgacagccagaccaacgtgtcccagagcaaggactccgacgtgtacatcaccgataagaccgtgctggacatgcggagcatggacttcaagagcaactccgccgtggcctggtccaacaagtccgatttcgcctgcgccaacgccttcaacaacagcattatccccgaggacacattcttcccaagccccgagagcagctgcggtacccagagttttgggttgttggaccctaaattgtgctatctgttggacggaatcctgttcatttacggagtgatcctgaccgcattgttcctgcgggttaagttttccagatccgcagacgcacccgcttaccaacaagggcagaaccaactctacaatgaacttaatttggggcggagggaagagtacgacgttctggacaaaaggaggggacgagatcccgagatgggcggaaagcctcagcgaaggaagaatccgcaagaggggctttataacgaactccagaaagataaaatggcagaagcctatagtgagattgggatgaagggagaaaggaggaggggtaaaggtcacgatgggttgtaccaaggattgagcacagccactaaagatacctatgatgcgctccacatgcaggccctgccgccaaggtctagaggaggcagcctcgagggaggaggcgtccaagtcgaaaccattagtcccggcgatggcagaacatttcctaaaaggggacaaacatgtgtcgtccattatacaggcatgttggaggacggcaaaaaggtggacagtagtagagatcgcaataaacctttcaaattcatgttgggaaaacaagaagtcattaggggatgggaggagggcgtggctcaaatgtccgtcggccaacgcgctaagctcaccatcagccccgactacgcatacggcgctaccggacatcccggaattattccccctcacgctaccttggtgtttgacgtcgaactgttgaagctcgggactagtagagcaaagcgaagtggtagcggagcaaccaacttttctctgctcaagcaagccggtgacgtggaagagaaccctggtcctcatatgaccgagtacaagcccacggtgcgcctcgccacccgcgacgacgtccccagggccgtacgcaccctcgccgccgcgttcgccgactaccccgccacgcgccacaccgtcgatccggaccgccacatcgagcgggtcaccgagctgcaagaactcttcctcacgcgcgtcgggctcgacatcggcaaggtgtgggtcgcggacgacggcgccgcggtggcggtctggaccacgccggagagcgtcgaagcgggggcggtgttcgccgagatcggcccgcgcatggccgagttgagcggttcccggctggccgcgcagcaacagatggaaggcctcctggcgccgcaccggcccaaggagcccgcgtggttcctggccaccgtcggcgtctcgcccgaccaccagggcaagggtctgggcagcgccgtcgtgctccccggagtggaggcggccgagcgcgccggggtgcccgccttcctggagacctccgcgccccgcaacctccccttctacgagcggctcggcttcaccgtcaccgccgacgtcgaggtgcccgaaggaccgcgcacctggtgcatgacccgcaagcccggtgcctga

SEQ ID NO: 1041 - DNA, 3489 bp, synthetic construct
  source 1..3489: mol_type = other DNA
atggccttaccagtgaccgccttgctcctgccgctggccttgctgctccacgccgccaggccggacatccagatgacacagagccctagcagcctgtctgccagcgtgggagacagagtgaccatcacatgcaaggccagcgaccacatcaacaactggctggcctggtatcagcagaagcctggacaggcccctaagctgctgatctacggcgctaccacactggaaacaggcgtgcccagcagattttctggcagcggctctggcaccgactacaccctgacaatatccagcctccagcctgaggacttcgccacctactactgtcagcagagctggaacaccccttggacattcggccagggcaccaagctggaaatcaagagactcgaggacctgaagaacgtgttcccacctgaggtggccgtgttcgagcctagcgaggccgagatcagccacacccagaaagccaccctcgtgtgcctggctaccggcttctaccccgaccatgtggaactgtcttggtgggtcaacggcaaagaggtgcacagcggcgtgtctaccgacccccagccactgaaagaacagcccgccctgaacgacagccggtactgcctgagcagcagactgagagtgtccgccaccttctggcagaacccccggaaccacttcagatgccaggtgcagttctacggcctgagcgagaacgacgagtggacccaggacagagccaagcccgtgacccagatcgtgtctgccgaagcctggggcagagccgattgcggatcccagagcttcggcctgctggaccccaagctgtgctacctgctggatggcatcctgttcatctacggcgtgatcctgaccgccctgttcctgagagtgaagttcagcagaagcgccgacgcccctgcctaccagcagggacagaaccaactgtacaacgagctgaacctgggcagacgggaagagtacgacgtgctggacaagcggagaggcagggaccctgagatgggcggaaagccccagcggagaaagaacccccaggaaggactgtataacgaactccagaaagacaagatggccgaagcctacagcgagatcggcatgaagggcgagcggagaagaggcaagggccacgatggcctgtaccagggcctgagcaccgccaccaaggacacctatgacgccctgcacatgcaggccctgcctccaagaagggccaagcgatctggatctggagcaacaaacttctcactactcaaacaagcaggtgacgtggaggagaatcccgggcctactagtatggactggatttggcgcatccttttccttgtcggcgctgctaccggcgcgcattccttcgaacaagttcagcttcaacagcctggcgctgagctggtcaaacctggcgcttctgtgaagatgagctgcaaagccagcggctacgccttcagcagctactggatcaactggatgaagcagaaacccggccagggactcgaatggatcggccaaatctatcccggcgacggcgacaccaactacaacggcaagttcaagggcagagccacactgaccgccgatacctctagcagcacagcctacatgcagctgagcagcctgaccagcgaagatagcgccgtgtacttctgtgcccggtccatcacaacagtcgtgggctgcgctatggactattggggccagggaacaagcgtgaccgtgtctagtacgcgtatccagaaccctgatcctgccgtgtaccagctgcgggatagcaagagcagcgacaagagcgtgtgtctgttcaccgacttcgacagccagaccaacgtgtcccagagcaaggactccgacgtgtacatcaccgataagaccgtgctggacatgcggagcatggacttcaagagcaactccgccgtggcctggtccaacaagtccgatttcgcctgcgccaacgccttcaacaacagcattatccccgaggacacattcttcccaagccccgagagcagctgcggtacccagagttttgggttgttggaccctaaattgtgctatctgttggacggaatcctgttcatttacggagtgatcctgaccgcattgttcctgcgggttaagttttccagatccgcagacgcacccgcttaccaacaagggcagaaccaactctacaatgaacttaatttggggcggagggaagagtacgacgttctggacaaaaggaggggacgagatcccgagatgggcggaaagcctcagcgaaggaagaatccgcaagaggggctttataacgaactccagaaagataaaatggcagaagcctatagtgagattgggatgaagggagaaaggaggaggggtaaaggtcacgatgggttgtaccaaggattgagcacagccactaaagatacctatgatgcgctccacatgcaggccctgccgccaaggtctagaggaggaggcagtggcttccagtgcaatcagtgcggggcctcattcacccagaagggcaacctgctccggcacatcaagctgcattccggggagaagcccttcaaatgccacctctgcaactacgcctgccgccggagggacgccctcactggccacctgaggacgcactccgttggtaaacctcacaaatgtggatattgtggccgaagctataaacagcgaagctctttagaggaacataaagagcgctgccacaactacttggaaagcatgggccttccgggcacactgtacccagtcattaaagaagaaggactcgagaccgatttctacgactacaaggacgacgatgacaagactagtggctccggcgagggcagaggaagtctactaacctgcggagatgtggaagaaaatcctggcccacatatgaccgagtacaagcccacggtgcgcctcgccacccgcgacgacgtccccagggccgtacgcaccctcgccgccgcgttcgccgactaccccgccacgcgccacaccgtcgatccggaccgccacatcgagcgggtcaccgagctgcaagaactcttcctcacgcgcgtcgggctcgacatcggcaaggtgtgggtcgcggacgacggcgccgcggtggcggtctggaccacgccggagagcgtcgaagcgggggcggtgttcgccgagatcggcccgcgcatggccgagttgagcggttcccggctggccgcgcagcaacagatggaaggcctcctggcgccgcaccggcccaaggagcccgcgtggttcctggccaccgtcggcgtctcgcccgaccaccagggcaagggtctgggcagcgccgtcgtgctccccggagtggaggcggccgagcgcgccggggtgcccgccttcctggagacctccgcgccccgcaacctccccttctacgagcggctcggcttcaccgtcaccgccgacgtcgaggtgcccgaaggaccgcgcacctggtgcatgacccgcaagcccggtgcctga

SEQ ID NO: 1042 - DNA, 3258 bp, synthetic construct
  source 1..3258: mol_type = other DNA
atggccttaccagtgaccgccttgctcctgccgctggccttgctgctccacgccgccaggccggacatccagatgacacagagccctagcagcctgtctgccagcgtgggagacagagtgaccatcacatgcaaggccagcgaccacatcaacaactggctggcctggtatcagcagaagcctggacaggcccctaagctgctgatctacggcgctaccacactggaaacaggcgtgcccagcagattttctggcagcggctctggcaccgactacaccctgacaatatccagcctccagcctgaggacttcgccacctactactgtcagcagagctggaacaccccttggacattcggccagggcaccaagctggaaatcaagagactcgaggacctgaagaacgtgttcccacctgaggtggccgtgttcgagcctagcgaggccgagatcagccacacccagaaagccaccctcgtgtgcctggctaccggcttctaccccgaccatgtggaactgtcttggtgggtcaacggcaaagaggtgcacagcggcgtgtctaccgacccccagccactgaaagaacagcccgccctgaacgacagccggtactgcctgagcagcagactgagagtgtccgccaccttctggcagaacccccggaaccacttcagatgccaggtgcagttctacggcctgagcgagaacgacgagtggacccaggacagagccaagcccgtgacccagatcgtgtctgccgaagcctggggcagagccgattgcggatcccagagcttcggcctgctggaccccaagctgtgctacctgctggatggcatcctgttcatctacggcgtgatcctgaccgccctgttcctgagagtgaagttcagcagaagcgccgacgcccctgcctaccagcagggacagaaccaactgtacaacgagctgaacctgggcagacgggaagagtacgacgtgctggacaagcggagaggcagggaccctgagatgggcggaaagccccagcggagaaagaacccccaggaaggactgtataacgaactccagaaagacaagatggccgaagcctacagcgagatcggcatgaagggcgagcggagaagaggcaagggccacgatggcctgtaccagggcctgagcaccgccaccaaggacacctatgacgccctgcacatgcaggccctgcctccaagaagggccaagcgatctggatctggagcaacaaacttctcactactcaaacaagcaggtgacgtggaggagaatcccgggcctactagtatggactggatttggcgcatccttttccttgtcggcgctgctaccggcgcgcattccttcgaacaagttcagcttcaacagcctggcgctgagctggtcaaacctggcgcttctgtgaagatgagctgcaaagccagcggctacgccttcagcagctactggatcaactggatgaagcagaaacccggccagggactcgaatggatcggccaaatctatcccggcgacggcgacaccaactacaacggcaagttcaagggcagagccacactgaccgccgatacctctagcagcacagcctacatgcagctgagcagcctgaccagcgaagatagcgccgtgtacttctgtgcccggtccatcacaacagtcgtgggctgcgctatggactattggggccagggaacaagcgtgaccgtgtctagtacgcgtatccagaaccctgatcctgccgtgtaccagctgcgggatagcaagagcagcgacaagagcgtgtgtctgttcaccgacttcgacagccagaccaacgtgtcccagagcaaggactccgacgtgtacatcaccgataagaccgtgctggacatgcggagcatggacttcaagagcaactccgccgtggcctggtccaacaagtccgatttcgcctgcgccaacgccttcaacaacagcattatccccgaggacacattcttcccaagccccgagagcagctgcggtacccagagttttgggttgttggaccctaaattgtgctatctgttggacggaatcctgttcatttacggagtgatcctgaccgcattgttcctgcgggttaagttttccagatccgcagacgcacccgcttaccaacaagggcagaaccaactctacaatgaacttaatttggggcggagggaagagtacgacgttctggacaaaaggaggggacgagatcccgagatgggcggaaagcctcagcgaaggaagaatccgcaagaggggctttataacgaactccagaaagataaaatggcagaagcctatagtgagattgggatgaagggagaaaggaggaggggtaaaggtcacgatgggttgtaccaaggattgagcacagccactaaagatacctatgatgcgctccacatgcaggccctgccgccaaggtctagaggaggaggcagtggcttccagtgcaatcagtgcggggcctcattcacccagaagggcaacctgctccggcacatcaagctgcatctcgagaccgatttctacgactacaaggacgacgatgacaagactagtggctccggcgagggcagaggaagtctactaacctgcggagatgtggaagaaaatcctggcccacatatgaccgagtacaagcccacggtgcgcctcgccacccgcgacgacgtccccagggccgtacgcaccctcgccgccgcgttcgccgactaccccgccacgcgccacaccgtcgatccggaccgccacatcgagcgggtcaccgagctgcaagaactcttcctcacgcgcgtcgggctcgacatcggcaaggtgtgggtcgcggacgacggcgccgcggtggcggtctggaccacgccggagagcgtcgaagcgggggcggtgttcgccgagatcggcccgcgcatggccgagttgagcggttcccggctggccgcgcagcaacagatggaaggcctcctggcgccgcaccggcccaaggagcccgcgtggttcctggccaccgtcggcgtctcgcccgaccaccagggcaagggtctgggcagcgccgtcgtgctccccggagtggaggcggccgagcgcgccggggtgcccgccttcctggagacctccgcgccccgcaacctccccttctacgagcggctcggcttcaccgtcaccgccgacgtcgaggtgcccgaaggaccgcgcacctggtgcatgacccgcaagcccggtgcctga

SEQ ID NO: 1043 - DNA, 2445 bp, synthetic construct
  source 1..2445: mol_type = other DNA
atggccttaccagtgaccgccttgctcctgccgctggccttgctgctccacgccgccaggccggacgtggtcatgacacagagcccttctagcctgtctgccagcgtgggcgacagagtgaccatcacctgtatggcctccgaggacatctacatccggctggcctggtatcagcagaagcctggaaacgcccctaagctgctgatctacgccgccacctctctggaaacaggcgtgccaagcagattttccggcagcggctctggcaccgatttcaccctgacaatatccagcctccagcctgaggacttcgccacctactactgccagcagtattggagcagcccctggacatttggcggaggcaccaaggtggaaatcaaactcgaggacctgaagaacgtgttcccacctgaggtggccgtgttcgagcctagcgaggccgagatcagccacacccagaaagccaccctcgtgtgcctggctaccggcttctaccccgaccatgtggaactgtcttggtgggtcaacggcaaagaggtgcacagcggcgtgtctaccgacccccagccactgaaagaacagcccgccctgaacgacagccggtactgcctgagcagcagactgagagtgtccgccaccttctggcagaacccccggaaccacttcagatgccaggtgcagttctacggcctgagcgagaacgacgagtggacccaggacagagccaagcccgtgacccagatcgtgtctgccgaagcctggggcagagccgattgcggatcccagagcttcggcctgctggaccccaagctgtgctacctgctggatggcatcctgttcatctacggcgtgatcctgaccgccctgttcctgagagtgaagttcagcagaagcgccgacgcccctgcctaccagcagggacagaaccaactgtacaacgagctgaacctgggcagacgggaagagtacgacgtgctggacaagcggagaggcagggaccctgagatgggcggaaagccccagcggagaaagaacccccaggaaggactgtataacgaactccagaaagacaagatggccgaagcctacagcgagatcggcatgaagggcgagcggagaagaggcaagggccacgatggcctgtaccagggcctgagcaccgccaccaaggacacctatgacgccctgcacatgcaggccctgcctccaagaagggccaagcgatctggatctggagcaacaaacttctcactactcaaacaagcaggtgacgtggaggagaatcccgggcctactagtatggactggatttggcgcatccttttccttgtcggcgctgctaccggcgcgcattccttcgaacaggttcagctgcaagagtctggccccggactggtcaagcctagccaaacactgagcctgacctgtaccgtgtccggctacagcatcaccagcgactacacctggaactggatcagacagcctcctggcaacggactggaatggatcggctacatcacctacagcggcagcaccagctacaaccccagcctgaaaagccgggtgctgatctccgtggacaccagcaagaatcaggtgtccctgaagctgagcagcgtgacagccgctgataccgccgtgtactactgtgccagactggggagaagatacacaatggactactggggccagggcaccaccgtgacagtttcttctacgcgtatccagaaccctgatcctgccgtgtaccagctgcgggatagcaagagcagcgacaagagcgtgtgtctgttcaccgacttcgacagccagaccaacgtgtcccagagcaaggactccgacgtgtacatcaccgataagaccgtgctggacatgcggagcatggacttcaagagcaactccgccgtggcctggtccaacaagtccgatttcgcctgcgccaacgccttcaacaacagcattatccccgaggacacattcttcccaagccccgagagcagctgcggtacccagagttttgggttgttggaccctaaattgtgctatctgttggacggaatcctgttcatttacggagtgatcctgaccgcattgttcctgcgggttaagttttccagatccgcagacgcacccgcttaccaacaagggcagaaccaactctacaatgaacttaatttggggcggagggaagagtacgacgttctggacaaaaggaggggacgagatcccgagatgggcggaaagcctcagcgaaggaagaatccgcaagaggggctttataacgaactccagaaagataaaatggcagaagcctatagtgagattgggatgaagggagaaaggaggaggggtaaaggtcacgatgggttgtaccaaggattgagcacagccactaaagatacctatgatgcgctccacatgcaggccctgccgccaagataa

SEQ ID NO: 1044 - DNA, 2466 bp, synthetic construct
  source 1..2466: mol_type = other DNA
atggccttaccagtgaccgccttgctcctgccgctggccttgctgctccacgccgccaggccggacttcgtgatgacacagagccctgatagcctggccgtgtctctcggcgagcgagtgaccatgagctgcaagtctagccagagcctgctgaacagcggcaaccagaagaactacctgacctggtatcagcagaagcccggccagcctcctaagctgctgatctactgggccagcaccagagaaagcggcgtgcccgatagattttctggctctggcagcggcaccgacttcaccctgacaatttctagcctgcaagccgaggacgtggccgtgtactactgccagaacgactacagctacccctacaccttcggccagggcaccaagctggaaatcaaactcgaggacctgaagaacgtgttcccacctgaggtggccgtgttcgagcctagcgaggccgagatcagccacacccagaaagccaccctcgtgtgcctggctaccggcttctaccccgaccatgtggaactgtcttggtgggtcaacggcaaagaggtgcacagcggcgtgtctaccgacccccagccactgaaagaacagcccgccctgaacgacagccggtactgcctgagcagcagactgagagtgtccgccaccttctggcagaacccccggaaccacttcagatgccaggtgcagttctacggcctgagcgagaacgacgagtggacccaggacagagccaagcccgtgacccagatcgtgtctgccgaagcctggggcagagccgattgcggatcccagagcttcggcctgctggaccccaagctgtgctacctgctggatggcatcctgttcatctacggcgtgatcctgaccgccctgttcctgagagtgaagttcagcagaagcgccgacgcccctgcctaccagcagggacagaaccaactgtacaacgagctgaacctgggcagacgggaagagtacgacgtgctggacaagcggagaggcagggaccctgagatgggcggaaagccccagcggagaaagaacccccaggaaggactgtataacgaactccagaaagacaagatggccgaagcctacagcgagatcggcatgaagggcgagcggagaagaggcaagggccacgatggcctgtaccagggcctgagcaccgccaccaaggacacctatgacgccctgcacatgcaggccctgcctccaagaagggccaagcgatctggatctggagcaacaaacttctcactactcaaacaagcaggtgacgtggaggagaatcccgggcctactagtatggactggatttggcgcatccttttccttgtcggcgctgctaccggcgcgcattccttcgaagtgcaactggttcagagcggagccgagctgaagaaacctggggccagcgtgaaggtgtcctgtaaagccagcggctacacctttaccgactactacatgaaatgggtccgacaggccccaggccagggactcgaatggatcggcgatattatccccagcaacggggccaccttctacaaccagaaattcaagggccgcgtgaccatcaccgtggacaagagcacaagcaccgcctacatggaactgagcagcctgagaagcgaggacaccgccgtgtattattgcgccagaagccatctgctgcgggccagttggttcgcctattggggacagggaaccctggtcaccgttagctctacgcgtatccagaaccctgatcctgccgtgtaccagctgcgggatagcaagagcagcgacaagagcgtgtgtctgttcaccgacttcgacagccagaccaacgtgtcccagagcaaggactccgacgtgtacatcaccgataagaccgtgctggacatgcggagcatggacttcaagagcaactccgccgtggcctggtccaacaagtccgatttcgcctgcgccaacgccttcaacaacagcattatccccgaggacacattcttcccaagccccgagagcagctgcggtacccagagttttgggttgttggaccctaaattgtgctatctgttggacggaatcctgttcatttacggagtgatcctgaccgcattgttcctgcgggttaagttttccagatccgcagacgcacccgcttaccaacaagggcagaaccaactctacaatgaacttaatttggggcggagggaagagtacgacgttctggacaaaaggaggggacgagatcccgagatgggcggaaagcctcagcgaaggaagaatccgcaagaggggctttataacgaactccagaaagataaaatggcagaagcctatagtgagattgggatgaagggagaaaggaggaggggtaaaggtcacgatgggttgtaccaaggattgagcacagccactaaagatacctatgatgcgctccacatgcaggccctgccgccaagataa

SEQ ID NO: 1045 - DNA, 2472 bp, synthetic construct
  source 1..2472: mol_type = other DNA
atggccttaccagtgaccgccttgctcctgccgctggccttgctgctccacgccgccaggccggacatcgtgatgacccagagccccgatagcctggccgtgtctctgggagagagagccaccatcaactgcgagagcagccagagcctgctgaacagcggcaaccagaagaactacctgacctggtatcagcagaagcccggccagccccccaagcccctgatctattgggccagcaccagagaaagcggcgtgcccgatagattcagcggcagcggaagcggcaccgacttcaccctgaccatcagttctcttcaggccgaggacgtggccgtgtactactgccagaacgactacagctacccctacaccttcggccagggcaccaagctggaaatcaagagactcgaggacctgaagaacgtgttcccacctgaggtggccgtgttcgagcctagcgaggccgagatcagccacacccagaaagccaccctcgtgtgcctggctaccggcttctaccccgaccatgtggaactgtcttggtgggtcaacggcaaagaggtgcacagcggcgtgtctaccgacccccagccactgaaagaacagcccgccctgaacgacagccggtactgcctgagcagcagactgagagtgtccgccaccttctggcagaacccccggaaccacttcagatgccaggtgcagttctacggcctgagcgagaacgacgagtggacccaggacagagccaagcccgtgacccagatcgtgtctgccgaagcctggggcagagccgattgcggatcccagagcttcggcctgctggaccccaagctgtgctacctgctggatggcatcctgttcatctacggcgtgatcctgaccgccctgttcctgagagtgaagttcagcagaagcgccgacgcccctgcctaccagcagggacagaaccaactgtacaacgagctgaacctgggcagacgggaagagtacgacgtgctggacaagcggagaggcagggaccctgagatgggcggaaagccccagcggagaaagaacccccaggaaggactgtataacgaactccagaaagacaagatggccgaagcctacagcgagatcggcatgaagggcgagcggagaagaggcaagggccacgatggcctgtaccagggcctgagcaccgccaccaaggacacctatgacgccctgcacatgcaggccctgcctccaagaagggccaagcgatctggatctggagcaacaaacttctcactactcaaacaagcaggtgacgtggaggagaatcccgggcctactagtatggactggatttggcgcatccttttccttgtcggcgctgctaccggcgcgcattccttcgaagaagtgcagctggtgcagtctggggccgaagtgaagaagcctggcgagagcctgaagatcagctgcaagggcagcggctacagcttcaccgactactacatgaagtgggccagacagatgcccggcaagggcctggaatggatgggcgacatcatccccagcaacggggccaccttctacaaccagaaattcaagggccaagtgaccatctccgccgacaagagcatcagcaccacctacctccagtggtccagcctgaaggccagcgacaccgccatgtactattgcgccagaagccatctgctgcgggccagttggttcgcctattggggccagggaacaatggtcacagtgtccagcacgcgtatccagaaccctgatcctgccgtgtaccagctgcgggatagcaagagcagcgacaagagcgtgtgtctgttcaccgacttcgacagccagaccaacgtgtcccagagcaaggactccgacgtgtacatcaccgataagaccgtgctggacatgcggagcatggacttcaagagcaactccgccgtggcctggtccaacaagtccgatttcgcctgcgccaacgccttcaacaacagcattatccccgaggacacattcttcccaagccccgagagcagctgcggtacccagagttttgggttgttggaccctaaattgtgctatctgttggacggaatcctgttcatttacggagtgatcctgaccgcattgttcctgcgggttaagttttccagatccgcagacgcacccgcttaccaacaagggcagaaccaactctacaatgaacttaatttggggcggagggaagagtacgacgttctggacaaaaggaggggacgagatcccgagatgggcggaaagcctcagcgaaggaagaatccgcaagaggggctttataacgaactccagaaagataaaatggcagaagcctatagtgagattgggatgaagggagaaaggaggaggggtaaaggtcacgatgggttgtaccaaggattgagcacagccactaaagatacctatgatgcgctccacatgcaggccctgccgccaagataa

SEQ ID NO: 1046 - DNA, 3309 bp, synthetic construct
  source 1..3309: mol_type = other DNA
atggccttaccagtgaccgccttgctcctgccgctggccttgctgctccacgccgccaggccggacatccagatgacacagagccctagcagcctgtctgccagcgtgggagacagagtgaccatcacatgcaaggccagcgaccacatcaacaactggctggcctggtatcagcagaagcctggacaggcccctaagctgctgatctacggcgctaccacactggaaacaggcgtgcccagcagattttctggcagcggctctggcaccgactacaccctgacaatatccagcctccagcctgaggacttcgccacctactactgtcagcagagctggaacaccccttggacattcggccagggcaccaagctggaaatcaagagactcgaggacctgaagaacgtgttcccacctgaggtggccgtgttcgagcctagcgaggccgagatcagccacacccagaaagccaccctcgtgtgcctggctaccggcttctaccccgaccatgtggaactgtcttggtgggtcaacggcaaagaggtgcacagcggcgtgtctaccgacccccagccactgaaagaacagcccgccctgaacgacagccggtactgcctgagcagcagactgagagtgtccgccaccttctggcagaacccccggaaccacttcagatgccaggtgcagttctacggcctgagcgagaacgacgagtggacccaggacagagccaagcccgtgacccagatcgtgtctgccgaagcctggggcagagccgattgcggatcccagagcttcggcctgctggaccccaagctgtgctacctgctggatggcatcctgttcatctacggcgtgatcctgaccgccctgttcctgcacctgtgctgtagaagaaggcgggccagactgcggtttatgaagcagttctacaagagagtgaagttcagcagaagcgccgacgcccctgcctaccagcagggacagaaccaactgtacaacgagctgaacctgggcagacgggaagagtacgacgtgctggacaagcggagaggcagggaccctgagatgggcggaaagccccagcggagaaagaacccccaggaaggactgtataacgaactccagaaagacaagatggccgaagcctacagcgagatcggcatgaagggcgagcggagaagaggcaagggccacgatggcctgtaccagggcctgagcaccgccaccaaggacacctatgacgccctgcacatgcaggccctgcctccaagaagggccaagcgatctggatctggagcaacaaacttctcactactcaaacaagcaggtgacgtggaggagaatcccgggcctactagtatggactggatttggcgcatccttttccttgtcggcgctgctaccggcgcgcattccttcgaacaagttcagcttcaacagcctggcgctgagctggtcaaacctggcgcttctgtgaagatgagctgcaaagccagcggctacgccttcagcagctactggatcaactggatgaagcagaaacccggccagggactcgaatggatcggccaaatctatcccggcgacggcgacaccaactacaacggcaagttcaagggcagagccacactgaccgccgatacctctagcagcacagcctacatgcagctgagcagcctgaccagcgaagatagcgccgtgtacttctgtgcccggtccatcacaacagtcgtgggctgcgctatggactattggggccagggaacaagcgtgaccgtgtctagtacgcgtatccagaaccctgatcctgccgtgtaccagctgcgggatagcaagagcagcgacaagagcgtgtgtctgttcaccgacttcgacagccagaccaacgtgtcccagagcaaggactccgacgtgtacatcaccgataagaccgtgctggacatgcggagcatggacttcaagagcaactccgccgtggcctggtccaacaagtccgatttcgcctgcgccaacgccttcaacaacagcattatccccgaggacacattcttcccaagccccgagagcagctgcggtacccagagttttgggttgttggaccctaaattgtgctatctgttggacggaatcctgttcatttacggagtgatcctgaccgcattgttcctgctgtactgcaaccaccggaacaggcggagagtgtgcaagtgccctagacctgtggtcaagagcggcgacaagcctagcctgagcgccagatatgttcgggttaagttttccagatccgcagacgcacccgcttaccaacaagggcagaaccaactctacaatgaacttaatttggggcggagggaagagtacgacgttctggacaaaaggaggggacgagatcccgagatgggcggaaagcctcagcgaaggaagaatccgcaagaggggctttataacgaactccagaaagataaaatggcagaagcctatagtgagattgggatgaagggagaaaggaggaggggtaaaggtcacgatgggttgtaccaaggattgagcacagccactaaagatacctatgatgcgctccacatgcaggccctgccgccaagacgcgccaagagaagcggatctggcgtgaagcagaccctgaatttcgacctgctgaagctggctggcgacgtggaatccaacccaggcccttctagaggccatatgaccgagtacaagcccacggtgcgcctcgccacccgcgacgacgtccccagggccgtacgcaccctcgccgccgcgttcgccgactaccccgccacgcgccacaccgtcgatccggaccgccacatcgagcgggtcaccgagctgcaagaactcttcctcacgcgcgtcgggctcgacatcggcaaggtgtgggtcgcggacgacggcgccgcggtggcggtctggaccacgccggagagcgtcgaagcgggggcggtgttcgccgagatcggcccgcgcatggccgagttgagcggttcccggctggccgcgcagcaacagatggaaggcctcctggcgccgcaccggcccaaggagcccgcgtggttcctggccaccgtcggcgtctcgcccgaccaccagggcaagggtctgggcagcgccgtcgtgctccccggagtggaggcggccgagcgcgccggggtgcccgccttcctggagacctccgcgccccgcaacctccccttctacgagcggctcggcttcaccgtcaccgccgacgtcgaggtgcccgaaggaccgcgcacctggtgcatgacccgcaagcccggtgcctga

SEQ ID NO: 1047 - DNA, 3372 bp, synthetic construct
  source 1..3372: mol_type = other DNA
atggccttaccagtgaccgccttgctcctgccgctggccttgctgctccacgccgccaggccggacatccagatgacacagagccctagcagcctgtctgccagcgtgggagacagagtgaccatcacatgcaaggccagcgaccacatcaacaactggctggcctggtatcagcagaagcctggacaggcccctaagctgctgatctacggcgctaccacactggaaacaggcgtgcccagcagattttctggcagcggctctggcaccgactacaccctgacaatatccagcctccagcctgaggacttcgccacctactactgtcagcagagctggaacaccccttggacattcggccagggcaccaagctggaaatcaagagactcgaggacctgaagaacgtgttcccacctgaggtggccgtgttcgagcctagcgaggccgagatcagccacacccagaaagccaccctcgtgtgcctggctaccggcttctaccccgaccatgtggaactgtcttggtgggtcaacggcaaagaggtgcacagcggcgtgtctaccgacccccagccactgaaagaacagcccgccctgaacgacagccggtactgcctgagcagcagactgagagtgtccgccaccttctggcagaacccccggaaccacttcagatgccaggtgcagttctacggcctgagcgagaacgacgagtggacccaggacagagccaagcccgtgacccagatcgtgtctgccgaagcctggggcagagccgattgcggatcccagagcttcggcctgctggaccccaagctgtgctacctgctggatggcatcctgttcatctacggcgtgatcctgaccgccctgttcctgtgcgtgcggtgcagacaccggcggagacaggccgagagaatgagccagatcaagagactgctgtccgagaagaaaacctgccagtgcccccacagattccagaaaacatgcagccccatcagagtgaagttcagcagaagcgccgacgcccctgcctaccagcagggacagaaccaactgtacaacgagctgaacctgggcagacgggaagagtacgacgtgctggacaagcggagaggcagggaccctgagatgggcggaaagccccagcggagaaagaacccccaggaaggactgtataacgaactccagaaagacaagatggccgaagcctacagcgagatcggcatgaagggcgagcggagaagaggcaagggccacgatggcctgtaccagggcctgagcaccgccaccaaggacacctatgacgccctgcacatgcaggccctgcctccaagaagggccaagcgatctggatctggagcaacaaacttctcactactcaaacaagcaggtgacgtggaggagaatcccgggcctactagtatggactggatttggcgcatccttttccttgtcggcgctgctaccggcgcgcattccttcgaacaagttcagcttcaacagcctggcgctgagctggtcaaacctggcgcttctgtgaagatgagctgcaaagccagcggctacgccttcagcagctactggatcaactggatgaagcagaaacccggccagggactcgaatggatcggccaaatctatcccggcgacggcgacaccaactacaacggcaagttcaagggcagagccacactgaccgccgatacctctagcagcacagcctacatgcagctgagcagcctgaccagcgaagatagcgccgtgtacttctgtgcccggtccatcacaacagtcgtgggctgcgctatggactattggggccagggaacaagcgtgaccgtgtctagtacgcgtatccagaaccctgatcctgccgtgtaccagctgcgggatagcaagagcagcgacaagagcgtgtgtctgttcaccgacttcgacagccagaccaacgtgtcccagagcaaggactccgacgtgtacatcaccgataagaccgtgctggacatgcggagcatggacttcaagagcaactccgccgtggcctggtccaacaagtccgatttcgcctgcgccaacgccttcaacaacagcattatccccgaggacacattcttcccaagccccgagagcagctgcggtacccagagttttgggttgttggaccctaaattgtgctatctgttggacggaatcctgttcatttacggagtgatcctgaccgcattgttcctgctgtactgcaaccaccggaacaggcggagagtgtgcaagtgccctagacctgtggtcaagagcggcgacaagcctagcctgagcgccagatatgttcgggttaagttttccagatccgcagacgcacccgcttaccaacaagggcagaaccaactctacaatgaacttaatttggggcggagggaagagtacgacgttctggacaaaaggaggggacgagatcccgagatgggcggaaagcctcagcgaaggaagaatccgcaagaggggctttataacgaactccagaaagataaaatggcagaagcctatagtgagattgggatgaagggagaaaggaggaggggtaaaggtcacgatgggttgtaccaaggattgagcacagccactaaagatacctatgatgcgctccacatgcaggccctgccgccaagacgcgccaagagaagcggatctggcgtgaagcagaccctgaatttcgacctgctgaagctggctggcgacgtggaatccaacccaggcccttctagaggccatatgaccgagtacaagcccacggtgcgcctcgccacccgcgacgacgtccccagggccgtacgcaccctcgccgccgcgttcgccgactaccccgccacgcgccacaccgtcgatccggaccgccacatcgagcgggtcaccgagctgcaagaactcttcctcacgcgcgtcgggctcgacatcggcaaggtgtgggtcgcggacgacggcgccgcggtggcggtctggaccacgccggagagcgtcgaagcgggggcggtgttcgccgagatcggcccgcgcatggccgagttgagcggttcccggctggccgcgcagcaacagatggaaggcctcctggcgccgcaccggcccaaggagcccgcgtggttcctggccaccgtcggcgtctcgcccgaccaccagggcaagggtctgggcagcgccgtcgtgctccccggagtggaggcggccgagcgcgccggggtgcccgccttcctggagacctccgcgccccgcaacctccccttctacgagcggctcggcttcaccgtcaccgccgacgtcgaggtgcccgaaggaccgcgcacctggtgcatgacccgcaagcccggtgcctga

SEQ ID NO: 1048 - DNA, 2337 bp, synthetic construct
  source 1..2337: mol_type = other DNA
atggccttaccagtgaccgccttgctcctgccgctggccttgctgctccacgccgccaggccggacatccagatgacacagagccctagcagcctgtctgccagcgtgggagacagagtgaccatcacatgcaaggccagcgaccacatcaacaactggctggcctggtatcagcagaagcctggacaggcccctaagctgctgatctacggcgctaccacactggaaacaggcgtgcccagcagattttctggcagcggctctggcaccgactacaccctgacaatatccagcctccagcctgaggacttcgccacctactactgtcagcagagctggaacaccccttggacattcggccagggcaccaagctggaaatcaagagactcgaggacctgaagaacgtgttcccacctgaggtggccgtgttcgagcctagcgaggccgagatcagccacacccagaaagccaccctcgtgtgcctggctaccggcttctaccccgaccatgtggaactgtcttggtgggtcaacggcaaagaggtgcacagcggcgtgtctaccgacccccagccactgaaagaacagcccgccctgaacgacagccggtactgcctgagcagcagactgagagtgtccgccaccttctggcagaacccccggaaccacttcagatgccaggtgcagttctacggcctgagcgagaacgacgagtggacccaggacagagccaagcccgtgacccagatcgtgtctgccgaagcctggggcagagccgattgcggatcccagagcttcggcctgctggaccccaagctgtgctacctgctggatggcatcctgttcatctacggcgtgatcctgaccgccctgttcctgcacctgtgctgtagaagaaggcgggccagactgcggtttatgaagcagttctacaagagagtgaagttcagcagaagcgccgacgcccctgcctaccagcagggacagaaccaactgtacaacgagctgaacctgggcagacgggaagagtacgacgtgctggacaagcggagaggcagggaccctgagatgggcggaaagccccagcggagaaagaacccccaggaaggactgtataacgaactccagaaagacaagatggccgaagcctacagcgagatcggcatgaagggcgagcggagaagaggcaagggccacgatggcctgtaccagggcctgagcaccgccaccaaggacacctatgacgccctgcacatgcaggccctgcctccaagaagggccaagcgatctggatctggagcaacaaacttctcactactcaaacaagcaggtgacgtggaggagaatcccgggcctactagtatggactggatttggcgcatccttttccttgtcggcgctgctaccggcgcgcattccttcgaacaagttcagcttcaacagcctggcgctgagctggtcaaacctggcgcttctgtgaagatgagctgcaaagccagcggctacgccttcagcagctactggatcaactggatgaagcagaaacccggccagggactcgaatggatcggccaaatctatcccggcgacggcgacaccaactacaacggcaagttcaagggcagagccacactgaccgccgatacctctagcagcacagcctacatgcagctgagcagcctgaccagcgaagatagcgccgtgtacttctgtgcccggtccatcacaacagtcgtgggctgcgctatggactattggggccagggaacaagcgtgaccgtgtctagtacgcgtatccagaaccctgatcctgccgtgtaccagctgcgggatagcaagagcagcgacaagagcgtgtgtctgttcaccgacttcgacagccagaccaacgtgtcccagagcaaggactccgacgtgtacatcaccgataagaccgtgctggacatgcggagcatggacttcaagagcaactccgccgtggcctggtccaacaagtccgatttcgcctgcgccaacgccttcaacaacagcattatccccgaggacacattcttcccaagccccgagagcagctgcggtacctctggacaggtgctgctggaaagcaacatcaaggtgctgcccacctggtccacccccgtgcagcctatggctctgattgtgctgggcggagtggccggactgctgctgtttattggcctgggcatcttcttttgcgtgcggtgcagacaccggcggagacaggccgagagaatgagccagatcaagagactgctgtccgagaagaaaacctgccagtgcccccacagattccagaaaacatgcagccccatctaa

SEQ ID NO: 1049 - DNA, 2400 bp, synthetic construct
  source 1..2400: mol_type = other DNA
atggccttaccagtgaccgccttgctcctgccgctggccttgctgctccacgccgccaggccggacatccagatgacacagagccctagcagcctgtctgccagcgtgggagacagagtgaccatcacatgcaaggccagcgaccacatcaacaactggctggcctggtatcagcagaagcctggacaggcccctaagctgctgatctacggcgctaccacactggaaacaggcgtgcccagcagattttctggcagcggctctggcaccgactacaccctgacaatatccagcctccagcctgaggacttcgccacctactactgtcagcagagctggaacaccccttggacattcggccagggcaccaagctggaaatcaagagactcgaggacctgaagaacgtgttcccacctgaggtggccgtgttcgagcctagcgaggccgagatcagccacacccagaaagccaccctcgtgtgcctggctaccggcttctaccccgaccatgtggaactgtcttggtgggtcaacggcaaagaggtgcacagcggcgtgtctaccgacccccagccactgaaagaacagcccgccctgaacgacagccggtactgcctgagcagcagactgagagtgtccgccaccttctggcagaacccccggaaccacttcagatgccaggtgcagttctacggcctgagcgagaacgacgagtggacccaggacagagccaagcccgtgacccagatcgtgtctgccgaagcctggggcagagccgattgcggatcccagagcttcggcctgctggaccccaagctgtgctacctgctggatggcatcctgttcatctacggcgtgatcctgaccgccctgttcctgtgcgtgcggtgcagacaccggcggagacaggccgagagaatgagccagatcaagagactgctgtccgagaagaaaacctgccagtgcccccacagattccagaaaacatgcagccccatcagagtgaagttcagcagaagcgccgacgcccctgcctaccagcagggacagaaccaactgtacaacgagctgaacctgggcagacgggaagagtacgacgtgctggacaagcggagaggcagggaccctgagatgggcggaaagccccagcggagaaagaacccccaggaaggactgtataacgaactccagaaagacaagatggccgaagcctacagcgagatcggcatgaagggcgagcggagaagaggcaagggccacgatggcctgtaccagggcctgagcaccgccaccaaggacacctatgacgccctgcacatgcaggccctgcctccaagaagggccaagcgatctggatctggagcaacaaacttctcactactcaaacaagcaggtgacgtggaggagaatcccgggcctactagtatggactggatttggcgcatccttttccttgtcggcgctgctaccggcgcgcattccttcgaacaagttcagcttcaacagcctggcgctgagctggtcaaacctggcgcttctgtgaagatgagctgcaaagccagcggctacgccttcagcagctactggatcaactggatgaagcagaaacccggccagggactcgaatggatcggccaaatctatcccggcgacggcgacaccaactacaacggcaagttcaagggcagagccacactgaccgccgatacctctagcagcacagcctacatgcagctgagcagcctgaccagcgaagatagcgccgtgtacttctgtgcccggtccatcacaacagtcgtgggctgcgctatggactattggggccagggaacaagcgtgaccgtgtctagtacgcgtatccagaaccctgatcctgccgtgtaccagctgcgggatagcaagagcagcgacaagagcgtgtgtctgttcaccgacttcgacagccagaccaacgtgtcccagagcaaggactccgacgtgtacatcaccgataagaccgtgctggacatgcggagcatggacttcaagagcaactccgccgtggcctggtccaacaagtccgatttcgcctgcgccaacgccttcaacaacagcattatccccgaggacacattcttcccaagccccgagagcagctgcggtacctctggacaggtgctgctggaaagcaacatcaaggtgctgcccacctggtccacccccgtgcagcctatggctctgattgtgctgggcggagtggccggactgctgctgtttattggcctgggcatcttcttttgcgtgcggtgcagacaccggcggagacaggccgagagaatgagccagatcaagagactgctgtccgagaagaaaacctgccagtgcccccacagattccagaaaacatgcagccccatctaa

SEQ ID NO: 1050 - DNA, 3333 bp, synthetic construct
  source 1..3333: mol_type = other DNA
atggccttaccagtgaccgccttgctcctgccgctggccttgctgctccacgccgccaggccggacatccagatgacacagagccctagcagcctgtctgccagcgtgggagacagagtgaccatcacatgcaaggccagcgaccacatcaacaactggctggcctggtatcagcagaagcctggacaggcccctaagctgctgatctacggcgctaccacactggaaacaggcgtgcccagcagattttctggcagcggctctggcaccgactacaccctgacaatatccagcctccagcctgaggacttcgccacctactactgtcagcagagctggaacaccccttggacattcggccagggcaccaagctggaaatcaagagactcgaggacctgaagaacgtgttcccacctgaggtggccgtgttcgagcctagcgaggccgagatcagccacacccagaaagccaccctcgtgtgcctggctaccggcttctaccccgaccatgtggaactgtcttggtgggtcaacggcaaagaggtgcacagcggcgtgtctaccgacccccagccactgaaagaacagcccgccctgaacgacagccggtactgcctgagcagcagactgagagtgtccgccaccttctggcagaacccccggaaccacttcagatgccaggtgcagttctacggcctgagcgagaacgacgagtggacccaggacagagccaagcccgtgacccagatcgtgtctgccgaagcctggggcagagccgattgcggatcccagagcttcggcctgctggaccccaagctgtgctacctgctggatggcatcctgttcatctacggcgtgatcctgaccgccctgttcctgcacctgtgctgtagaagaaggcgggccagactgcggtttatgaagcagttctacaagagagtgaagttcagcagaagcgccgacgcccctgcctaccagcagggacagaaccaactgtacaacgagctgaacctgggcagacgggaagagtacgacgtgctggacaagcggagaggcagggaccctgagatgggcggaaagccccagcggagaaagaacccccaggaaggactgtataacgaactccagaaagacaagatggccgaagcctacagcgagatcggcatgaagggcgagcggagaagaggcaagggccacgatggcctgtaccagggcctgagcaccgccaccaaggacacctatgacgccctgcacatgcaggccctgcctccaagaagggccaagcgatctggatctggagcaacaaacttctcactactcaaacaagcaggtgacgtggaggagaatcccgggcctactagtatggactggatttggcgcatccttttccttgtcggcgctgctaccggcgcgcattccttcgaacaagttcagcttcaacagcctggcgctgagctggtcaaacctggcgcttctgtgaagatgagctgcaaagccagcggctacgccttcagcagctactggatcaactggatgaagcagaaacccggccagggactcgaatggatcggccaaatctatcccggcgacggcgacaccaactacaacggcaagttcaagggcagagccacactgaccgccgatacctctagcagcacagcctacatgcagctgagcagcctgaccagcgaagatagcgccgtgtacttctgtgcccggtccatcacaacagtcgtgggctgcgctatggactattggggccagggaacaagcgtgaccgtgtctagtacgcgtatccagaaccctgatcctgccgtgtaccagctgcgggatagcaagagcagcgacaagagcgtgtgtctgttcaccgacttcgacagccagaccaacgtgtcccagagcaaggactccgacgtgtacatcaccgataagaccgtgctggacatgcggagcatggacttcaagagcaactccgccgtggcctggtccaacaagtccgatttcgcctgcgccaacgccttcaacaacagcattatccccgaggacacattcttcccaagccccgagagcagctgcggtacccagagttttgggttgttggaccctaaattgtgctatctgttggacggaatcctgttcatttacggagtgatcctgaccgcattgttcctgtgtgtgaggtgccgccatcgacggaggcaggcagaaagaatgtcccagataaagcggttgcttagtgaaaagaaaacctgccagtgtcctcaccgattccagaagacgtgctcccccattcgggttaagttttccagatccgcagacgcacccgcttaccaacaagggcagaaccaactctacaatgaacttaatttggggcggagggaagagtacgacgttctggacaaaaggaggggacgagatcccgagatgggcggaaagcctcagcgaaggaagaatccgcaagaggggctttataacgaactccagaaagataaaatggcagaagcctatagtgagattgggatgaagggagaaaggaggaggggtaaaggtcacgatgggttgtaccaaggattgagcacagccactaaagatacctatgatgcgctccacatgcaggccctgccgccaagacgcgccaagagaagcggatctggcgtgaagcagaccctgaatttcgacctgctgaagctggctggcgacgtggaatccaacccaggcccttctagaggccatatgaccgagtacaagcccacggtgcgcctcgccacccgcgacgacgtccccagggccgtacgcaccctcgccgccgcgttcgccgactaccccgccacgcgccacaccgtcgatccggaccgccacatcgagcgggtcaccgagctgcaagaactcttcctcacgcgcgtcgggctcgacatcggcaaggtgtgggtcgcggacgacggcgccgcggtggcggtctggaccacgccggagagcgtcgaagcgggggcggtgttcgccgagatcggcccgcgcatggccgagttgagcggttcccggctggccgcgcagcaacagatggaaggcctcctggcgccgcaccggcccaaggagcccgcgtggttcctggccaccgtcggcgtctcgcccgaccaccagggcaagggtctgggcagcgccgtcgtgctccccggagtggaggcggccgagcgcgccggggtgcccgccttcctggagacctccgcgccccgcaacctccccttctacgagcggctcggcttcaccgtcaccgccgacgtcgaggtgcccgaaggaccgcgcacctggtgcatgacccgcaagcccggtgcctga

SEQ ID NO: 1051 - DNA, 3396 bp, synthetic construct
  source 1..3396: mol_type = other DNA
atggccttaccagtgaccgccttgctcctgccgctggccttgctgctccacgccgccaggccggacatccagatgacacagagccctagcagcctgtctgccagcgtgggagacagagtgaccatcacatgcaaggccagcgaccacatcaacaactggctggcctggtatcagcagaagcctggacaggcccctaagctgctgatctacggcgctaccacactggaaacaggcgtgcccagcagattttctggcagcggctctggcaccgactacaccctgacaatatccagcctccagcctgaggacttcgccacctactactgtcagcagagctggaacaccccttggacattcggccagggcaccaagctggaaatcaagagactcgaggacctgaagaacgtgttcccacctgaggtggccgtgttcgagcctagcgaggccgagatcagccacacccagaaagccaccctcgtgtgcctggctaccggcttctaccccgaccatgtggaactgtcttggtgggtcaacggcaaagaggtgcacagcggcgtgtctaccgacccccagccactgaaagaacagcccgccctgaacgacagccggtactgcctgagcagcagactgagagtgtccgccaccttctggcagaacccccggaaccacttcagatgccaggtgcagttctacggcctgagcgagaacgacgagtggacccaggacagagccaagcccgtgacccagatcgtgtctgccgaagcctggggcagagccgattgcggatcccagagcttcggcctgctggaccccaagctgtgctacctgctggatggcatcctgttcatctacggcgtgatcctgaccgccctgttcctgtgcgtgcggtgcagacaccggcggagacaggccgagagaatgagccagatcaagagactgctgtccgagaagaaaacctgccagtgcccccacagattccagaaaacatgcagccccatcagagtgaagttcagcagaagcgccgacgcccctgcctaccagcagggacagaaccaactgtacaacgagctgaacctgggcagacgggaagagtacgacgtgctggacaagcggagaggcagggaccctgagatgggcggaaagccccagcggagaaagaacccccaggaaggactgtataacgaactccagaaagacaagatggccgaagcctacagcgagatcggcatgaagggcgagcggagaagaggcaagggccacgatggcctgtaccagggcctgagcaccgccaccaaggacacctatgacgccctgcacatgcaggccctgcctccaagaagggccaagcgatctggatctggagcaacaaacttctcactactcaaacaagcaggtgacgtggaggagaatcccgggcctactagtatggactggatttggcgcatccttttccttgtcggcgctgctaccggcgcgcattccttcgaacaagttcagcttcaacagcctggcgctgagctggtcaaacctggcgcttctgtgaagatgagctgcaaagccagcggctacgccttcagcagctactggatcaactggatgaagcagaaacccggccagggactcgaatggatcggccaaatctatcccggcgacggcgacaccaactacaacggcaagttcaagggcagagccacactgaccgccgatacctctagcagcacagcctacatgcagctgagcagcctgaccagcgaagatagcgccgtgtacttctgtgcccggtccatcacaacagtcgtgggctgcgctatggactattggggccagggaacaagcgtgaccgtgtctagtacgcgtatccagaaccctgatcctgccgtgtaccagctgcgggatagcaagagcagcgacaagagcgtgtgtctgttcaccgacttcgacagccagaccaacgtgtcccagagcaaggactccgacgtgtacatcaccgataagaccgtgctggacatgcggagcatggacttcaagagcaactccgccgtggcctggtccaacaagtccgatttcgcctgcgccaacgccttcaacaacagcattatccccgaggacacattcttcccaagccccgagagcagctgcggtacccagagttttgggttgttggaccctaaattgtgctatctgttggacggaatcctgttcatttacggagtgatcctgaccgcattgttcctgtgtgtgaggtgccgccatcgacggaggcaggcagaaagaatgtcccagataaagcggttgcttagtgaaaagaaaacctgccagtgtcctcaccgattccagaagacgtgctcccccattcgggttaagttttccagatccgcagacgcacccgcttaccaacaagggcagaaccaactctacaatgaacttaatttggggcggagggaagagtacgacgttctggacaaaaggaggggacgagatcccgagatgggcggaaagcctcagcgaaggaagaatccgcaagaggggctttataacgaactccagaaagataaaatggcagaagcctatagtgagattgggatgaagggagaaaggaggaggggtaaaggtcacgatgggttgtaccaaggattgagcacagccactaaagatacctatgatgcgctccacatgcaggccctgccgccaagacgcgccaagagaagcggatctggcgtgaagcagaccctgaatttcgacctgctgaagctggctggcgacgtggaatccaacccaggcccttctagaggccatatgaccgagtacaagcccacggtgcgcctcgccacccgcgacgacgtccccagggccgtacgcaccctcgccgccgcgttcgccgactaccccgccacgcgccacaccgtcgatccggaccgccacatcgagcgggtcaccgagctgcaagaactcttcctcacgcgcgtcgggctcgacatcggcaaggtgtgggtcgcggacgacggcgccgcggtggcggtctggaccacgccggagagcgtcgaagcgggggcggtgttcgccgagatcggcccgcgcatggccgagttgagcggttcccggctggccgcgcagcaacagatggaaggcctcctggcgccgcaccggcccaaggagcccgcgtggttcctggccaccgtcggcgtctcgcccgaccaccagggcaagggtctgggcagcgccgtcgtgctccccggagtggaggcggccgagcgcgccggggtgcccgccttcctggagacctccgcgccccgcaacctccccttctacgagcggctcggcttcaccgtcaccgccgacgtcgaggtgcccgaaggaccgcgcacctggtgcatgacccgcaagcccggtgcctga

SEQ ID NO: 1052 - DNA, 2634 bp, synthetic construct
  source 1..2634: mol_type = other DNA
atggccttaccagtgaccgccttgctcctgccgctggccttgctgctccacgccgccaggccggacatccagatgacacagagccctagcagcctgtctgccagcgtgggagacagagtgaccatcacatgcaaggccagcgaccacatcaacaactggctggcctggtatcagcagaagcctggacaggcccctaagctgctgatctacggcgctaccacactggaaacaggcgtgcccagcagattttctggcagcggctctggcaccgactacaccctgacaatatccagcctccagcctgaggacttcgccacctactactgtcagcagagctggaacaccccttggacattcggccagggcaccaagctggaaatcaagagactcgaggacctgaagaacgtgttcccacctgaggtggccgtgttcgagcctagcgaggccgagatcagccacacccagaaagccaccctcgtgtgcctggctaccggcttctaccccgaccatgtggaactgtcttggtgggtcaacggcaaagaggtgcacagcggcgtgtctaccgacccccagccactgaaagaacagcccgccctgaacgacagccggtactgcctgagcagcagactgagagtgtccgccaccttctggcagaacccccggaaccacttcagatgccaggtgcagttctacggcctgagcgagaacgacgagtggacccaggacagagccaagcccgtgacccagatcgtgtctgccgaagcctggggcagagccgattgcggatcccagagcttcggcctgctggaccccaagctgtgctacctgctggatggcatcctgttcatctacggcgtgatcctgaccgccctgttcctgcacctgtgctgtagaagaaggcgggccagactgcggtttatgaagcagttctacaagagagtgaagttcagcagaagcgccgacgcccctgcctaccagcagggacagaaccaactgtacaacgagctgaacctgggcagacgggaagagtacgacgtgctggacaagcggagaggcagggaccctgagatgggcggaaagccccagcggagaaagaacccccaggaaggactgtataacgaactccagaaagacaagatggccgaagcctacagcgagatcggcatgaagggcgagcggagaagaggcaagggccacgatggcctgtaccagggcctgagcaccgccaccaaggacacctatgacgccctgcacatgcaggccctgcctccaagaagggccaagcgatctggatctggagcaacaaacttctcactactcaaacaagcaggtgacgtggaggagaatcccgggcctactagtatggactggatttggcgcatccttttccttgtcggcgctgctaccggcgcgcattccttcgaacaagttcagcttcaacagcctggcgctgagctggtcaaacctggcgcttctgtgaagatgagctgcaaagccagcggctacgccttcagcagctactggatcaactggatgaagcagaaacccggccagggactcgaatggatcggccaaatctatcccggcgacggcgacaccaactacaacggcaagttcaagggcagagccacactgaccgccgatacctctagcagcacagcctacatgcagctgagcagcctgaccagcgaagatagcgccgtgtacttctgtgcccggtccatcacaacagtcgtgggctgcgctatggactattggggccagggaacaagcgtgaccgtgtctagtacgcgtatccagaaccctgatcctgccgtgtaccagctgcgggatagcaagagcagcgacaagagcgtgtgtctgttcaccgacttcgacagccagaccaacgtgtcccagagcaaggactccgacgtgtacatcaccgataagaccgtgctggacatgcggagcatggacttcaagagcaactccgccgtggcctggtccaacaagtccgatttcgcctgcgccaacgccttcaacaacagcattatccccgaggacacattcttcccaagccccgagagcagctgcggtacccagagttttgggttgttggaccctaaattgtgctatctgttggacggaatcctgttcatttacggagtgatcctgaccgcattgttcctgtgtgtgaggtgccgccatcgacggaggcaggcagaaagaatgtcccagataaagcggttgcttagtgaaaagaaaacctgccagtgtcctcaccgattccagaagacgtgctcccccattcgggttaagttttccagatccgcagacgcacccgcttaccaacaagggcagaaccaactctacaatgaacttaatttggggcggagggaagagtacgacgttctggacaaaaggaggggacgagatcccgagatgggcggaaagcctcagcgaaggaagaatccgcaagaggggctttataacgaactccagaaagataaaatggcagaagcctatagtgagattgggatgaagggagaaaggaggaggggtaaaggtcacgatgggttgtaccaaggattgagcacagccactaaagatacctatgatgcgctccacatgcaggccctgccgccaagataa

SEQ ID NO: 1053 - DNA, 2697 bp, synthetic construct
  source 1..2697: mol_type = other DNA
atggccttaccagtgaccgccttgctcctgccgctggccttgctgctccacgccgccaggccggacatccagatgacacagagccctagcagcctgtctgccagcgtgggagacagagtgaccatcacatgcaaggccagcgaccacatcaacaactggctggcctggtatcagcagaagcctggacaggcccctaagctgctgatctacggcgctaccacactggaaacaggcgtgcccagcagattttctggcagcggctctggcaccgactacaccctgacaatatccagcctccagcctgaggacttcgccacctactactgtcagcagagctggaacaccccttggacattcggccagggcaccaagctggaaatcaagagactcgaggacctgaagaacgtgttcccacctgaggtggccgtgttcgagcctagcgaggccgagatcagccacacccagaaagccaccctcgtgtgcctggctaccggcttctaccccgaccatgtggaactgtcttggtgggtcaacggcaaagaggtgcacagcggcgtgtctaccgacccccagccactgaaagaacagcccgccctgaacgacagccggtactgcctgagcagcagactgagagtgtccgccaccttctggcagaacccccggaaccacttcagatgccaggtgcagttctacggcctgagcgagaacgacgagtggacccaggacagagccaagcccgtgacccagatcgtgtctgccgaagcctggggcagagccgattgcggatcccagagcttcggcctgctggaccccaagctgtgctacctgctggatggcatcctgttcatctacggcgtgatcctgaccgccctgttcctgtgcgtgcggtgcagacaccggcggagacaggccgagagaatgagccagatcaagagactgctgtccgagaagaaaacctgccagtgcccccacagattccagaaaacatgcagccccatcagagtgaagttcagcagaagcgccgacgcccctgcctaccagcagggacagaaccaactgtacaacgagctgaacctgggcagacgggaagagtacgacgtgctggacaagcggagaggcagggaccctgagatgggcggaaagccccagcggagaaagaacccccaggaaggactgtataacgaactccagaaagacaagatggccgaagcctacagcgagatcggcatgaagggcgagcggagaagaggcaagggccacgatggcctgtaccagggcctgagcaccgccaccaaggacacctatgacgccctgcacatgcaggccctgcctccaagaagggccaagcgatctggatctggagcaacaaacttctcactactcaaacaagcaggtgacgtggaggagaatcccgggcctactagtatggactggatttggcgcatccttttccttgtcggcgctgctaccggcgcgcattccttcgaacaagttcagcttcaacagcctggcgctgagctggtcaaacctggcgcttctgtgaagatgagctgcaaagccagcggctacgccttcagcagctactggatcaactggatgaagcagaaacccggccagggactcgaatggatcggccaaatctatcccggcgacggcgacaccaactacaacggcaagttcaagggcagagccacactgaccgccgatacctctagcagcacagcctacatgcagctgagcagcctgaccagcgaagatagcgccgtgtacttctgtgcccggtccatcacaacagtcgtgggctgcgctatggactattggggccagggaacaagcgtgaccgtgtctagtacgcgtatccagaaccctgatcctgccgtgtaccagctgcgggatagcaagagcagcgacaagagcgtgtgtctgttcaccgacttcgacagccagaccaacgtgtcccagagcaaggactccgacgtgtacatcaccgataagaccgtgctggacatgcggagcatggacttcaagagcaactccgccgtggcctggtccaacaagtccgatttcgcctgcgccaacgccttcaacaacagcattatccccgaggacacattcttcccaagccccgagagcagctgcggtacccagagttttgggttgttggaccctaaattgtgctatctgttggacggaatcctgttcatttacggagtgatcctgaccgcattgttcctgtgtgtgaggtgccgccatcgacggaggcaggcagaaagaatgtcccagataaagcggttgcttagtgaaaagaaaacctgccagtgtcctcaccgattccagaagacgtgctcccccattcgggttaagttttccagatccgcagacgcacccgcttaccaacaagggcagaaccaactctacaatgaacttaatttggggcggagggaagagtacgacgttctggacaaaaggaggggacgagatcccgagatgggcggaaagcctcagcgaaggaagaatccgcaagaggggctttataacgaactccagaaagataaaatggcagaagcctatagtgagattgggatgaagggagaaaggaggaggggtaaaggtcacgatgggttgtaccaaggattgagcacagccactaaagatacctatgatgcgctccacatgcaggccctgccgccaagataa

SEQ ID NO: 1054 - DNA, 2610 bp, synthetic construct
  source 1..2610: mol_type = other DNA
atggccttaccagtgaccgccttgctcctgccgctggccttgctgctccacgccgccaggccggacatccagatgacacagagccctagcagcctgtctgccagcgtgggagacagagtgaccatcacatgcaaggccagcgaccacatcaacaactggctggcctggtatcagcagaagcctggacaggcccctaagctgctgatctacggcgctaccacactggaaacaggcgtgcccagcagattttctggcagcggctctggcaccgactacaccctgacaatatccagcctccagcctgaggacttcgccacctactactgtcagcagagctggaacaccccttggacattcggccagggcaccaagctggaaatcaagagactcgaggacctgaagaacgtgttcccacctgaggtggccgtgttcgagcctagcgaggccgagatcagccacacccagaaagccaccctcgtgtgcctggctaccggcttctaccccgaccatgtggaactgtcttggtgggtcaacggcaaagaggtgcacagcggcgtgtctaccgacccccagccactgaaagaacagcccgccctgaacgacagccggtactgcctgagcagcagactgagagtgtccgccaccttctggcagaacccccggaaccacttcagatgccaggtgcagttctacggcctgagcgagaacgacgagtggacccaggacagagccaagcccgtgacccagatcgtgtctgccgaagcctggggcagagccgattgcggatcccagagcttcggcctgctggaccccaagctgtgctacctgctggatggcatcctgttcatctacggcgtgatcctgaccgccctgttcctgcacctgtgctgtagaagaaggcgggccagactgcggtttatgaagcagttctacaagagagtgaagttcagcagaagcgccgacgcccctgcctaccagcagggacagaaccaactgtacaacgagctgaacctgggcagacgggaagagtacgacgtgctggacaagcggagaggcagggaccctgagatgggcggaaagccccagcggagaaagaacccccaggaaggactgtataacgaactccagaaagacaagatggccgaagcctacagcgagatcggcatgaagggcgagcggagaagaggcaagggccacgatggcctgtaccagggcctgagcaccgccaccaaggacacctatgacgccctgcacatgcaggccctgcctccaagaagggccaagcgatctggatctggagcaacaaacttctcactactcaaacaagcaggtgacgtggaggagaatcccgggcctactagtatggactggatttggcgcatccttttccttgtcggcgctgctaccggcgcgcattccttcgaacaagttcagcttcaacagcctggcgctgagctggtcaaacctggcgcttctgtgaagatgagctgcaaagccagcggctacgccttcagcagctactggatcaactggatgaagcagaaacccggccagggactcgaatggatcggccaaatctatcccggcgacggcgacaccaactacaacggcaagttcaagggcagagccacactgaccgccgatacctctagcagcacagcctacatgcagctgagcagcctgaccagcgaagatagcgccgtgtacttctgtgcccggtccatcacaacagtcgtgggctgcgctatggactattggggccagggaacaagcgtgaccgtgtctagtacgcgtatccagaaccctgatcctgccgtgtaccagctgcgggatagcaagagcagcgacaagagcgtgtgtctgttcaccgacttcgacagccagaccaacgtgtcccagagcaaggactccgacgtgtacatcaccgataagaccgtgctggacatgcggagcatggacttcaagagcaactccgccgtggcctggtccaacaagtccgatttcgcctgcgccaacgccttcaacaacagcattatccccgaggacacattcttcccaagccccgagagcagctgcggtacccagagttttgggttgttggaccctaaattgtgctatctgttggacggaatcctgttcatttacggagtgatcctgaccgcattgttcctgctgtactgcaaccaccggaacaggcggagagtgtgcaagtgccctagacctgtggtcaagagcggcgacaagcctagcctgagcgccagatatgttcgggttaagttttccagatccgcagacgcacccgcttaccaacaagggcagaaccaactctacaatgaacttaatttggggcggagggaagagtacgacgttctggacaaaaggaggggacgagatcccgagatgggcggaaagcctcagcgaaggaagaatccgcaagaggggctttataacgaactccagaaagataaaatggcagaagcctatagtgagattgggatgaagggagaaaggaggaggggtaaaggtcacgatgggttgtaccaaggattgagcacagccactaaagatacctatgatgcgctccacatgcaggccctgccgccaagataa

SEQ ID NO: 1055 - DNA, 2673 bp, synthetic construct
  source 1..2673: mol_type = other DNA
atggccttaccagtgaccgccttgctcctgccgctggccttgctgctccacgccgccaggccggacatccagatgacacagagccctagcagcctgtctgccagcgtgggagacagagtgaccatcacatgcaaggccagcgaccacatcaacaactggctggcctggtatcagcagaagcctggacaggcccctaagctgctgatctacggcgctaccacactggaaacaggcgtgcccagcagattttctggcagcggctctggcaccgactacaccctgacaatatccagcctccagcctgaggacttcgccacctactactgtcagcagagctggaacaccccttggacattcggccagggcaccaagctggaaatcaagagactcgaggacctgaagaacgtgttcccacctgaggtggccgtgttcgagcctagcgaggccgagatcagccacacccagaaagccaccctcgtgtgcctggctaccggcttctaccccgaccatgtggaactgtcttggtgggtcaacggcaaagaggtgcacagcggcgtgtctaccgacccccagccactgaaagaacagcccgccctgaacgacagccggtactgcctgagcagcagactgagagtgtccgccaccttctggcagaacccccggaaccacttcagatgccaggtgcagttctacggcctgagcgagaacgacgagtggacccaggacagagccaagcccgtgacccagatcgtgtctgccgaagcctggggcagagccgattgcggatcccagagcttcggcctgctggaccccaagctgtgctacctgctggatggcatcctgttcatctacggcgtgatcctgaccgccctgttcctgtgcgtgcggtgcagacaccggcggagacaggccgagagaatgagccagatcaagagactgctgtccgagaagaaaacctgccagtgcccccacagattccagaaaacatgcagccccatcagagtgaagttcagcagaagcgccgacgcccctgcctaccagcagggacagaaccaactgtacaacgagctgaacctgggcagacgggaagagtacgacgtgctggacaagcggagaggcagggaccctgagatgggcggaaagccccagcggagaaagaacccccaggaaggactgtataacgaactccagaaagacaagatggccgaagcctacagcgagatcggcatgaagggcgagcggagaagaggcaagggccacgatggcctgtaccagggcctgagcaccgccaccaaggacacctatgacgccctgcacatgcaggccctgcctccaagaagggccaagcgatctggatctggagcaacaaacttctcactactcaaacaagcaggtgacgtggaggagaatcccgggcctactagtatggactggatttggcgcatccttttccttgtcggcgctgctaccggcgcgcattccttcgaacaagttcagcttcaacagcctggcgctgagctggtcaaacctggcgcttctgtgaagatgagctgcaaagccagcggctacgccttcagcagctactggatcaactggatgaagcagaaacccggccagggactcgaatggatcggccaaatctatcccggcgacggcgacaccaactacaacggcaagttcaagggcagagccacactgaccgccgatacctctagcagcacagcctacatgcagctgagcagcctgaccagcgaagatagcgccgtgtacttctgtgcccggtccatcacaacagtcgtgggctgcgctatggactattggggccagggaacaagcgtgaccgtgtctagtacgcgtatccagaaccctgatcctgccgtgtaccagctgcgggatagcaagagcagcgacaagagcgtgtgtctgttcaccgacttcgacagccagaccaacgtgtcccagagcaaggactccgacgtgtacatcaccgataagaccgtgctggacatgcggagcatggacttcaagagcaactccgccgtggcctggtccaacaagtccgatttcgcctgcgccaacgccttcaacaacagcattatccccgaggacacattcttcccaagccccgagagcagctgcggtacccagagttttgggttgttggaccctaaattgtgctatctgttggacggaatcctgttcatttacggagtgatcctgaccgcattgttcctgctgtactgcaaccaccggaacaggcggagagtgtgcaagtgccctagacctgtggtcaagagcggcgacaagcctagcctgagcgccagatatgttcgggttaagttttccagatccgcagacgcacccgcttaccaacaagggcagaaccaactctacaatgaacttaatttggggcggagggaagagtacgacgttctggacaaaaggaggggacgagatcccgagatgggcggaaagcctcagcgaaggaagaatccgcaagaggggctttataacgaactccagaaagataaaatggcagaagcctatagtgagattgggatgaagggagaaaggaggaggggtaaaggtcacgatgggttgtaccaaggattgagcacagccactaaagatacctatgatgcgctccacatgcaggccctgccgccaagataa

SEQ ID NO: 1056 - DNA, 2634 bp, synthetic construct; identical to SEQ ID NO: 1052
  source 1..2634: mol_type = other DNA

SEQ ID NO: 1057 - DNA, 3309 bp, synthetic construct; identical to SEQ ID NO: 1046
  source 1..3309: mol_type = other DNA

SEQ ID NO: 1058 - DNA, 3333 bp, synthetic construct; identical to SEQ ID NO: 1050
  source 1..3333: mol_type = other DNA

SEQ ID NO: 1059 - DNA, 3372 bp, synthetic construct; identical to SEQ ID NO: 1047
  source 1..3372: mol_type = other DNA

SEQ ID NO: 1060 - DNA, 3396 bp, synthetic construct; identical to SEQ ID NO: 1051
  source 1..3396: mol_type = other DNA

SEQ ID NO: 1061 - DNA, 1848 bp, synthetic construct
  source 1..1848: mol_type = other DNA
atggccttaccagtgaccgccttgctcctgccgctggccttgctgctccacgccgccaggccggacatccagatgacacagagccctagcagcctgtctgccagcgtgggagacagagtgaccatcacatgcaaggccagccaggatgtgggcacagccgtggattggtatcagcagaagcctggcaaggcccctaagctgctgatctactgggccagcacaagacacacaggcgtgcccagcagattttctggcagcggctctggcaccgacttcaccctgacaatatccagcctccagcctgaggacttcgccacctactactgccagcagtacaacagctaccctctgaccttcggccagggcaccaaggtggaaatcaaaagactcgaggacctgaagaacgtgttcccacctgaggtggccgtgttcgagcctagcaaggccgagatcagcagaacccagaaagccaccctcgtgtgcctggctaccggcttctaccctcctcatgtggaactgtcttggtgggtcaacggcaaagaggtgcacgacggcgtgtgtaccgacccccagccactgaaagaacagcccgccctgaacgacagccggtactgcctgagcagcagactgagagtgtccgccaccttctggcagaacccccggaaccacttcagatgccaggtgcagttctacggcctgagcgagaacgacgagtggacccaggacagagccaagcccgtgacccagatcgtgtctgccgaagcctggggcagagccgattgcggctttaccagcgagagctaccagcagggcgtgctgagcgccaccatcctgtacgagatcctgctgggcaaggccaccctgtacgccgtgctggtgtctgccctggtgctgatggctatggtcaagcggaaggacagccggggaagggccaagcgatctggatctggagcaacaaacttctcactactcaaacaagcaggtgacgtggaggagaatcccgggcctactagtatggactggatttggcgcatccttttccttgtcggcgctgctaccggcgcgcattccttcgaagtgcagctggttgaatcaggtggcggcctggttcaacctggcggatctctgagactgagctgtgccgccagcggctacacctttaccgagtacacaatccactgggtccgacaggcccctggcaaaggacttgagtgggtcgccaacatcaaccccaacaatggcggcaccacctacaaccagaagttcgaggacagattcaccatcagccgggacaacagcaagaacaccctgtacctccagatgaactccctgagagccgaggacaccgccgtgtactattgtgccagaggctggaacttcgactactggggccagggaacactggtcaccgttagctctacgcgtatccagaaccctgatcctgccgtgtaccagctgcgggatagcaagagcagcgacaagttcgtgtgtctgttcaccgacttcgacagccagatcaacgtgtcccagagcaaggactccgacgtgtacatcaccgataagtgcgtgctggacatgcggagcatggacttcaagagcaactccgccgtggcctggtccaacaagtccgatttcacctgcgccaacgccttcaacaacagcattatccccgaggacacattcttcccaagccccgagagcagctgcgacgtgaagctggtggaaaagagcttcgagacagacaccaacctgaacttccagaacctgagcgtgatcggcttcagaatcctgctgctgaaagtggccggctttaacctgctgatgaccctgcggctgtggtccagctaa

SEQ ID NO: 1062 - DNA, 1869 bp, synthetic construct
  source 1..1869: mol_type = other DNA
atggccttaccagtgaccgccttgctcctgccgctggccttgctgctccacgccgccaggccggacatccagatgacacagagccctagcagcctgtctgccagcgtgggagacagagtgaccatcacatgcaaggccagcgaccacatcaacaactggctggcctggtatcagcagaagcctggacaggcccctaagctgctgatctacggcgctaccacactggaaacaggcgtgcccagcagattttctggcagcggctctggcaccgactacaccctgacaatatccagcctccagcctgaggacttcgccacctactactgtcagcagagctggaacaccccttggacattcggccagggcaccaagctggaaatcaagagactcgaggacctgaagaacgtgttcccacctgaggtggccgtgttcgagcctagcgaggccgagatcagccacacccagaaagccaccctcgtgtgcctggctaccggcttctaccccgaccatgtggaactgtcttggtgggtcaacggcaaagaggtgcacagcggcgtgtgtaccgacccccagccactgaaagaacagcccgccctgaacgacagccggtactgcctgagcagcagactgagagtgtccgccaccttctggcagaacccccggaaccacttcagatgccaggtgcagttctacggcctgagcgagaacgacgagtggacccaggacagagccaagcccgtgacccagatcgtgtctgccgaagcctggggcagagccgattgcgacgtgaagctggtggaaaagagcttcgagacagacaccaacctgaacttccagaacctgagcgtgatcggcttcagaatcctgctgctgaaagtggccggctttaacctgctgatgaccctgcggctgtggtccagcagggccaagcgatctggatctggagcaacaaacttctcactactcaaacaagcaggtgacgtggaggagaatcccgggcctactagtatggactggatttggcgcatccttttccttgtcggcgctgctaccggcgcgcattccttcgaacaagttcagcttcaacagcctggcgctgagctggtcaaacctggcgcttctgtgaagatgagctgcaaagccagcggctacgccttcagcagctactggatcaactggatgaagcagaaacccggccagggactcgaatggatcggccaaatctatcccggcgacggcgacaccaactacaacggcaagttcaagggcagagccacactgaccgccgatacctctagcagcacagcctacatgcagctgagcagcctgaccagcgaagatagcgccgtgtacttctgtgcccggtccatcacaacagtcgtgggctgcgctatggactattggggccagggaacaagcgtgaccgtgtctagtacgcgtatccagaaccctgatcctgccgtgtaccagctgcgggatagcaagagcagcgacaagagcgtgtgtctgttcaccgacttcgacagccagaccaacgtgtcccagagcaaggactccgacgtgtacatcaccgataagtgcgtgctggacatgcggagcatggacttcaagagcaactccgccgtggcctggtccaacaagtccgatttcgcctgcgccaacgccttcaacaacagcattatccccgaggacacattcttcccaagccccgagagcagctgcggctttaccagcgagagctaccagcagggcgtgctgagcgccaccatcctgtacgagatcctgctgggcaaggccaccctgtacgccgtgctggtgtctgccctggtgctgatggctatggtcaagcggaaggacagccggggataa

SEQ ID NO: 1063 - DNA, 1869 bp, synthetic construct
  source 1..1869: mol_type = other DNA
atggccttaccagtgaccgccttgctcctgccgctggccttgctgctccacgccgccaggccggacatccagatgacacagagccctagcagcctgtctgccagcgtgggagacagagtgaccatcacatgcaaggccagcgaccacatcaacaactggctggcctggtatcagcagaagcctggacaggcccctaagctgctgatctacggcgctaccacactggaaacaggcgtgcccagcagattttctggcagcggctctggcaccgactacaccctgacaatatccagcctccagcctgaggacttcgccacctactactgtcagcagagctggaacaccccttggacattcggccagggcaccaagctggaaatcaagagactcgaggacctgaagaacgtgttcccacctgaggtggccgtgttcgagcctagcgaggccgagatcagccacacccagaaagccaccctcgtgtgcctggctaccggcttctaccccgaccatgtggaactgtcttggtgggtcaacggcaaagaggtgcacagcggcgtgtgtaccgacccccagccactgaaagaacagcccgccctgaacgacagccggtactgcctgagcagcagactgagagtgtccgccaccttctggcagaacccccggaaccacttcagatgccaggtgcagttctacggcctgagcgagaacgacgagtggacccaggacagagccaagcccgtgacccagatcgtgtctgccgaagcctggggcagagccgattgcggctttaccagcgagagctaccagcagggcgtgctgagcgccaccaacctgagcgtgatcggcttcagaatcctgctgctgaaagtggccggctttaacctgctgatgaccctgcggctgtggtccagcagggccaagcgatctggatctggagcaacaaacttctcactactcaaacaagcaggtgacgtggaggagaatcccgggcctactagtatggactggatttggcgcatccttttccttgtcggcgctgctaccggcgcgcattccttcgaacaagttcagcttcaacagcctggcgctgagctggtcaaacctggcgcttctgtgaagatgagctgcaaagccagcggctacgccttcagcagctactggatcaactggatgaagcagaaacccggccagggactcgaatggatcggccaaatctatcccggcgacggcgacaccaactacaacggcaagttcaagggcagagccacactgaccgccgatacctctagcagcacagcctacatgcagctgagcagcctgaccagcgaagatagcgccgtgtacttctgtgcccggtccatcacaacagtcgtgggctgcgctatggactattggggccagggaacaagcgtgaccgtgtctagtacgcgtatccagaaccctgatcctgccgtgtaccagctgcgggatagcaagagcagcgacaagagcgtgtgtctgttcaccgacttcgacagccagaccaacgtgtcccagagcaaggactccgacgtgtacatcaccgataagtgcgtgctggacatgcggagcatggacttcaagagcaactccgccgtggcctggtccaacaagtccgatttcgcctgcgccaacgccttcaacaacagcattatccccgaggacacattcttcccaagccccgagagcagctgcgacgtgaagctggtggaaaagagcttcgagacagacaccaacctgaacttccagatcctgtacgagatcctgctgggcaaggccaccctgtacgccgtgctggtgtctgccctggtgctgatggctatggtcaagcggaaggacagccggggataa

SEQ ID NO: 1064 - DNA, 1869 bp, synthetic construct; identical to SEQ ID NO: 1062
  source 1..1869: mol_type = other DNA

SEQ ID NO: 1065 - DNA, 1869 bp, synthetic construct; identical to SEQ ID NO: 1063
  source 1..1869: mol_type = other DNA

SEQ ID NO: 1066 - DNA, 2568 bp, synthetic construct
  source 1..2568: mol_type = other DNA
atggccttaccagtgaccgccttgctcctgccgctggccttgctgctccacgccgccaggccggacatccagatgacacagagccctagcagcctgtctgccagcgtgggagacagagtgaccatcacatgcaaggccagcgaccacatcaacaactggctggcctggtatcagcagaagcctggacaggcccctaagctgctgatctacggcgctaccacactggaaacaggcgtgcccagcagattttctggcagcggctctggcaccgactacaccctgacaatatccagcctccagcctgaggacttcgccacctactactgtcagcagagctggaacaccccttggacattcggccagggcaccaagctggaaatcaagagactcgaggacctgaagaacgtgttcccacctgaggtggccgtgttcgagcctagcgaggccgagatcagccacacccagaaagccaccctcgtgtgcctggctaccggcttctaccccgaccatgtggaactgtcttggtgggtcaacggcaaagaggtgcacagcggcgtgtgtaccgacccccagccactgaaagaacagcccgccctgaacgacagccggtactgcctgagcagcagactgagagtgtccgccaccttctggcagaacccccggaaccacttcagatgccaggtgcagttctacggcctgagcgagaacgacgagtggacccaggacagagccaagcccgtgacccagatcgtgtctgccgaagcctggggcagagccgattgcgacgtgaagctggtggaaaagagcttcgagacagacaccaacctgaacttccagaacctgagcgtgatcggcttcagaatcctgctgctgaaagtggccggctttaacctgctgatgaccctgcggctgtggtccagcagggccaagcgatctggatctggagcaacaaacttctcactactcaaacaagcaggtgacgtggaggagaatcccgggcctactagtatggactggatttggcgcatccttttccttgtcggcgctgctaccggcgcgcattccttcgaacaagttcagcttcaacagcctggcgctgagctggtcaaacctggcgcttctgtgaagatgagctgcaaagccagcggctacgccttcagcagctactggatcaactggatgaagcagaaacccggccagggactcgaatggatcggccaaatctatcccggcgacggcgacaccaactacaacggcaagttcaagggcagagccacactgaccgccgatacctctagcagcacagcctacatgcagctgagcagcctgaccagcgaagatagcgccgtgtacttctgtgcccggtccatcacaacagtcgtgggctgcgctatggactattggggccagggaacaagcgtgaccgtgtctagtacgcgtatccagaaccctgatcctgccgtgtaccagctgcgggatagcaagagcagcgacaagagcgtgtgtctgttcaccgacttcgacagccagaccaacgtgtcccagagcaaggactccgacgtgtacatcaccgataagtgcgtgctggacatgcggagcatggacttcaagagcaactccgccgtggcctggtccaacaagtccgatttcgcctgcgccaacgccttcaacaacagcattatccccgaggacacattcttcccaagccccgagagcagctgcggctttaccagcgagagctaccagcagggcgtgctgagcgccaccatcctgtacgagatcctgctgggcaaggccaccctgtacgccgtgctggtgtctgccctggtgctgatggctatggtcaagcggaaggacagccggggacgcgccaagagaagcggatctggcgtgaagcagaccctgaatttcgacctgctgaagctggctggcgacgtggaatccaacccaggcccttctagaggccatatgaccgagtacaagcccacggtgcgcctcgccacccgcgacgacgtccccagggccgtacgcaccctcgccgccgcgttcgccgactaccccgccacgcgccacaccgtcgatccggaccgccacatcgagcgggtcaccgagctgcaagaactcttcctcacgcgcgtcgggctcgacatcggcaaggtgtgggtcgcggacgacggcgccgcggtggcggtctggaccacgccggagagcgtcgaagcgggggcggtgttcgccgagatcggcccgcgcatggccgagttgagcggttcccggctggccgcgcagcaacagatggaaggcctcctggcgccgcaccggcccaaggagcccgcgtggttcctggccaccgtcggcgtctcgcccgaccaccagggcaagggtctgggcagcgccgtcgtgctccccggagtggaggcggccgagcgcgccggggtgcccgccttcctggagacctccgcgccccgcaacctccccttctacgagcggctcggcttcaccgtcaccgccgacgtcgaggtgcccgaaggaccgcgcacctggtgcatgacccgcaagcccggtgcctga

SEQ ID NO: 1067 - DNA, 2883 bp, synthetic construct
  source 1..2883: mol_type = other DNA
atggccttaccagtgaccgccttgctcctgccgctggccttgctgctccacgccgccaggccggacatccagatgacacagagccctagcagcctgtctgccagcgtgggagacagagtgaccatcacatgcaaggccagcgaccacatcaacaactggctggcctggtatcagcagaagcctggacaggcccctaagctgctgatctacggcgctaccacactggaaacaggcgtgcccagcagattttctggcagcggctctggcaccgactacaccctgacaatatccagcctccagcctgaggacttcgccacctactactgtcagcagagctggaacaccccttggacattcggccagggcaccaagctggaaatcaagagactcgagggacagcctaaggccaatcctaccgtgacactgttccctccaagcagcgaagaactccaggccaacaaggccacacttgtgtgcctgatctccgacttctaccctggggctgtgacagtggcttggaaggccgatggatctcctgtgaaagccggcgtggaaaccaccaagccatccaagcagagcaacaacaaatacgccgccagctcctacctgagcctgacacctgagcagtggaagtcccacagatcctacagctgccaagtgacccacgaaggcagcaccgtggaaaagacagtggcccctacagagtgcagcggatccatcacactgggattgctggtggctggcgtgctggtgctgctggtttctctgggagttgccatccacctgtgctgtagaagaaggcgggccagactgcggtttatgaagcagttctacaagactagtatggactggatttggcgcatccttttccttgtcggcgctgctaccggcgcgcattccttcgaacaagttcagcttcaacagcctggcgctgagctggtcaaacctggcgcttctgtgaagatgagctgcaaagccagcggctacgccttcagcagctactggatcaactggatgaagcagaaacccggccagggactcgaatggatcggccaaatctatcccggcgacggcgacaccaactacaacggcaagttcaagggcagagccacactgaccgccgatacctctagcagcacagcctacatgcagctgagcagcctgaccagcgaagatagcgccgtgtacttctgtgcccggtccatcacaacagtcgtgggctgcgctatggactattggggccagggaacaagcgtgaccgtgtctagtacgcgtgcctctacaaagggaccctccgtgtttcctctggctcccagcagcaagtctacaagcggaggaacagccgctctgggctgcctggtcaaggattactttcccgagcctgtgaccgtgtcctggaatagcggagcactgacaagcggcgtgcacacctttccagccgtgctgcaaagcagcggcctgtactctctgagcagcgtggtcacagtgcctagctctagcctgggcacccagacctacatctgcaatgtgaaccacaagcctagcaacaccaaggtggacaagagagtggaacccaagagctgtggtacctctggacaggtgctgctggaaagcaacatcaaggtgctgcccacctggtccacccccgtgcagcctatggctctgattgtgctgggcggagtggccggactgctgctgtttattggcctgggcatcttcttttgcgtgcggtgcagacaccggcggagacaggccgagagaatgagccagatcaagagactgctgtccgagaagaaaacctgccagtgcccccacagattccagaaaacatgcagccccatctctagacgggttaagttttccagatccgcagacgcacccgcttaccaacaagggcagaaccaactctacaatgaacttaatttggggcggagggaagagtacgacgttctggacaaaaggaggggacgagatcccgagatgggcggaaagcctcagcgaaggaagaatccgcaagaggggctttataacgaactccagaaagataaaatggcagaagcctatagtgagattgggatgaagggagaaaggaggaggggtaaaggtcacgatgggttgtaccaaggattgagcacagccactaaagatacctatgatgcgctccacatgcaggccctgccgccaagacgcgccaagagaagcggatctggcgtgaagcagaccctgaatttcgacctgctgaagctggctggcgacgtggaatccaacccaggccctggccatatgaccgagtacaagcccacggtgcgcctcgccacccgcgacgacgtccccagggccgtacgcaccctcgccgccgcgttcgccgactaccccgccacgcgccacaccgtcgatccggaccgccacatcgagcgggtcaccgagctgcaagaactcttcctcacgcgcgtcgggctcgacatcggcaaggtgtgggtcgcggacgacggcgccgcggtggcggtctggaccacgccggagagcgtcgaagcgggggcggtgttcgccgagatcggcccgcgcatggccgagttgagcggttcccggctggccgcgcagcaacagatggaaggcctcctggcgccgcaccggcccaaggagcccgcgtggttcctggccaccgtcggcgtctcgcccgaccaccagggcaagggtctgggcagcgccgtcgtgctccccggagtggaggcggccgagcgcgccggggtgcccgccttcctggagacctccgcgccccgcaacctccccttctacgagcggctcggcttcaccgtcaccgccgacgtcgaggtgcccgaaggaccgcgcacctggtgcatgacccgcaagcccggtgcctga

SEQ ID NO: 1068 - DNA, 2817 bp, synthetic construct
  source 1..2817: mol_type = other DNA
atggccttaccagtgaccgccttgctcctgccgctggccttgctgctccacgccgccaggccggacatccagatgacacagagccctagcagcctgtctgccagcgtgggagacagagtgaccatcacatgcaaggccagcgaccacatcaacaactggctggcctggtatcagcagaagcctggacaggcccctaagctgctgatctacggcgctaccacactggaaacaggcgtgcccagcagattttctggcagcggctctggcaccgactacaccctgacaatatccagcctccagcctgaggacttcgccacctactactgtcagcagagctggaacaccccttggacattcggccagggcaccaagctggaaatcaagagactcgagggacagcctaaggccaatcctaccgtgacactgttccctccaagcagcgaagaactccaggccaacaaggccacacttgtgtgcctgatctccgacttctaccctggggctgtgacagtggcttggaaggccgatggatctcctgtgaaagccggcgtggaaaccaccaagccatccaagcagagcaacaacaaatacgccgccagctcctacctgagcctgacacctgagcagtggaagtcccacagatcctacagctgccaagtgacccacgaaggcagcaccgtggaaaagacagtggcccctacagagtgcagcggatccatcacactgggattgctggtggctggcgtgctggtgctgctggtttctctgggagttgccatccacctgtgctgtagaagaaggcgggccagactgcggtttatgaagcagttctacaagactagtatggactggatttggcgcatccttttccttgtcggcgctgctaccggcgcgcattccttcgaacaagttcagcttcaacagcctggcgctgagctggtcaaacctggcgcttctgtgaagatgagctgcaaagccagcggctacgccttcagcagctactggatcaactggatgaagcagaaacccggccagggactcgaatggatcggccaaatctatcccggcgacggcgacaccaactacaacggcaagttcaagggcagagccacactgaccgccgatacctctagcagcacagcctacatgcagctgagcagcctgaccagcgaagatagcgccgtgtacttctgtgcccggtccatcacaacagtcgtgggctgcgctatggactattggggccagggaacaagcgtgaccgtgtctagtacgcgtgcctctacaaagggaccctccgtgtttcctctggctcccagcagcaagtctacaagcggaggaacagccgctctgggctgcctggtcaaggattactttcccgagcctgtgaccgtgtcctggaatagcggagcactgacaagcggcgtgcacacctttccagccgtgctgcaaagcagcggcctgtactctctgagcagcgtggtcacagtgcctagctctagcctgggcacccagacctacatctgcaatgtgaaccacaagcctagcaacaccaaggtggacaagagagtggaacccaagagctgtggtaccatggctctgattgtgctgggcggagtggccggactgctgctgtttattggcctgggcatcttcttttgcgtgcggtgcagacaccggcggagacaggccgagagaatgagccagatcaagagactgctgtccgagaagaaaacctgccagtgcccccacagattccagaaaacatgcagccccatctctagacgggttaagttttccagatccgcagacgcacccgcttaccaacaagggcagaaccaactctacaatgaacttaatttggggcggagggaagagtacgacgttctggacaaaaggaggggacgagatcccgagatgggcggaaagcctcagcgaaggaagaatccgcaagaggggctttataacgaactccagaaagataaaatggcagaagcctatagtgagattgggatgaagggagaaaggaggaggggtaaaggtcacgatgggttgtaccaaggattgagcacagccactaaagatacctatgatgcgctccacatgcaggccctgccgccaagacgcgccaagagaagcggatctggcgtgaagcagaccctgaatttcgacctgctgaagctggctggcgacgtggaatccaacccaggccctggccatatgaccgagtacaagcccacggtgcgcctcgccacccgcgacgacgtccccagggccgtacgcaccctcgccgccgcgttcgccgactaccccgccacgcgccacaccgtcgatccggaccgccacatcgagcgggtcaccgagctgcaagaactcttcctcacgcgcgtcgggctcgacatcggcaaggtgtgggtcgcggacgacggcgccgcggtggcggtctggaccacgccggagagcgtcgaagcgggggcggtgttcgccgagatcggcccgcgcatggccgagttgagcggttcccggctggccgcgcagcaacagatggaaggcctcctggcgccgcaccggcccaaggagcccgcgtggttcctggccaccgtcggcgtctcgcccgaccaccagggcaagggtctgggcagcgccgtcgtgctccccggagtggaggcggccgagcgcgccggggtgcccgccttcctggagacctccgcgccccgcaacctccccttctacgagcggctcggcttcaccgtcaccgccgacgtcgaggtgcccgaaggaccgcgcacctggtgcatgacccgcaagcccggtgcctga

SEQ ID NO: 1069 - DNA, 3348 bp, synthetic construct
  source 1..3348: mol_type = other DNA
atggccttaccagtgaccgccttgctcctgccgctggccttgctgctccacgccgccaggccggacatccagatgacacagagccctagcagcctgtctgccagcgtgggagacagagtgaccatcacatgcaaggccagcgaccacatcaacaactggctggcctggtatcagcagaagcctggacaggcccctaagctgctgatctacggcgctaccacactggaaacaggcgtgcccagcagattttctggcagcggctctggcaccgactacaccctgacaatatccagcctccagcctgaggacttcgccacctactactgtcagcagagctggaacaccccttggacattcggccagggcaccaagctggaaatcaagagactcgaggacctgaagaacgtgttcccacctgaggtggccgtgttcgagcctagcgaggccgagatcagccacacccagaaagccaccctcgtgtgcctggctaccggcttctaccccgaccatgtggaactgtcttggtgggtcaacggcaaagaggtgcacagcggcgtgtctaccgacccccagccactgaaagaacagcccgccctgaacgacagccggtactgcctgagcagcagactgagagtgtccgccaccttctggcagaacccccggaaccacttcagatgccaggtgcagttctacggcctgagcgagaacgacgagtggacccaggacagagccaagcccgtgacccagatcgtgtctgccgaagcctggggcagagccgattgcggatccatcacactgggattgctggtggctggcgtgctggtgctgctggtttctctgggagttgccatccacctgtgctgtagaagaaggcgggccagactgcggtttatgaagcagttctacaagactagtagagtgaagttcagcagaagcgccgacgcccctgcctaccagcagggacagaaccaactgtacaacgagctgaacctgggcagacgggaagagtacgacgtgctggacaagcggagaggcagggaccctgagatgggcggaaagccccagcggagaaagaacccccaggaaggactgtataacgaactccagaaagacaagatggccgaagcctacagcgagatcggcatgaagggcgagcggagaagaggcaagggccacgatggcctgtaccagggcctgagcaccgccaccaaggacacctatgacgccctgcacatgcaggccctgcctccaagaagggccaagcgatctggatctggagcaacaaacttctcactactcaaacaagcaggtgacgtggaggagaatcccgggcctatggactggatttggcgcatccttttccttgtcggcgctgctaccggcgcgcattccttcgaacaagttcagcttcaacagcctggcgctgagctggtcaaacctggcgcttctgtgaagatgagctgcaaagccagcggctacgccttcagcagctactggatcaactggatgaagcagaaacccggccagggactcgaatggatcggccaaatctatcccggcgacggcgacaccaactacaacggcaagttcaagggcagagccacactgaccgccgatacctctagcagcacagcctacatgcagctgagcagcctgaccagcgaagatagcgccgtgtacttctgtgcccggtccatcacaacagtcgtgggctgcgctatggactattggggccagggaacaagcgtgaccgtgtctagtacgcgtatccagaaccctgatcctgccgtgtaccagctgcgggatagcaagagcagcgacaagagcgtgtgtctgttcaccgacttcgacagccagaccaacgtgtcccagagcaaggactccgacgtgtacatcaccgataagaccgtgctggacatgcggagcatggacttcaagagcaactccgccgtggcctggtccaacaagtccgatttcgcctgcgccaacgccttcaacaacagcattatccccgaggacacattcttcccaagccccgagagcagctgcggtacctctggacaggtgctgctggaaagcaacatcaaggtgctgcccacctggtccacccccgtgcagcctatggctctgattgtgctgggcggagtggccggactgctgctgtttattggcctgggcatcttcttttgcgtgcggtgcagacaccggcggagacaggccgagagaatgagccagatcaagagactgctgtccgagaagaaaacctgccagtgcccccacagattccagaaaacatgcagccccatctctagacgggttaagttttccagatccgcagacgcacccgcttaccaacaagggcagaaccaactctacaatgaacttaatttggggcggagggaagagtacgacgttctggacaaaaggaggggacgagatcccgagatgggcggaaagcctcagcgaaggaagaatccgcaagaggggctttataacgaactccagaaagataaaatggcagaagcctatagtgagattgggatgaagggagaaaggaggaggggtaaaggtcacgatgggttgtaccaaggattgagcacagccactaaagatacctatgatgcgctccacatgcaggccctgccgccaagacgcgccaagagaagcggatctggcgtgaagcagaccctgaatttcgacctgctgaagctggctggcgacgtggaatccaacccaggccctggccatatgaccgagtacaagcccacggtgcgcctcgccacccgcgacgacgtccccagggccgtacgcaccctcgccgccgcgttcgccgactaccccgccacgcgccacaccgtcgatccggaccgccacatcgagcgggtcaccgagctgcaagaactcttcctcacgcgcgtcgggctcgacatcggcaaggtgtgggtcgcggacgacggcgccgcggtggcggtctggaccacgccggagagcgtcgaagcgggggcggtgttcgccgagatcggcccgcgcatggccgagttgagcggttcccggctggccgcgcagcaacagatggaaggcctcctggcgccgcaccggcccaaggagcccgcgtggttcctggccaccgtcggcgtctcgcccgaccaccagggcaagggtctgggcagcgccgtcgtgctccccggagtggaggcggccgagcgcgccggggtgcccgccttcctggagacctccgcgccccgcaacctccccttctacgagcggctcggcttcaccgtcaccgccgacgtcgaggtgcccgaaggaccgcgcacctggtgcatgacccgcaagcccggtgcctga

SEQ ID NO: 1070 - DNA, 2991 bp, synthetic construct
  source 1..2991: mol_type = other DNA
atggccttaccagtgaccgccttgctcctgccgctggccttgctgctccacgccgccaggccgcaggttcagctgcaagagtctggcggaggactggttcaagctggcggaagcctgagactgtcttgtgccgcctctggcacaatcagccccatcgacatcatgggctggtacagacaggcccctggcaaagagagagagttcgttgccgccattgctctcggcggcaatacctactacgccgactctgtgaagggcagattcaccatcagccgggacaacgccaagaacaccgtgtacctccagatgaacagcctgaagccagaggacaccgccgtgtactattgtgccgtgggctacgtggacaagtgggacgacagcgactaccacacatattggggccagggcacccaagtgacagtgtctagcggtaccggcggaggcggatctggcggcggaggtagcggtggcggaggatctgaattcgacatccagatgacacagagccctagcagcctgtctgccagcgtgggagacagagtgaccatcacatgcaaggccagcgaccacatcaacaactggctggcctggtatcagcagaagcctggacaggcccctaagctgctgatctacggcgctaccacactggaaacaggcgtgcccagcagattttctggcagcggctctggcaccgactacaccctgacaatatccagcctccagcctgaggacttcgccacctactactgtcagcagagctggaacaccccttggacattcggccagggcaccaagctggaaatcaagagactcgaggacctgaagaacgtgttcccacctgaggtggccgtgttcgagcctagcgaggccgagatcagccacacccagaaagccaccctcgtgtgcctggctaccggcttctaccccgaccatgtggaactgtcttggtgggtcaacggcaaagaggtgcacagcggcgtgtgtaccgacccccagccactgaaagaacagcccgccctgaacgacagccggtactgcctgagcagcagactgagagtgtccgccaccttctggcagaacccccggaaccacttcagatgccaggtgcagttctacggcctgagcgagaacgacgagtggacccaggacagagccaagcccgtgacccagatcgtgtctgccgaagcctggggcagagccgattgcggctttaccagcgagagctaccagcagggcgtgctgagcgccaccatcctgtacgagatcctgctgggcaaggccaccctgtacgccgtgctggtgtctgccctggtgctgatggctatggtcaagcggaaggacagccggggaagggccaagcgatctggatctggagcaacaaacttctcactactcaaacaagcaggtgacgtggaggagaatcccgggcctactagtatggactggatttggcgcatccttttccttgtcggcgctgctaccggcgcgcattccttcgaacaagttcagcttcaacagcctggcgctgagctggtcaaacctggcgcttctgtgaagatgagctgcaaagccagcggctacgccttcagcagctactggatcaactggatgaagcagaaacccggccagggactcgaatggatcggccaaatctatcccggcgacggcgacaccaactacaacggcaagttcaagggcagagccacactgaccgccgatacctctagcagcacagcctacatgcagctgagcagcctgaccagcgaagatagcgccgtgtacttctgtgcccggtccatcacaacagtcgtgggctgcgctatggactattggggccagggaacaagcgtgaccgtgtctagtacgcgtatccagaaccctgatcctgccgtgtaccagctgcgggatagcaagagcagcgacaagagcgtgtgtctgttcaccgacttcgacagccagaccaacgtgtcccagagcaaggactccgacgtgtacatcaccgataagtgcgtgctggacatgcggagcatggacttcaagagcaactccgccgtggcctggtccaacaagtccgatttcgcctgcgccaacgccttcaacaacagcattatccccgaggacacattcttcccaagccccgagagcagctgcgacgtgaagctggtggaaaagagcttcgagacagacaccaacctgaacttccagaacctgagcgtgatcggcttcagaatcctgctgctgaaagtggccggctttaacctgctgatgaccctgcggctgtggtccagccgcgccaagagaagcggatctggcgtgaagcagaccctgaatttcgacctgctgaagctggctggcgacgtggaatccaacccaggcccttctagaggccatatgaccgagtacaagcccacggtgcgcctcgccacccgcgacgacgtccccagggccgtacgcaccctcgccgccgcgttcgccgactaccccgccacgcgccacaccgtcgatccggaccgccacatcgagcgggtcaccgagctgcaagaactcttcctcacgcgcgtcgggctcgacatcggcaaggtgtgggtcgcggacgacggcgccgcggtggcggtctggaccacgccggagagcgtcgaagcgggggcggtgttcgccgagatcggcccgcgcatggccgagttgagcggttcccggctggccgcgcagcaacagatggaaggcctcctggcgccgcaccggcccaaggagcccgcgtggttcctggccaccgtcggcgtctcgcccgaccaccagggcaagggtctgggcagcgccgtcgtgctccccggagtggaggcggccgagcgcgccggggtgcccgccttcctggagacctccgcgccccgcaacctccccttctacgagcggctcggcttcaccgtcaccgccgacgtcgaggtgcccgaaggaccgcgcacctggtgcatgacccgcaagcccggtgcctga

SEQ ID NO: 1071 - DNA, 2991 bp, synthetic construct
  source 1..2991: mol_type = other DNA
atggccttaccagtgaccgccttgctcctgccgctggccttgctgctccacgccgccaggccgcaggttcagctgcaagagtctggcggaggactggttcaagctggcggaagcctgagactgtcttgtgccgcctctggcacaatcagccccatcgacatcatgggctggtacagacaggcccctggcaaagagagagagctggttgccgccattgctctcggcggcaatacctactacgccgactctgtgaagggcagattcaccatcagccgggacaacgccaagaacaccgtgtacctccagatgaacagcctgaagccagaggacaccgccgtgtactattgtgccgtgggctacgtggacaagtgggacgacagcgactaccacacatattggggccagggcacccaagtgacagtgtctagcggtaccggcggaggcggatctggcggcggaggtagcggtggcggaggatctgaattcgacatccagatgacacagagccctagcagcctgtctgccagcgtgggagacagagtgaccatcacatgcaaggccagcgaccacatcaacaactggctggcctggtatcagcagaagcctggacaggcccctaagctgctgatctacggcgctaccacactggaaacaggcgtgcccagcagattttctggcagcggctctggcaccgactacaccctgacaatatccagcctccagcctgaggacttcgccacctactactgtcagcagagctggaacaccccttggacattcggccagggcaccaagctggaaatcaagagactcgaggacctgaagaacgtgttcccacctgaggtggccgtgttcgagcctagcgaggccgagatcagccacacccagaaagccaccctcgtgtgcctggctaccggcttctaccccgaccatgtggaactgtcttggtgggtcaacggcaaagaggtgcacagcggcgtgtgtaccgacccccagccactgaaagaacagcccgccctgaacgacagccggtactgcctgagcagcagactgagagtgtccgccaccttctggcagaacccccggaaccacttcagatgccaggtgcagttctacggcctgagcgagaacgacgagtggacccaggacagagccaagcccgtgacccagatcgtgtctgccgaagcctggggcagagccgattgcggctttaccagcgagagctaccagcagggcgtgctgagcgccaccatcctgtacgagatcctgctgggcaaggccaccctgtacgccgtgctggtgtctgccctggtgctgatggctatggtcaagcggaaggacagccggggaagggccaagcgatctggatctggagcaacaaacttctcactactcaaacaagcaggtgacgtggaggagaatcccgggcctactagtatggactggatttggcgcatccttttccttgtcggcgctgctaccggcgcgcattccttcgaacaagttcagcttcaacagcctggcgctgagctggtcaaacctggcgcttctgtgaagatgagctgcaaagccagcggctacgccttcagcagctactggatcaactggatgaagcagaaacccggccagggactcgaatggatcggccaaatctatcccggcgacggcgacaccaactacaacggcaagttcaagggcagagccacactgaccgccgatacctctagcagcacagcctacatgcagctgagcagcctgaccagcgaagatagcgccgtgtacttctgtgcccggtccatcacaacagtcgtgggctgcgctatggactattggggccagggaacaagcgtgaccgtgtctagtacgcgtatccagaaccctgatcctgccgtgtaccagctgcgggatagcaagagcagcgacaagagcgtgtgtctgttcaccgacttcgacagccagaccaacgtgtcccagagcaaggactccgacgtgtacatcaccgataagtgcgtgctggacatgcggagcatggacttcaagagcaactccgccgtggcctggtccaacaagtccgatttcgcctgcgccaacgccttcaacaacagcattatccccgaggacacattcttcccaagccccgagagcagctgcgacgtgaagctggtggaaaagagcttcgagacagacaccaacctgaacttccagaacctgagcgtgatcggcttcagaatcctgctgctgaaagtggccggctttaacctgctgatgaccctgcggctgtggtccagccgcgccaagagaagcggatctggcgtgaagcagaccctgaatttcgacctgctgaagctggctggcgacgtggaatccaacccaggcccttctagaggccatatgaccgagtacaagcccacggtgcgcctcgccacccgcgacgacgtccccagggccgtacgcaccctcgccgccgcgttcgccgactaccccgccacgcgccacaccgtcgatccggaccgccacatcgagcgggtcaccgagctgcaagaactcttcctcacgcgcgtcgggctcgacatcggcaaggtgtgggtcgcggacgacggcgccgcggtggcggtctggaccacgccggagagcgtcgaagcgggggcggtgttcgccgagatcggcccgcgcatggccgagttgagcggttcccggctggccgcgcagcaacagatggaaggcctcctggcgccgcaccggcccaaggagcccgcgtggttcctggccaccgtcggcgtctcgcccgaccaccagggcaagggtctgggcagcgccgtcgtgctccccggagtggaggcggccgagcgcgccggggtgcccgccttcctggagacctccgcgccccgcaacctccccttctacgagcggctcggcttcaccgtcaccgccgacgtcgaggtgcccgaaggaccgcgcacctggtgcatgacccgcaagcccggtgcctga

SEQ ID NO: 1072 - DNA, 2571 bp, synthetic construct
  source 1..2571: mol_type = other DNA
atggccttaccagtgaccgccttgctcctgccgctggccttgctgctccacgccgccaggccggacatccagatgacacagagccctagcagcctgtctgccagcgtgggagacagagtgaccatcacctgtagagccagccaggacgtgaacacagccgtggcttggtatcagcagaagcctggcaaggcccctaagctgctgatctacagcgcctacttcctgtacagcggcgtgcccagcagattcagcggaagcagaagcggcaccgacttcaccctgacaatatccagcctccagcctgaggacttcgccacctactactgccagcagtacagcagatacagccccgtgacctttggacagggcaccaaggtggaaatcaagagactcgaggccgacgtgtcccccaagcctaccatcttcctgccctctatcgccgagacaaagctccagaaggccggcacctacctgtgcctgctggaaaagttcttcccagatgtgattaagatccactggcaggaaaagaagtccaacaccatcctgggcagccaggaaggcaacaccatgaagaccaacgacacctacatgaagttcagctggctgaccgtgcccgagaagtccctggacaaagaacacagatgcatcgtgcggcacgaaaacaacaagaacggcgtggaccaggaaatcatcttcccacccatcaagaccgatgtgattacaatggaccccaaggacaactgctccaaggacgccaacgataccctgctgctccagctgaccaacaccagcgcctactacatgtacttgttgctgctgctgaagtccgtggtgtacttcgccatcatcacatgctgcctgctgcggagaaccgccttctgctgcaacggcgagaagtctagggccaagcgatctggatctggagcaacaaacttctcactactcaaacaagcaggtgacgtggaggagaatcccgggcctactagtatggactggatttggcgcatccttttccttgtcggcgctgctaccggcgcgcattccttcgaagttcagctggttgaaagtggtggcggcctggttcaacctggcggatctctgagactgagctgtgccgccagcggcttcaatgtgtacgcctctggaatgcactgggtccgacaggcccctggcaaaggacttgagtgggtcgccaaaatctaccccgacagcgactacacctattacgccgacagcgtgaagggcagattcaccatcagcgccgacaccagcaagaacaccgcctacctccagatgaactccctgagagccgaggacaccgccgtgtactactgtagcagagacagcagcttctactacgtgtacgctatggactactggggccagggcacactggtcacagtctcttctacgcgtcctcacaccaagcccagcgtgttcgtgatgaagaacggcaccaacgtggcctgcctcgtgaaagagttctaccccaaggacatcaggatcaacctggtgtccagcaagaagatcaccgagttcgaccccgccatcgtgatctcccccagcggcaagtacaacgccgtgaagctggggaagtacgaggacagcaacagcgtgacctgctccgtgcagcacgacaacaagaccgtgcacagcaccgactttgaagtgaaaaccgactccaccgaccacgtgaagcccaaagagacagagaacaccaagcagcccagcaagagctgccacaagcccaaggccatcgtgcacaccgagaaagtgaacatgatgagcctgaccgtgctgggcctgcggatgctgttcgccaaaaccgtggccgtgaacttcctgctgaccgccaagctgttcttcctccgcgccaagagaagcggatctggcgtgaagcagaccctgaatttcgacctgctgaagctggctggcgacgtggaatccaacccaggcccttctagaggccatatgaccgagtacaagcccacggtgcgcctcgccacccgcgacgacgtccccagggccgtacgcaccctcgccgccgcgttcgccgactaccccgccacgcgccacaccgtcgatccggaccgccacatcgagcgggtcaccgagctgcaagaactcttcctcacgcgcgtcgggctcgacatcggcaaggtgtgggtcgcggacgacggcgccgcggtggcggtctggaccacgccggagagcgtcgaagcgggggcggtgttcgccgagatcggcccgcgcatggccgagttgagcggttcccggctggccgcgcagcaacagatggaaggcctcctggcgccgcaccggcccaaggagcccgcgtggttcctggccaccgtcggcgtctcgcccgaccaccagggcaagggtctgggcagcgccgtcgtgctccccggagtggaggcggccgagcgcgccggggtgcccgccttcctggagacctccgcgccccgcaacctccccttctacgagcggctcggcttcaccgtcaccgccgacgtcgaggtgcccgaaggaccgcgcacctggtgcatgacccgcaagcccggtgcctga

SEQ ID NO: 1073 - DNA, 1887 bp, synthetic construct
  source 1..1887: mol_type = other DNA
atggccttaccagtgaccgccttgctcctgccgctggccttgctgctccacgccgccaggccggaagttcagctggttcagagcggagccgaagtgaagaagcctggcgagagcctgaagattagctgcaaaggcagcggctacggcttcaccagctattggatcggctgggtccgacagatgcctggcaaaggactggaatggatgggcatcattcaccccgacgacagcgacaccaagtacagccctagcttccagggccaagtgaccatcagcgccgacaagagcatcagcacagcctacctccagtggtcctctctgaaggccagcgataccgccatgtactactgcgccagcagctacctgagaggactgtggggcggctacttcgatttttggggccagggcacactggtcaccgttagttctctcgaggacctgaagaacgtgttcccacctgaggtggccgtgttcgagcctagcgaggccgagatcagccacacccagaaagccaccctcgtgtgcctggctaccggcttctaccccgaccatgtggaactgtcttggtgggtcaacggcaaagaggtgcacagcggcgtgtgtaccgacccccagccactgaaagaacagcccgccctgaacgacagccggtactgcctgagcagcagactgagagtgtccgccaccttctggcagaacccccggaaccacttcagatgccaggtgcagttctacggcctgagcgagaacgacgagtggacccaggacagagccaagcccgtgacccagatcgtgtctgccgaagcctggggcagagccgattgcggctttaccagcgagagctaccagcagggcgtgctgagcgccaccatcctgtacgagatcctgctgggcaaggccaccctgtacgccgtgctggtgtctgccctggtgctgatggctatggtcaagcggaaggacagccggggaagggccaagcgatctggatctggagcaacaaacttctcactactcaaacaagcaggtgacgtggaggagaatcccgggcctactagtatggactggatttggcgcatccttttccttgtcggcgctgctaccggcgcgcattccttcgaactgcaaagcgtgctgacacagcctcctagcgcctctggaacacctggacagagagtgacaatcagctgctccggcagctccagcaacatcggcagcaactacgtgaactggtatcagcagctgcctggcacagcccctaaactgctgatctacggcgactaccagaggccaagcggcgtgccagatagattcagcggcagcaagtctggcacaagcgccagcctggctatctctggactgagaagcgaggacgaggccgactactactgtgccaccagagatgatagcctgagcggcagcgtggtgtttggcacaggcacaaagctgacagtgctgggcacgcgtatccagaaccctgatcctgccgtgtaccagctgcgggatagcaagagcagcgacaagagcgtgtgtctgttcaccgacttcgacagccagaccaacgtgtcccagagcaaggactccgacgtgtacatcaccgataagtgcgtgctggacatgcggagcatggacttcaagagcaactccgccgtggcctggtccaacaagtccgatttcgcctgcgccaacgccttcaacaacagcattatccccgaggacacattcttcccaagccccgagagcagctgcgacgtgaagctggtggaaaagagcttcgagacagacaccaacctgaacttccagaacctgagcgtgatcggcttcagaatcctgctgctgaaagtggccggctttaacctgctgatgaccctgcggctgtggtccagctaa

SEQ ID NO: 1074 - DNA, 2451 bp, synthetic construct
  source 1..2451: mol_type = other DNA
atggccttaccagtgaccgccttgctcctgccgctggccttgctgctccacgccgccaggccggaggttcagctgctggaatctggcggaggaatggttcagcctggcggctctctgagactgtcttgtgccgccagcggcttcacctttagcagctacgccatgagctgggtccgacaggctcctggcaaaggactggaatgggtgtccgccatctctggctctggcggcagaaccttttacgccgatagcgtggaaggccggttcaccatcagccgggacaacagcaagaacaccctgtacctccagatgaacagcctgagagccgaggacaccgccgtgtactattgcgccaagcacgactacagcaactacccctacttcgactactggggccagggcacactggtcacagtttctagcctcgaggacctgaagaacgtgttcccacctgaggtggccgtgttcgagcctagcgaggccgagatcagccacacccagaaagccaccctcgtgtgcctggctaccggcttctaccccgaccatgtggaactgtcttggtgggtcaacggcaaagaggtgcacagcggcgtgtctaccgacccccagccactgaaagaacagcccgccctgaacgacagccggtactgcctgagcagcagactgagagtgtccgccaccttctggcagaacccccggaaccacttcagatgccaggtgcagttctacggcctgagcgagaacgacgagtggacccaggacagagccaagcccgtgacccagatcgtgtctgccgaagcctggggcagagccgattgcggatcccagagcttcggcctgctggaccccaagctgtgctacctgctggatggcatcctgttcatctacggcgtgatcctgaccgccctgttcctgagagtgaagttcagcagaagcgccgacgcccctgcctaccagcagggacagaaccaactgtacaacgagctgaacctgggcagacgggaagagtacgacgtgctggacaagcggagaggcagggaccctgagatgggcggaaagccccagcggagaaagaacccccaggaaggactgtataacgaactccagaaagacaagatggccgaagcctacagcgagatcggcatgaagggcgagcggagaagaggcaagggccacgatggcctgtaccagggcctgagcaccgccaccaaggacacctatgacgccctgcacatgcaggccctgcctccaagaagggccaagcgatctggatctggagcaacaaacttctcactactcaaacaagcaggtgacgtggaggagaatcccgggcctactagtatggactggatttggcgcatccttttccttgtcggcgctgctaccggcgcgcattccttcgaaatcgtgctgacacagagccccggcacactgtcactttctccaggcgaaggcgctaccctgtcttgtagagctggacagtctgtgcggagcagctacctcggatggtatcagcagaagcctggacaggcccctcggctgttgatctacggtgcttctagcagagccacaggcatccccgatagattttctggcagcggctccggcaccgacttcaccctgacaatcagcagactggaacccgaggacttcgccgtgtattactgccagcagtacggctacagccctcctacatttggcggaggcaccaagctggaaatcaagacgcgtatccagaaccctgatcctgccgtgtaccagctgcgggatagcaagagcagcgacaagagcgtgtgtctgttcaccgacttcgacagccagaccaacgtgtcccagagcaaggactccgacgtgtacatcaccgataagaccgtgctggacatgcggagcatggacttcaagagcaactccgccgtggcctggtccaacaagtccgatttcgcctgcgccaacgccttcaacaacagcattatccccgaggacacattcttcccaagccccgagagcagctgcggtacccagagttttgggttgttggaccctaaattgtgctatctgttggacggaatcctgttcatttacggagtgatcctgaccgcattgttcctgcgggttaagttttccagatccgcagacgcacccgcttaccaacaagggcagaaccaactctacaatgaacttaatttggggcggagggaagagtacgacgttctggacaaaaggaggggacgagatcccgagatgggcggaaagcctcagcgaaggaagaatccgcaagaggggctttataacgaactccagaaagataaaatggcagaagcctatagtgagattgggatgaagggagaaaggaggaggggtaaaggtcacgatgggttgtaccaaggattgagcacagccactaaagatacctatgatgcgctccacatgcaggccctgccgccaagataa

SEQ ID NO: 1075 - DNA, 2451 bp, synthetic construct
  source 1..2451: mol_type = other DNA
atggccttaccagtgaccgccttgctcctgccgctggccttgctgctccacgccgccaggccggaggttcagctgcttgagtctggcggaggactggttcaacctggcggaagcctgagactgtcttgtgccgccagcggcttcacctttagcagctacgccatgagctgggtccgacaggctcctggcaaaggactggaatgggtgtccgtgatctctggctctggcggcagacccaattacgccgattctgtgaagggcagattcaccatcagccgggacaacagcaagaacaccctgtacctccagatgaacagcctgcgcgacgaggataccgccgtgtactattgtgccaaggtggactacagcaactacctgttcttcgactactggggccagggcaccctggtcacagtttctagcctcgaggacctgaagaacgtgttcccacctgaggtggccgtgttcgagcctagcgaggccgagatcagccacacccagaaagccaccctcgtgtgcctggctaccggcttctaccccgaccatgtggaactgtcttggtgggtcaacggcaaagaggtgcacagcggcgtgtctaccgacccccagccactgaaagaacagcccgccctgaacgacagccggtactgcctgagcagcagactgagagtgtccgccaccttctggcagaacccccggaaccacttcagatgccaggtgcagttctacggcctgagcgagaacgacgagtggacccaggacagagccaagcccgtgacccagatcgtgtctgccgaagcctggggcagagccgattgcggatcccagagcttcggcctgctggaccccaagctgtgctacctgctggatggcatcctgttcatctacggcgtgatcctgaccgccctgttcctgagagtgaagttcagcagaagcgccgacgcccctgcctaccagcagggacagaaccaactgtacaacgagctgaacctgggcagacgggaagagtacgacgtgctggacaagcggagaggcagggaccctgagatgggcggaaagccccagcggagaaagaacccccaggaaggactgtataacgaactccagaaagacaagatggccgaagcctacagcgagatcggcatgaagggcgagcggagaagaggcaagggccacgatggcctgtaccagggcctgagcaccgccaccaaggacacctatgacgccctgcacatgcaggccctgcctccaagaagggccaagcgatctggatctggagcaacaaacttctcactactcaaacaagcaggtgacgtggaggagaatcccgggcctactagtatggactggatttggcgcatccttttccttgtcggcgctgctaccggcgcgcattccttcgaaatcgtgctgacacagagccccggcacactgtcactttctccaggcgaaggcgctaccctgtcttgtagagctggacagtctgtgcggagcagctacctcggatggtatcagcagaagcctggacaggcccctcggctgttgatctacggtgcttctagcagagccacaggcatccccgatagattttctggcagcggctccggcaccgacttcaccctgacaatcagcagactggaacccgaggacttcgccgtgtattactgccagcagtacggctacagccctcctacatttggcggaggcaccaagctggaaatcaagacgcgtatccagaaccctgatcctgccgtgtaccagctgcgggatagcaagagcagcgacaagagcgtgtgtctgttcaccgacttcgacagccagaccaacgtgtcccagagcaaggactccgacgtgtacatcaccgataagaccgtgctggacatgcggagcatggacttcaagagcaactccgccgtggcctggtccaacaagtccgatttcgcctgcgccaacgccttcaacaacagcattatccccgaggacacattcttcccaagccccgagagcagctgcggtacccagagttttgggttgttggaccctaaattgtgctatctgttggacggaatcctgttcatttacggagtgatcctgaccgcattgttcctgcgggttaagttttccagatccgcagacgcacccgcttaccaacaagggcagaaccaactctacaatgaacttaatttggggcggagggaagagtacgacgttctggacaaaaggaggggacgagatcccgagatgggcggaaagcctcagcgaaggaagaatccgcaagaggggctttataacgaactccagaaagataaaatggcagaagcctatagtgagattgggatgaagggagaaaggaggaggggtaaaggtcacgatgggttgtaccaaggattgagcacagccactaaagatacctatgatgcgctccacatgcaggccctgccgccaagataa

SEQ ID NO: 1076 - DNA, 2445 bp, synthetic construct
  source 1..2445: mol_type = other DNA
atggccttaccagtgaccgccttgctcctgccgctggccttgctgctccacgccgccaggccggacatccagatgacacagagccctagcagcctgtctgccagcgtgggagacagagtgaccatcacctgtagagccagccagggcatctcttcttggctggcctggtatcagcagaagcctggcaaggcccctaagctgctgatctatgccgccagctctctccagagcggagtgcctagcagattttctggcagcggctccggcaccgatttcaccctgacaatatccagcctccagcctgaggacttcgccacctactactgccagcagtacaacagctaccctctgaccttcggccagggcaccaaggtggaaatcaaaagactcgaggacctgaagaacgtgttcccacctgaggtggccgtgttcgagcctagcgaggccgagatcagccacacccagaaagccaccctcgtgtgcctggctaccggcttctaccccgaccatgtggaactgtcttggtgggtcaacggcaaagaggtgcacagcggcgtgtctaccgacccccagccactgaaagaacagcccgccctgaacgacagccggtactgcctgagcagcagactgagagtgtccgccaccttctggcagaacccccggaaccacttcagatgccaggtgcagttctacggcctgagcgagaacgacgagtggacccaggacagagccaagcccgtgacccagatcgtgtctgccgaagcctggggcagagccgattgcggatcccagagcttcggcctgctggaccccaagctgtgctacctgctggatggcatcctgttcatctacggcgtgatcctgaccgccctgttcctgagagtgaagttcagcagaagcgccgacgcccctgcctaccagcagggacagaaccaactgtacaacgagctgaacctgggcagacgggaagagtacgacgtgctggacaagcggagaggcagggaccctgagatgggcggaaagccccagcggagaaagaacccccaggaaggactgtataacgaactccagaaagacaagatggccgaagcctacagcgagatcggcatgaagggcgagcggagaagaggcaagggccacgatggcctgtaccagggcctgagcaccgccaccaaggacacctatgacgccctgcacatgcaggccctgcctccaagaagggccaagcgatctggatctggagcaacaaacttctcactactcaaacaagcaggtgacgtggaggagaatcccgggcctactagtatggactggatttggcgcatccttttccttgtcggcgctgctaccggcgcgcattccttcgaagtgcagctggttgaatcaggtggcggcctggttcaacctggcggatctctgagactgagctgtgccgcctccggcttcacctttagcgatcacggaatgcactgggtccgacaggcccctggaaaaggactggaatgggtcgccgtgatttggtacgacggcagcaacaagtattacgccgacagcgtgaagggcagattcaccatcagccgggacaacagcaagaacaccctgtacctccagatgaactccctgagagccgaggacaccgccgtgtactactgtgccagagacagcatcatggtccgaggcgattattggggccagggaaccctggtcacagtgtctagtacgcgtatccagaaccctgatcctgccgtgtaccagctgcgggatagcaagagcagcgacaagagcgtgtgtctgttcaccgacttcgacagccagaccaacgtgtcccagagcaaggactccgacgtgtacatcaccgataagaccgtgctggacatgcggagcatggacttcaagagcaactccgccgtggcctggtccaacaagtccgatttcgcctgcgccaacgccttcaacaacagcattatccccgaggacacattcttcccaagccccgagagcagctgcggtacccagagttttgggttgttggaccctaaattgtgctatctgttggacggaatcctgttcatttacggagtgatcctgaccgcattgttcctgcgggttaagttttccagatccgcagacgcacccgcttaccaacaagggcagaaccaactctacaatgaacttaatttggggcggagggaagagtacgacgttctggacaaaaggaggggacgagatcccgagatgggcggaaagcctcagcgaaggaagaatccgcaagaggggctttataacgaactccagaaagataaaatggcagaagcctatagtgagattgggatgaagggagaaaggaggaggggtaaaggtcacgatgggttgtaccaaggattgagcacagccactaaagatacctatgatgcgctccacatgcaggccctgccgccaagataa

SEQ ID NO: 1077 - DNA, 2460 bp, synthetic construct
  source 1..2460: mol_type = other DNA
atggccttaccagtgaccgccttgctcctgccgctggccttgctgctccacgccgccaggccggacatcgtgatgacccagagccccgatagcctggccgtgtctctgggagagagagccaccatcaactgccgggccagcaagagcgtgtccaccagcggctacagcttcatgcactggtatcagcagaagcccggccagccccccaagctgctgatctacctggcctccaacctggaaagcggcgtgcccgatagattcagcggcagcggctctggcaccgacttcaccctgaccatcagttctcttcaggccgaggacgtggccgtgtactactgccagcacagcagagaggtgccctggacattcggccagggcacaaaggtggaaatcaagcggctcgaggacctgaagaacgtgttcccacctgaggtggccgtgttcgagcctagcgaggccgagatcagccacacccagaaagccaccctcgtgtgcctggctaccggcttctaccccgaccatgtggaactgtcttggtgggtcaacggcaaagaggtgcacagcggcgtgtctaccgacccccagccactgaaagaacagcccgccctgaacgacagccggtactgcctgagcagcagactgagagtgtccgccaccttctggcagaacccccggaaccacttcagatgccaggtgcagttctacggcctgagcgagaacgacgagtggacccaggacagagccaagcccgtgacccagatcgtgtctgccgaagcctggggcagagccgattgcggatcccagagcttcggcctgctggaccccaagctgtgctacctgctggatggcatcctgttcatctacggcgtgatcctgaccgccctgttcctgagagtgaagttcagcagaagcgccgacgcccctgcctaccagcagggacagaaccaactgtacaacgagctgaacctgggcagacgggaagagtacgacgtgctggacaagcggagaggcagggaccctgagatgggcggaaagccccagcggagaaagaacccccaggaaggactgtataacgaactccagaaagacaagatggccgaagcctacagcgagatcggcatgaagggcgagcggagaagaggcaagggccacgatggcctgtaccagggcctgagcaccgccaccaaggacacctatgacgccctgcacatgcaggccctgcctccaagaagggccaagcgatctggatctggagcaacaaacttctcactactcaaacaagcaggtgacgtggaggagaatcccgggcctactagtatggactggatttggcgcatccttttccttgtcggcgctgctaccggcgcgcattccttcgaacaggtgcagctggtgcagtctggggccgaagtgaagaaacctggggccagcgtgaaggtgtcctgcaaggccagcggatacacctttaccaactacggcatgaactgggtgcgccaggcccctggacagggcctggaatggatgggctggatcaacacctacaccggcgagcccacatacgccgacgccttcaagggcagattcgccttcagcctggacaccagcacctccaccgcctacctccagatcaacagcctgcggagcgacgacaccgccgtgtattattgcgccagagattacggcgactacgggatggactattggggccagggaaccaccgtgaccgtgtcctctacgcgtatccagaaccctgatcctgccgtgtaccagctgcgggatagcaagagcagcgacaagagcgtgtgtctgttcaccgacttcgacagccagaccaacgtgtcccagagcaaggactccgacgtgtacatcaccgataagaccgtgctggacatgcggagcatggacttcaagagcaactccgccgtggcctggtccaacaagtccgatttcgcctgcgccaacgccttcaacaacagcattatccccgaggacacattcttcccaagccccgagagcagctgcggtacccagagttttgggttgttggaccctaaattgtgctatctgttggacggaatcctgttcatttacggagtgatcctgaccgcattgttcctgcgggttaagttttccagatccgcagacgcacccgcttaccaacaagggcagaaccaactctacaatgaacttaatttggggcggagggaagagtacgacgttctggacaaaaggaggggacgagatcccgagatgggcggaaagcctcagcgaaggaagaatccgcaagaggggctttataacgaactccagaaagataaaatggcagaagcctatagtgagattgggatgaagggagaaaggaggaggggtaaaggtcacgatgggttgtaccaaggattgagcacagccactaaagatacctatgatgcgctccacatgcaggccctgccgccaagataa

SEQ ID NO: 1078 - DNA, 3015 bp, synthetic construct
  source 1..3015: mol_type = other DNA
atggccttaccagtgaccgccttgctcctgccgctggccttgctgctccacgccgccaggccggacatccagatgacacagagccctagcagcctgtctgccagcgtgggagacagagtgaccatcacatgcaaggccagcgaccacatcaacaactggctggcctggtatcagcagaagcctggacaggcccctaagctgctgatctacggcgctaccacactggaaacaggcgtgcccagcagattttctggcagcggctctggcaccgactacaccctgacaatatccagcctccagcctgaggacttcgccacctactactgtcagcagagctggaacaccccttggacattcggccagggcaccaagctggaaatcaagagactcgagggacagcctaaggccaatcctaccgtgacactgttccctccaagcagcgaagaactccaggccaacaaggccacacttgtgtgcctgatctccgacttctaccctggggctgtgacagtggcttggaaggccgatggatctcctgtgaaagccggcgtggaaaccaccaagccatccaagcagagcaacaacaaatacgccgccagctcctacctgagcctgacacctgagcagtggaagtcccacagatcctacagctgccaagtgacccacgaaggcagcaccgtggaaaagacagtggcccctacagagtgcagcggatccggcaagggaacacagctgagcgtggtggacttcctgcctactacagcccagcctaccaagaagtctaccctgaagaaaagagtgtgcaggctgcccagacctgagacacagaaaggccctctgtgcagccctatcacactgggattgctggtggctggcgtgctggtgctgctggtttctctgggagttgccatccacctgtgctgtagaagaaggcgggccagactgcggtttatgaagcagttctacaagactagtatggactggatttggcgcatccttttccttgtcggcgctgctaccggcgcgcattccttcgaacaagttcagcttcaacagcctggcgctgagctggtcaaacctggcgcttctgtgaagatgagctgcaaagccagcggctacgccttcagcagctactggatcaactggatgaagcagaaacccggccagggactcgaatggatcggccaaatctatcccggcgacggcgacaccaactacaacggcaagttcaagggcagagccacactgaccgccgatacctctagcagcacagcctacatgcagctgagcagcctgaccagcgaagatagcgccgtgtacttctgtgcccggtccatcacaacagtcgtgggctgcgctatggactattggggccagggaacaagcgtgaccgtgtctagtacgcgtgcctctacaaagggaccctccgtgtttcctctggctcccagcagcaagtctacaagcggaggaacagccgctctgggctgcctggtcaaggattactttcccgagcctgtgaccgtgtcctggaatagcggagcactgacaagcggcgtgcacacctttccagccgtgctgcaaagcagcggcctgtactctctgagcagcgtggtcacagtgcctagctctagcctgggcacccagacctacatctgcaatgtgaaccacaagcctagcaacaccaaggtggacaagagagtggaacccaagagctgtggtacctctggacaggtgctgctggaaagcaacatcaaggtgctgcccacctggtccacccccgtgcagcctatggctctgattgtgctgggcggagtggccggactgctgctgtttattggcctgggcatcttcttttgcgtgcggtgcagacaccggcggagacaggccgagagaatgagccagatcaagagactgctgtccgagaagaaaacctgccagtgcccccacagattccagaaaacatgcagccccatctctagacgggttaagttttccagatccgcagacgcacccgcttaccaacaagggcagaaccaactctacaatgaacttaatttggggcggagggaagagtacgacgttctggacaaaaggaggggacgagatcccgagatgggcggaaagcctcagcgaaggaagaatccgcaagaggggctttataacgaactccagaaagataaaatggcagaagcctatagtgagattgggatgaagggagaaaggaggaggggtaaaggtcacgatgggttgtaccaaggattgagcacagccactaaagatacctatgatgcgctccacatgcaggccctgccgccaagacgcgccaagagaagcggatctggcgtgaagcagaccctgaatttcgacctgctgaagctggctggcgacgtggaatccaacccaggccctggccatatgaccgagtacaagcccacggtgcgcctcgccacccgcgacgacgtccccagggccgtacgcaccctcgccgccgcgttcgccgactaccccgccacgcgccacaccgtcgatccggaccgccacatcgagcgggtcaccgagctgcaagaactcttcctcacgcgcgtcgggctcgacatcggcaaggtgtgggtcgcggacgacggcgccgcggtggcggtctggaccacgccggagagcgtcgaagcgggggcggtgttcgccgagatcggcccgcgcatggccgagttgagcggttcccggctggccgcgcagcaacagatggaaggcctcctggcgccgcaccggcccaaggagcccgcgtggttcctggccaccgtcggcgtctcgcccgaccaccagggcaagggtctgggcagcgccgtcgtgctccccggagtggaggcggccgagcgcgccggggtgcccgccttcctggagacctccgcgccccgcaacctccccttctacgagcggctcggcttcaccgtcaccgccgacgtcgaggtgcccgaaggaccgcgcacctggtgcatgacccgcaagcccggtgcctga

SEQ ID NO: 1079 - DNA, 2949 bp, synthetic construct
  source 1..2949: mol_type = other DNA
atggccttaccagtgaccgccttgctcctgccgctggccttgctgctccacgccgccaggccggacatccagatgacacagagccctagcagcctgtctgccagcgtgggagacagagtgaccatcacatgcaaggccagcgaccacatcaacaactggctggcctggtatcagcagaagcctggacaggcccctaagctgctgatctacggcgctaccacactggaaacaggcgtgcccagcagattttctggcagcggctctggcaccgactacaccctgacaatatccagcctccagcctgaggacttcgccacctactactgtcagcagagctggaacaccccttggacattcggccagggcaccaagctggaaatcaagagactcgagggacagcctaaggccaatcctaccgtgacactgttccctccaagcagcgaagaactccaggccaacaaggccacacttgtgtgcctgatctccgacttctaccctggggctgtgacagtggcttggaaggccgatggatctcctgtgaaagccggcgtggaaaccaccaagccatccaagcagagcaacaacaaatacgccgccagctcctacctgagcctgacacctgagcagtggaagtcccacagatcctacagctgccaagtgacccacgaaggcagcaccgtggaaaagacagtggcccctacagagtgcagcggatccggcaagggaacacagctgagcgtggtggacttcctgcctactacagcccagcctaccaagaagtctaccctgaagaaaagagtgtgcaggctgcccagacctgagacacagaaaggccctctgtgcagccctatcacactgggattgctggtggctggcgtgctggtgctgctggtttctctgggagttgccatccacctgtgctgtagaagaaggcgggccagactgcggtttatgaagcagttctacaagactagtatggactggatttggcgcatccttttccttgtcggcgctgctaccggcgcgcattccttcgaacaagttcagcttcaacagcctggcgctgagctggtcaaacctggcgcttctgtgaagatgagctgcaaagccagcggctacgccttcagcagctactggatcaactggatgaagcagaaacccggccagggactcgaatggatcggccaaatctatcccggcgacggcgacaccaactacaacggcaagttcaagggcagagccacactgaccgccgatacctctagcagcacagcctacatgcagctgagcagcctgaccagcgaagatagcgccgtgtacttctgtgcccggtccatcacaacagtcgtgggctgcgctatggactattggggccagggaacaagcgtgaccgtgtctagtacgcgtgcctctacaaagggaccctccgtgtttcctctggctcccagcagcaagtctacaagcggaggaacagccgctctgggctgcctggtcaaggattactttcccgagcctgtgaccgtgtcctggaatagcggagcactgacaagcggcgtgcacacctttccagccgtgctgcaaagcagcggcctgtactctctgagcagcgtggtcacagtgcctagctctagcctgggcacccagacctacatctgcaatgtgaaccacaagcctagcaacaccaaggtggacaagagagtggaacccaagagctgtggtaccatggctctgattgtgctgggcggagtggccggactgctgctgtttattggcctgggcatcttcttttgcgtgcggtgcagacaccggcggagacaggccgagagaatgagccagatcaagagactgctgtccgagaagaaaacctgccagtgcccccacagattccagaaaacatgcagccccatctctagacgggttaagttttccagatccgcagacgcacccgcttaccaacaagggcagaaccaactctacaatgaacttaatttggggcggagggaagagtacgacgttctggacaaaaggaggggacgagatcccgagatgggcggaaagcctcagcgaaggaagaatccgcaagaggggctttataacgaactccagaaagataaaatggcagaagcctatagtgagattgggatgaagggagaaaggaggaggggtaaaggtcacgatgggttgtaccaaggattgagcacagccactaaagatacctatgatgcgctccacatgcaggccctgccgccaagacgcgccaagagaagcggatctggcgtgaagcagaccctgaatttcgacctgctgaagctggctggcgacgtggaatccaacccaggccctggccatatgaccgagtacaagcccacggtgcgcctcgccacccgcgacgacgtccccagggccgtacgcaccctcgccgccgcgttcgccgactaccccgccacgcgccacaccgtcgatccggaccgccacatcgagcgggtcaccgagctgcaagaactcttcctcacgcgcgtcgggctcgacatcggcaaggtgtgggtcgcggacgacggcgccgcggtggcggtctggaccacgccggagagcgtcgaagcgggggcggtgttcgccgagatcggcccgcgcatggccgagttgagcggttcccggctggccgcgcagcaacagatggaaggcctcctggcgccgcaccggcccaaggagcccgcgtggttcctggccaccgtcggcgtctcgcccgaccaccagggcaagggtctgggcagcgccgtcgtgctccccggagtggaggcggccgagcgcgccggggtgcccgccttcctggagacctccgcgccccgcaacctccccttctacgagcggctcggcttcaccgtcaccgccgacgtcgaggtgcccgaaggaccgcgcacctggtgcatgacccgcaagcccggtgcctga

SEQ ID NO: 1080 - DNA, 3480 bp, synthetic construct
  source 1..3480: mol_type = other DNA
atggccttaccagtgaccgccttgctcctgccgctggccttgctgctccacgccgccaggccggacatccagatgacacagagccctagcagcctgtctgccagcgtgggagacagagtgaccatcacatgcaaggccagcgaccacatcaacaactggctggcctggtatcagcagaagcctggacaggcccctaagctgctgatctacggcgctaccacactggaaacaggcgtgcccagcagattttctggcagcggctctggcaccgactacaccctgacaatatccagcctccagcctgaggacttcgccacctactactgtcagcagagctggaacaccccttggacattcggccagggcaccaagctggaaatcaagagactcgaggacctgaagaacgtgttcccacctgaggtggccgtgttcgagcctagcgaggccgagatcagccacacccagaaagccaccctcgtgtgcctggctaccggcttctaccccgaccatgtggaactgtcttggtgggtcaacggcaaagaggtgcacagcggcgtgtctaccgacccccagccactgaaagaacagcccgccctgaacgacagccggtactgcctgagcagcagactgagagtgtccgccaccttctggcagaacccccggaaccacttcagatgccaggtgcagttctacggcctgagcgagaacgacgagtggacccaggacagagccaagcccgtgacccagatcgtgtctgccgaagcctggggcagagccgattgcggatccggcaagggaacacagctgagcgtggtggacttcctgcctactacagcccagcctaccaagaagtctaccctgaagaaaagagtgtgcaggctgcccagacctgagacacagaaaggccctctgtgcagccctatcacactgggattgctggtggctggcgtgctggtgctgctggtttctctgggagttgccatccacctgtgctgtagaagaaggcgggccagactgcggtttatgaagcagttctacaagactagtagagtgaagttcagcagaagcgccgacgcccctgcctaccagcagggacagaaccaactgtacaacgagctgaacctgggcagacgggaagagtacgacgtgctggacaagcggagaggcagggaccctgagatgggcggaaagccccagcggagaaagaacccccaggaaggactgtataacgaactccagaaagacaagatggccgaagcctacagcgagatcggcatgaagggcgagcggagaagaggcaagggccacgatggcctgtaccagggcctgagcaccgccaccaaggacacctatgacgccctgcacatgcaggccctgcctccaagaagggccaagcgatctggatctggagcaacaaacttctcactactcaaacaagcaggtgacgtggaggagaatcccgggcctatggactggatttggcgcatccttttccttgtcggcgctgctaccggcgcgcattccttcgaacaagttcagcttcaacagcctggcgctgagctggtcaaacctggcgcttctgtgaagatgagctgcaaagccagcggctacgccttcagcagctactggatcaactggatgaagcagaaacccggccagggactcgaatggatcggccaaatctatcccggcgacggcgacaccaactacaacggcaagttcaagggcagagccacactgaccgccgatacctctagcagcacagcctacatgcagctgagcagcctgaccagcgaagatagcgccgtgtacttctgtgcccggtccatcacaacagtcgtgggctgcgctatggactattggggccagggaacaagcgtgaccgtgtctagtacgcgtatccagaaccctgatcctgccgtgtaccagctgcgggatagcaagagcagcgacaagagcgtgtgtctgttcaccgacttcgacagccagaccaacgtgtcccagagcaaggactccgacgtgtacatcaccgataagaccgtgctggacatgcggagcatggacttcaagagcaactccgccgtggcctggtccaacaagtccgatttcgcctgcgccaacgccttcaacaacagcattatccccgaggacacattcttcccaagccccgagagcagctgcggtacctctggacaggtgctgctggaaagcaacatcaaggtgctgcccacctggtccacccccgtgcagcctatggctctgattgtgctgggcggagtggccggactgctgctgtttattggcctgggcatcttcttttgcgtgcggtgcagacaccggcggagacaggccgagagaatgagccagatcaagagactgctgtccgagaagaaaacctgccagtgcccccacagattccagaaaacatgcagccccatctctagacgggttaagttttccagatccgcagacgcacccgcttaccaacaagggcagaaccaactctacaatgaacttaatttggggcggagggaagagtacgacgttctggacaaaaggaggggacgagatcccgagatgggcggaaagcctcagcgaaggaagaatccgcaagaggggctttataacgaactccagaaagataaaatggcagaagcctatagtgagattgggatgaagggagaaaggaggaggggtaaaggtcacgatgggttgtaccaaggattgagcacagccactaaagatacctatgatgcgctccacatgcaggccctgccgccaagacgcgccaagagaagcggatctggcgtgaagcagaccctgaatttcgacctgctgaagctggctggcgacgtggaatccaacccaggccctggccatatgaccgagtacaagcccacggtgcgcctcgccacccgcgacgacgtccccagggccgtacgcaccctcgccgccgcgttcgccgactaccccgccacgcgccacaccgtcgatccggaccgccacatcgagcgggtcaccgagctgcaagaactcttcctcacgcgcgtcgggctcgacatcggcaaggtgtgggtcgcggacgacggcgccgcggtggcggtctggaccacgccggagagcgtcgaagcgggggcggtgttcgccgagatcggcccgcgcatggccgagttgagcggttcccggctggccgcgcagcaacagatggaaggcctcctggcgccgcaccggcccaaggagcccgcgtggttcctggccaccgtcggcgtctcgcccgaccaccagggcaagggtctgggcagcgccgtcgtgctccccggagtggaggcggccgagcgcgccggggtgcccgccttcctggagacctccgcgccccgcaacctccccttctacgagcggctcggcttcaccgtcaccgccgacgtcgaggtgcccgaaggaccgcgcacctggtgcatgacccgcaagcccggtgcctga

SEQ ID NO: 1081 - DNA, 2274 bp, synthetic construct
  source 1..2274: mol_type = other DNA
atggccttaccagtgaccgccttgctcctgccgctggccttgctgctccacgccgccaggccggacatccagatgacacagagccctagcagcctgtctgccagcgtgggagacagagtgaccatcacatgcaaggccagcgaccacatcaacaactggctggcctggtatcagcagaagcctggacaggcccctaagctgctgatctacggcgctaccacactggaaacaggcgtgcccagcagattttctggcagcggctctggcaccgactacaccctgacaatatccagcctccagcctgaggacttcgccacctactactgtcagcagagctggaacaccccttggacattcggccagggcaccaagctggaaatcaagagactcgagggacagcctaaggccaatcctaccgtgacactgttccctccaagcagcgaagaactccaggccaacaaggccacacttgtgtgcctgatctccgacttctaccctggggctgtgacagtggcttggaaggccgatggatctcctgtgaaagccggcgtggaaaccaccaagccatccaagcagagcaacaacaaatacgccgccagctcctacctgagcctgacacctgagcagtggaagtcccacagatcctacagctgccaagtgacccacgaaggcagcaccgtggaaaagacagtggcccctacagagtgcagcggatccctgggagagcctcagctgtgctatatcctggacgccatcctgtttctgtacggcatcgtgctgaccctgctgtactgccggctgaagatccaagtgcggaaggccgccatcaccagctacgagaaatccgacggcgtgtacaccggcctgagcaccagaaatcaagagacatacgagacactgaagcacgaaaagcctccacaaagggccaagcgatctggatctggagcaacaaacttctcactactcaaacaagcaggtgacgtggaggagaatcccgggcctactagtatggactggatttggcgcatccttttccttgtcggcgctgctaccggcgcgcattccttcgaacaagttcagcttcaacagcctggcgctgagctggtcaaacctggcgcttctgtgaagatgagctgcaaagccagcggctacgccttcagcagctactggatcaactggatgaagcagaaacccggccagggactcgaatggatcggccaaatctatcccggcgacggcgacaccaactacaacggcaagttcaagggcagagccacactgaccgccgatacctctagcagcacagcctacatgcagctgagcagcctgaccagcgaagatagcgccgtgtacttctgtgcccggtccatcacaacagtcgtgggctgcgctatggactattggggccagggaacaagcgtgaccgtgtctagtacgcgtgcctctacaaagggaccctccgtgtttcctctggctcccagcagcaagtctacaagcggaggaacagccgctctgggctgcctggtcaaggattactttcccgagcctgtgaccgtgtcctggaatagcggagcactgacaagcggcgtgcacacctttccagccgtgctgcaaagcagcggcctgtactctctgagcagcgtggtcacagtgcctagctctagcctgggcacccagacctacatctgcaatgtgaaccacaagcctagcaacaccaaggtggacaagagagtggaacccaagagctgtggtaccgatcagtgcacagacctgctcgctctgggcatccctagtattactcaggcatggggcctctgggtgctcctgggtgctgttacactcctgtttctcatcagcctggctgcccacctgtctcaatggacaaggggcagaagcagatcacaccccggacaaggcagaagcggcgagagcgttgaagaagtgcctctgtacggaaatctccactacctgcaaacaggacggctgagtcaggaccccgagcctgaccaacaagatccaacacttggcggccctgctagagccgctgaagaagtcatgtgctacacttccctgcaactgcggccaccacaaggcaggattccaggaccaggcactcctgtgaaatactctgaggtcgtgctggactccgagcctaagagccaagcctctggacccgaacctgaactctatgccagcgtgtgcgcccagacacgtagagctagggccagttttcccgaccaagcctatgccaatagtcagcctgccgcctcttaa

SEQ ID NO: 1082 - DNA, 2130 bp, synthetic construct
  source 1..2130: mol_type = other DNA
atggccttaccagtgaccgccttgctcctgccgctggccttgctgctccacgccgccaggccggaattcaatgctggcgtgacccagacacctaagttccaggtgctgaaaaccggccagagcatgaccctgcaatgcgcccaggacatgaaccatgagtacatgagctggtacagacaggaccccggcatgggcctgagactgatccactactctgtggctatccagaccaccgaccagggcgaagtgcccaatggctacaacgtgtccagaagcaccatcgaggacttcccactgagactgctgtctgccgctcctagccagaccagcgtgtacttttgtgccagcagctacctgggcaacaccggcgagctgttttttggcgagggcagcagactgaccgtgctcgaggacctgaagaacgtgttcccacctgaggtggccgtgttcgagcctagcgaggccgagatcagccacacccagaaagccaccctcgtgtgcctggctaccggcttctaccccgaccatgtggaactgtcttggtgggtcaacggcaaagaggtgcacagcggcgtgtctaccgacccccagccactgaaagaacagcccgccctgaacgacagccggtactgcctgagcagcagactgagagtgtccgccaccttctggcagaacccccggaaccacttcagatgccaggtgcagttctacggcctgagcgagaacgacgagtggacccaggacagagccaagcccgtgacccagatcgtgtctgccgaagcctggggcagagccgattgcggatccctgggagagcctcagctgtgctatatcctggacgccatcctgtttctgtacggcatcgtgctgaccctgctgtactgcaaacggggcagaaagaaactcctgtatatattcaaacaaccatttatgagaccagtacaaactactcaagaggaagatggctgtagctgccgatttccagaagaagaagaaggaggatgtgaactgcggctgaagatccaagtgcggaaggccgccatcaccagctacgagaaatccgacggcgtgtacaccggcctgagcaccagaaatcaagagacatacgagacactgaagcacgaaaagcctccacaaagggccaagcgatctggatctggagcaacaaacttctcactactcaaacaagcaggtgacgtggaggagaatcccgggcctactagtatggactggatttggcgcatccttttccttgtcggcgctgctaccggcgcgcattccttcgaacaagaagtgacacagatccctgccgctctgtctgtgcctgagggcgaaaacctggtgctgaactgctccttcaccgacagcgccatctacaacctccagtggttcaggcaggaccctggaaagggactgacaagcctgctgctgatccagagcagccagagagagcagacctccggcagactgaatgccagcctggataagagcagcggcaggtctaccctgtatatcgccgcttctcagcctggcgatagcgccacatatctgtgtgctgtgcggcctacaagcggcggcagctacatccctacatttggcagaggcaccagcctgatcgtgcacccttatacgcgtatccagaaccctgatcctgccgtgtaccagctgcgggatagcaagagcagcgacaagagcgtgtgtctgttcaccgacttcgacagccagaccaacgtgtcccagagcaaggactccgacgtgtacatcaccgataagaccgtgctggacatgcggagcatggacttcaagagcaactccgccgtggcctggtccaacaagtccgatttcgcctgcgccaacgccttcaacaacagcattatccccgaggacacattcttcccaagccccgagagcagctgcggtaccctcggagaaccacagctctgttacattctggatgctatcctgttcctctatgggatcgtcctgacactcctgtattgcagactcaaaattcaagttcgcaaagccgccattacctcttacgagaagagtgatggggtgtacacaggactgtctacccggaatcaagaaacctacgaaaccctcaaacatgagaagccacctcagtaa

SEQ ID NO: 1083 - DNA, 2355 bp, synthetic construct
  source 1..2355: mol_type = other DNA
atggccttaccagtgaccgccttgctcctgccgctggccttgctgctccacgccgccaggccggaattcaatgctggcgtgacccagacacctaagttccaggtgctgaaaaccggccagagcatgaccctgcaatgcgcccaggacatgaaccatgagtacatgagctggtacagacaggaccccggcatgggcctgagactgatccactactctgtggctatccagaccaccgaccagggcgaagtgcccaatggctacaacgtgtccagaagcaccatcgaggacttcccactgagactgctgtctgccgctcctagccagaccagcgtgtacttttgtgccagcagctacctgggcaacaccggcgagctgttttttggcgagggcagcagactgaccgtgctcgaggacctgaagaacgtgttcccacctgaggtggccgtgttcgagcctagcgaggccgagatcagccacacccagaaagccaccctcgtgtgcctggctaccggcttctaccccgaccatgtggaactgtcttggtgggtcaacggcaaagaggtgcacagcggcgtgtctaccgacccccagccactgaaagaacagcccgccctgaacgacagccggtactgcctgagcagcagactgagagtgtccgccaccttctggcagaacccccggaaccacttcagatgccaggtgcagttctacggcctgagcgagaacgacgagtggacccaggacagagccaagcccgtgacccagatcgtgtctgccgaagcctggggcagagccgattgcggatccctgggagagcctcagctgtgctatatcctggacgccatcctgtttctgtacggcatcgtgctgaccctgctgtactgcaaacggggcagaaagaaactcctgtatatattcaaacaaccatttatgagaccagtacaaactactcaagaggaagatggctgtagctgccgatttccagaagaagaagaaggaggatgtgaactgcggctgaagatccaagtgcggaaggccgccatcaccagctacgagaaatccgacggcgtgtacaccggcctgagcaccagaaatcaagagacatacgagacactgaagcacgaaaagcctccacaaagggccaagcgatctggatctggagcaacaaacttctcactactcaaacaagcaggtgacgtggaggagaatcccgggcctactagtatggactggatttggcgcatccttttccttgtcggcgctgctaccggcgcgcattccttcgaacaagaagtgacacagatccctgccgctctgtctgtgcctgagggcgaaaacctggtgctgaactgctccttcaccgacagcgccatctacaacctccagtggttcaggcaggaccctggaaagggactgacaagcctgctgctgatccagagcagccagagagagcagacctccggcagactgaatgccagcctggataagagcagcggcaggtctaccctgtatatcgccgcttctcagcctggcgatagcgccacatatctgtgtgctgtgcggcctacaagcggcggcagctacatccctacatttggcagaggcaccagcctgatcgtgcacccttatacgcgtatccagaaccctgatcctgccgtgtaccagctgcgggatagcaagagcagcgacaagagcgtgtgtctgttcaccgacttcgacagccagaccaacgtgtcccagagcaaggactccgacgtgtacatcaccgataagaccgtgctggacatgcggagcatggacttcaagagcaactccgccgtggcctggtccaacaagtccgatttcgcctgcgccaacgccttcaacaacagcattatccccgaggacacattcttcccaagccccgagagcagctgcggtacccagagttttgggttgttggaccctaaattgtgctatctgttggacggaatcctgttcatttacggagtgatcctgaccgcattgttcctgcgggttaagttttccagatccgcagacgcacccgcttaccaacaagggcagaaccaactctacaatgaacttaatttggggcggagggaagagtacgacgttctggacaaaaggaggggacgagatcccgagatgggcggaaagcctcagcgaaggaagaatccgcaagaggggctttataacgaactccagaaagataaaatggcagaagcctatagtgagattgggatgaagggagaaaggaggaggggtaaaggtcacgatgggttgtaccaaggattgagcacagccactaaagatacctatgatgcgctccacatgcaggccctgccgccaagataa

SEQ ID NO: 1084 - DNA, 2586 bp, synthetic construct
  source 1..2586: mol_type = other DNA
atggccttaccagtgaccgccttgctcctgccgctggccttgctgctccacgccgccaggccggacatccagatgacacagagccctagcagcctgtctgccagcgtgggagacagagtgaccatcacatgcaaggccagcgaccacatcaacaactggctggcctggtatcagcagaagcctggacaggcccctaagctgctgatctacggcgctaccacactggaaacaggcgtgcccagcagattttctggcagcggctctggcaccgactacaccctgacaatatccagcctccagcctgaggacttcgccacctactactgtcagcagagctggaacaccccttggacattcggccagggcaccaagctggaaatcaagagactcgaggacctgaagaacgtgttcccacctgaggtggccgtgttcgagcctagcgaggccgagatcagccacacccagaaagccaccctcgtgtgcctggctaccggcttctaccccgaccatgtggaactgtcttggtgggtcaacggcaaagaggtgcacagcggcgtgtctaccgacccccagccactgaaagaacagcccgccctgaacgacagccggtactgcctgagcagcagactgagagtgtccgccaccttctggcagaacccccggaaccacttcagatgccaggtgcagttctacggcctgagcgagaacgacgagtggacccaggacagagccaagcccgtgacccagatcgtgtctgccgaagcctggggcagagccgattgcggatccatgagcggaatcagcggctgccctttctttctgtggggactgctggctctgctgggactcgccctggttatcagcctgatcttcaacatcagccactacgtggaaaagcagcggcaggacaagatgtactcctacagcagcgaccacaccagagtggacgagtactacatcgaggacacccctatctacggcaacctggacgacatgatctccgagcctatggacgagaactgctacgagcagatgaaggccagacctgagaagtccgtgaacaagatgcaagaggccacaccttccgctcaggccaccaacgagacacagatgtgttacgccagcctggaccacagcgtgaagggcaagagaagaaagccccggaagcagaacacccacttcagcgacaaggatggcgacgaacagctgcacgccattgatgccagcgtgtccaagaccacactggtggacagcttcagccctgagtctcaggccgtggaagagaacatccacgacgaccccatcagactgttcggactgatccgggccaagagagagcctattaacagggccaagcgatctggatctggagcaacaaacttctcactactcaaacaagcaggtgacgtggaggagaatcccgggcctactagtatggactggatttggcgcatccttttccttgtcggcgctgctaccggcgcgcattccttcgaacaagttcagcttcaacagcctggcgctgagctggtcaaacctggcgcttctgtgaagatgagctgcaaagccagcggctacgccttcagcagctactggatcaactggatgaagcagaaacccggccagggactcgaatggatcggccaaatctatcccggcgacggcgacaccaactacaacggcaagttcaagggcagagccacactgaccgccgatacctctagcagcacagcctacatgcagctgagcagcctgaccagcgaagatagcgccgtgtacttctgtgcccggtccatcacaacagtcgtgggctgcgctatggactattggggccagggaacaagcgtgaccgtgtctagtacgcgtatccagaaccctgatcctgccgtgtaccagctgcgggatagcaagagcagcgacaagagcgtgtgtctgttcaccgacttcgacagccagaccaacgtgtcccagagcaaggactccgacgtgtacatcaccgataagaccgtgctggacatgcggagcatggacttcaagagcaactccgccgtggcctggtccaacaagtccgatttcgcctgcgccaacgccttcaacaacagcattatccccgaggacacattcttcccaagccccgagagcagctgcggtacccagagttttgggttgttggaccctaaattgtgctatctgttggacggaatcctgttcatttacggagtgatcctgaccgcattgttcctgcgggttaagttttccagatccgcagacgcacccgcttaccaacaagggcagaaccaactctacaatgaacttaatttggggcggagggaagagtacgacgttctggacaaaaggaggggacgagatcccgagatgggcggaaagcctcagcgaaggaagaatccgcaagaggggctttataacgaactccagaaagataaaatggcagaagcctatagtgagattgggatgaagggagaaaggaggaggggtaaaggtcacgatgggttgtaccaaggattgagcacagccactaaagatacctatgatgcgctccacatgcaggccctgccgccaagataa

SEQ ID NO: 1085 - DNA, 2352 bp, synthetic construct
  source 1..2352: mol_type = other DNA
atggccttaccagtgaccgccttgctcctgccgctggccttgctgctccacgccgccaggccggaattcaatgctggcgtgacccagacacctaagttccaggtgctgaaaaccggccagagcatgaccctgcaatgcgcccaggacatgaaccatgagtacatgagctggtacagacaggaccccggcatgggcctgagactgatccactactctgtggctatccagaccaccgaccagggcgaagtgcccaatggctacaacgtgtccagaagcaccatcgaggacttcccactgagactgctgtctgccgctcctagccagaccagcgtgtacttttgtgccagcagctacctgggcaacaccggcgagctgttttttggcgagggcagcagactgaccgtgctcgaggacctgaagaacgtgttcccacctgaggtggccgtgttcgagcctagcgaggccgagatcagccacacccagaaagccaccctcgtgtgcctggctaccggcttctaccccgaccatgtggaactgtcttggtgggtcaacggcaaagaggtgcacagcggcgtgtctaccgacccccagccactgaaagaacagcccgccctgaacgacagccggtactgcctgagcagcagactgagagtgtccgccaccttctggcagaacccccggaaccacttcagatgccaggtgcagttctacggcctgagcgagaacgacgagtggacccaggacagagccaagcccgtgacccagatcgtgtctgccgaagcctggggcagagccgattgcggatccctgggagagcctcagctgtgctatatcctggacgccatcctgtttctgtacggcatcgtgctgaccctgctgtactgcaaacggggcagaaagaaactcctgtatatattcaaacaaccatttatgagaccagtacaaactactcaagaggaagatggctgtagctgccgatttccagaagaagaagaaggaggatgtgaactgcggctgaagatccaagtgcggaaggccgccatcaccagctacgagaaatccgacggcgtgtacaccggcctgagcaccagaaatcaagagacatacgagacactgaagcacgaaaagcctccacaaagggccaagcgatctggatctggagcaacaaacttctcactactcaaacaagcaggtgacgtggaggagaatcccgggcctactagtatggactggatttggcgcatccttttccttgtcggcgctgctaccggcgcgcattccttcgaacaagaagtgacacagatccctgccgctctgtctgtgcctgagggcgaaaacctggtgctgaactgctccttcaccgacagcgccatctacaacctccagtggttcaggcaggaccctggaaagggactgacaagcctgctgctgatccagagcagccagagagagcagacctccggcagactgaatgccagcctggataagagcagcggcaggtctaccctgtatatcgccgcttctcagcctggcgatagcgccacatatctgtgtgctgtgcggcctacaagcggcggcagctacatccctacatttggcagaggcaccagcctgatcgtgcacccttatacgcgtatccagaaccctgatcctgccgtgtaccagctgcgggatagcaagagcagcgacaagagcgtgtgtctgttcaccgacttcgacagccagaccaacgtgtcccagagcaaggactccgacgtgtacatcaccgataagaccgtgctggacatgcggagcatggacttcaagagcaactccgccgtggcctggtccaacaagtccgatttcgcctgcgccaacgccttcaacaacagcattatccccgaggacacattcttcccaagccccgagagcagctgcggtaccctcggagaaccacagctctgttacattctggatgctatcctgttcctctatgggatcgtcctgacactcctgtattgcaagagaggccggaagaagctgctgtacatcttcaagcagcctttcatgcggcccgtgcagaccacccaggaagaggacggctgctcctgccggttccccgaggaagaagaaggcggctgcgagctgagactcaaaattcaagttcgcaaagccgccattacctcttacgagaagagtgatggggtgtacacaggactgtctacccggaatcaagaaacctacgaaaccctcaaacatgagaagccacctcagcgcgccaagagaagcggatctggcgtgaagcagaccctgaatttcgacctgctgaagctggctggcgacgtggaatccaacccaggcccttctagataa

SEQ ID NO: 1086 - DNA, 2355 bp, synthetic construct
  source 1..2355: mol_type = other DNA
atggccttaccagtgaccgccttgctcctgccgctggccttgctgctccacgccgccaggccggacatccagatgacacagagccctagcagcctgtctgccagcgtgggagacagagtgaccatcacatgcaaggccagcgaccacatcaacaactggctggcctggtatcagcagaagcctggacaggcccctaagctgctgatctacggcgctaccacactggaaacaggcgtgcccagcagattttctggcagcggctctggcaccgactacaccctgacaatatccagcctccagcctgaggacttcgccacctactactgtcagcagagctggaacaccccttggacattcggccagggcaccaagctggaaatcaagagactcgaggacctgaagaacgtgttcccacctgaggtggccgtgttcgagcctagcgaggccgagatcagccacacccagaaagccaccctcgtgtgcctggctaccggcttctaccccgaccatgtggaactgtcttggtgggtcaacggcaaagaggtgcacagcggcgtgtctaccgacccccagccactgaaagaacagcccgccctgaacgacagccggtactgcctgagcagcagactgagagtgtccgccaccttctggcagaacccccggaaccacttcagatgccaggtgcagttctacggcctgagcgagaacgacgagtggacccaggacagagccaagcccgtgacccagatcgtgtctgccgaagcctggggcagagccgattgcggatccctgggagagcctcagctgtgctatatcctggacgccatcctgtttctgtacggcatcgtgctgaccctgctgtactgcaaacggggcagaaagaaactcctgtatatattcaaacaaccatttatgagaccagtacaaactactcaagaggaagatggctgtagctgccgatttccagaagaagaagaaggaggatgtgaactgcggctgaagatccaagtgcggaaggccgccatcaccagctacgagaaatccgacggcgtgtacaccggcctgagcaccagaaatcaagagacatacgagacactgaagcacgaaaagcctccacaaagggccaagcgatctggatctggagcaacaaacttctcactactcaaacaagcaggtgacgtggaggagaatcccgggcctactagtatggactggatttggcgcatccttttccttgtcggcgctgctaccggcgcgcattccttcgaacaagttcagcttcaacagcctggcgctgagctggtcaaacctggcgcttctgtgaagatgagctgcaaagccagcggctacgccttcagcagctactggatcaactggatgaagcagaaacccggccagggactcgaatggatcggccaaatctatcccggcgacggcgacaccaactacaacggcaagttcaagggcagagccacactgaccgccgatacctctagcagcacagcctacatgcagctgagcagcctgaccagcgaagatagcgccgtgtacttctgtgcccggtccatcacaacagtcgtgggctgcgctatggactattggggccagggaacaagcgtgaccgtgtctagtacgcgtatccagaaccctgatcctgccgtgtaccagctgcgggatagcaagagcagcgacaagagcgtgtgtctgttcaccgacttcgacagccagaccaacgtgtcccagagcaaggactccgacgtgtacatcaccgataagaccgtgctggacatgcggagcatggacttcaagagcaactccgccgtggcctggtccaacaagtccgatttcgcctgcgccaacgccttcaacaacagcattatccccgaggacacattcttcccaagccccgagagcagctgcggtaccctcggagaaccacagctctgttacattctggatgctatcctgttcctctatgggatcgtcctgacactcctgtattgcaagagaggccggaagaagctgctgtacatcttcaagcagcctttcatgcggcccgtgcagaccacccaggaagaggacggctgctcctgccggttccccgaggaagaagaaggcggctgcgagctgagactcaaaattcaagttcgcaaagccgccattacctcttacgagaagagtgatggggtgtacacaggactgtctacccggaatcaagaaacctacgaaaccctcaaacatgagaagccacctcagcgcgccaagagaagcggatctggcgtgaagcagaccctgaatttcgacctgctgaagctggctggcgacgtggaatccaacccaggcccttctagataa

SEQ ID NO: 1087 - DNA, 2355 bp, synthetic construct
  source 1..2355: mol_type = other DNA
atggccttaccagtgaccgccttgctcctgccgctggccttgctgctccacgccgccaggccggacatccagatgacacagagccctagcagcctgtctgccagcgtgggagacagagtgaccatcacatgcaaggccagcgaccacatcaacaactggctggcctggtatcagcagaagcctggacaggcccctaagctgctgatctacggcgctaccacactggaaacaggcgtgcccagcagattttctggcagcggctctggcaccgactacaccctgacaatatccagcctccagcctgaggacttcgccacctactactgtcagcagagctggaacaccccttggacattcggccagggcaccaagctggaaatcaagagactcgaggacctgaagaacgtgttcccacctgaggtggccgtgttcgagcctagcgaggccgagatcagccacacccagaaagccaccctcgtgtgcctggctaccggcttctaccccgaccatgtggaactgtcttggtgggtcaacggcaaagaggtgcacagcggcgtgtctaccgacccccagccactgaaagaacagcccgccctgaacgacagccggtactgcctgagcagcagactgagagtgtccgccaccttctggcagaacccccggaaccacttcagatgccaggtgcagttctacggcctgagcgagaacgacgagtggacccaggacagagccaagcccgtgacccagatcgtgtctgccgaagcctggggcagagccgattgcggatccctgggagagcctcagctgtgctatatcctggacgccatcctgtttctgtacggcatcgtgctgaccctgctgtactgccggctgaagatccaagtgcggaaggccgccatcaccagctacgagaaatccgacggcgtgtacaccggcctgagcaccagaaatcaagagacatacgagacactgaagcacgaaaagcctccacaaaaacggggcagaaagaaactcctgtatatattcaaacaaccatttatgagaccagtacaaactactcaagaggaagatggctgtagctgccgatttccagaagaagaagaaggaggatgtgaactgagggccaagcgatctggatctggagcaacaaacttctcactactcaaacaagcaggtgacgtggaggagaatcccgggcctactagtatggactggatttggcgcatccttttccttgtcggcgctgctaccggcgcgcattccttcgaacaagttcagcttcaacagcctggcgctgagctggtcaaacctggcgcttctgtgaagatgagctgcaaagccagcggctacgccttcagcagctactggatcaactggatgaagcagaaacccggccagggactcgaatggatcggccaaatctatcccggcgacggcgacaccaactacaacggcaagttcaagggcagagccacactgaccgccgatacctctagcagcacagcctacatgcagctgagcagcctgaccagcgaagatagcgccgtgtacttctgtgcccggtccatcacaacagtcgtgggctgcgctatggactattggggccagggaacaagcgtgaccgtgtctagtacgcgtatccagaaccctgatcctgccgtgtaccagctgcgggatagcaagagcagcgacaagagcgtgtgtctgttcaccgacttcgacagccagaccaacgtgtcccagagcaaggactccgacgtgtacatcaccgataagaccgtgctggacatgcggagcatggacttcaagagcaactccgccgtggcctggtccaacaagtccgatttcgcctgcgccaacgccttcaacaacagcattatccccgaggacacattcttcccaagccccgagagcagctgcggtaccctcggagaaccacagctctgttacattctggatgctatcctgttcctctatgggatcgtcctgacactcctgtattgcagactcaaaattcaagttcgcaaagccgccattacctcttacgagaagagtgatggggtgtacacaggactgtctacccggaatcaagaaacctacgaaaccctcaaacatgagaagccacctcagaagagaggccggaagaagctgctgtacatcttcaagcagcctttcatgcggcccgtgcagaccacccaggaagaggacggctgctcctgccggttccccgaggaagaagaaggcggctgcgagctgcgcgccaagagaagcggatctggcgtgaagcagaccctgaatttcgacctgctgaagctggctggcgacgtggaatccaacccaggcccttctagataa

SEQ ID NO: 1088 - DNA, 2892 bp, synthetic construct; identical to SEQ ID NO: 1019
  source 1..2892: mol_type = other DNA

SEQ ID NO: 1089 - DNA, 2211 bp, synthetic construct; identical to SEQ ID NO: 1018
  source 1..2211: mol_type = other DNA

SEQ ID NO: 1090 - DNA, 2874 bp, synthetic construct
  source 1..2874: mol_type = other DNA
atggccttaccagtgaccgccttgctcctgccgctggccttgctgctccacgccgccaggccggacgagatcgtgctgacacagagccctggaagcctggccgtgtctcctggcgagcgcgtgacaatgagctgcaagagcagccagagcgtgttcttcagcagctcccagaagaactacctggcctggtatcagcagatccccggccagagccccagactgctgatctactgggccagcaccagagaaagcggcgtgcccgatagattcaccggcagcggctctggcaccgacttcaccctgacaatcagcagcgtgcagcccgaggacctggctatctactactgccaccagtacctgagcagccggaccttcggccagggcaccaagctggaaatcaagagactcgaggacctgaagaacgtgttcccacctgaggtggccgtgttcgagcctagcgaggccgagatcagccacacccagaaagccaccctcgtgtgcctggctaccggcttctaccccgaccatgtggaactgtcttggtgggtcaacggcaaagaggtgcacagcggcgtgtctaccgacccccagccactgaaagaacagcccgccctgaacgacagccggtactgcctgagcagcagactgagagtgtccgccaccttctggcagaacccccggaaccacttcagatgccaggtgcagttctacggcctgagcgagaacgacgagtggacccaggacagagccaagcccgtgacccagatcgtgtctgccgaagcctggggcagagccgattgcggatcccagagcttcggcctgctggaccccaagctgtgctacctgctggatggcatcctgttcatctacggcgtgatcctgaccgccctgttcctgagagtgaagttcagcagaagcgccgacgcccctgcctaccagcagggacagaaccaactgtacaacgagctgaacctgggcagacgggaagagtacgacgtgctggacaagcggagaggcagggaccctgagatgggcggaaagccccagcggagaaagaacccccaggaaggactgtataacgaactccagaaagacaagatggccgaagcctacagcgagatcggcatgaagggcgagcggagaagaggcaagggccacgatggcctgtaccagggcctgagcaccgccaccaaggacacctatgacgccctgcacatgcaggccctgcctccaagaagggccaagcgatctggatctggagcaacaaacttctcactactcaaacaagcaggtgacgtggaggagaatcccgggcctactagtgccaccatggactggatttggcgcatccttttccttgtcggcgctgctaccggcgcccattccgggcccgaggtgcagctggttgaatctggcggaggactggttcaggctggcggatctctgagactgtcttgtgccgccagcggctctgtgttcagcggcaatgtgatgggctggtacagacaggcccctggcaaagaaagagagtgggttgccgccattgccagcggcggcagcatctactacagagactctgtgaagggcagattcaccatcagccgggacaacgccaagaacaccgtgtacctccagatgaacagcctgaagcctgaggacaccgccgtgtactactgcaactctcaccctcctacactgccctattggggcctgggaacccaagtgacagtgtcctctggatccggcggcggaggatctggcggaggcggatctgggggcggaggctctttcgaacaggtgcaactgcagcagcctggcgctgaggtcgtgaagccaggcgcttccgtgaagatgtcctgcaaggccagcggctacaccttcaccagctactacatccactggatcaagcagacccctggacagggcctggaatgggtgggagtgatctaccccggcaacgacgacatcagctacaaccagaagttccagggcaaggccaccctgaccgccgacaagtctagcaccaccgcctacatgcaactgtccagcctgaccagcgaggacagcgccgtgtactactgcgccagagaagtgcggctgcggtacttcgatgtgtggggccagggaaccaccgtgaccgtgtcatctacgcgtatccagaaccctgatcctgccgtgtaccagctgcgggatagcaagagcagcgacaagagcgtgtgtctgttcaccgacttcgacagccagaccaacgtgtcccagagcaaggactccgacgtgtacatcaccgataagaccgtgctggacatgcggagcatggacttcaagagcaactccgccgtggcctggtccaacaagtccgatttcgcctgcgccaacgccttcaacaacagcattatccccgaggacacattcttcccaagccccgagagcagctgcggtacccagagttttgggttgttggaccctaaattgtgctatctgttggacggaatcctgttcatttacggagtgatcctgaccgcattgttcctgcgggttaagttttccagatccgcagacgcacccgcttaccaacaagggcagaaccaactctacaatgaacttaatttggggcggagggaagagtacgacgttctggacaaaaggaggggacgagatcccgagatgggcggaaagcctcagcgaaggaagaatccgcaagaggggctttataacgaactccagaaagataaaatggcagaagcctatagtgagattgggatgaagggagaaaggaggaggggtaaaggtcacgatgggttgtaccaaggattgagcacagccactaaagatacctatgatgcgctccacatgcaggccctgccgccaagataa

SEQ ID NO: 1091 - DNA, 2544 bp, synthetic construct
  source 1..2544: mol_type = other DNA
atggccttaccagtgaccgccttgctcctgccgctggccttgctgctccacgccgccaggccggacatccagatgacacagagccctagcagcctgtctgccagcgtgggagacagagtgaccatcacatgcaaggccagcgaccacatcaacaactggctggcctggtatcagcagaagcctggacaggcccctaagctgctgatctacggcgctaccacactggaaacaggcgtgcccagcagattttctggcagcggctctggcaccgactacaccctgacaatatccagcctccagcctgaggacttcgccacctactactgtcagcagagctggaacaccccttggacattcggccagggcaccaagctggaaatcaagagactcgaggacctgaagaacgtgttcccacctgaggtggccgtgttcgagcctagcgaggccgagatcagccacacccagaaagccaccctcgtgtgcctggctaccggcttctaccccgaccatgtggaactgtcttggtgggtcaacggcaaagaggtgcacagcggcgtgtctaccgacccccagccactgaaagaacagcccgccctgaacgacagccggtactgcctgagcagcagactgagagtgtccgccaccttctggcagaacccccggaaccacttcagatgccaggtgcagttctacggcctgagcgagaacgacgagtggacccaggacagagccaagcccgtgacccagatcgtgtctgccgaagcctggggcagagccgattgcggatccgaccagtgcactgatctgctggccctgggaatccccagcatcacacaggcttggggactgtgggttctgctgggagctgtgaccctgctgttcctgatttctctggccgctcacctgagccagtggaccagaggaagaagcagaagtcacccaggccagggaagatccggcgagtctgtggaagaggtgcccctgtatggcaacctgcactacctccagaccggcagactgtctcaggacccagaaccagatcagcaggaccctacactcggaggacctgccagagctgccgaggaagtgatgtgttacaccagcctccagctgcggcctcctcagggaagaatacctggacctggcacacccgtgaagtacagcgaagtggtgctggacagcgagcccaagtctcaggcttctggacctgagcctgagctgtacgcctctgtgtgtgctcagaccagaagggccagagccagctttccagatcaggcttacgccaactctcagcctgctgcttctagggccaagcgatctggatctggagcaacaaacttctcactactcaaacaagcaggtgacgtggaggagaatcccgggcctactagtatggactggatttggcgcatccttttccttgtcggcgctgctaccggcgcgcattccttcgaacaagttcagcttcaacagcctggcgctgagctggtcaaacctggcgcttctgtgaagatgagctgcaaagccagcggctacgccttcagcagctactggatcaactggatgaagcagaaacccggccagggactcgaatggatcggccaaatctatcccggcgacggcgacaccaactacaacggcaagttcaagggcagagccacactgaccgccgatacctctagcagcacagcctacatgcagctgagcagcctgaccagcgaagatagcgccgtgtacttctgtgcccggtccatcacaacagtcgtgggctgcgctatggactattggggccagggaacaagcgtgaccgtgtctagtacgcgtatccagaaccctgatcctgccgtgtaccagctgcgggatagcaagagcagcgacaagagcgtgtgtctgttcaccgacttcgacagccagaccaacgtgtcccagagcaaggactccgacgtgtacatcaccgataagaccgtgctggacatgcggagcatggacttcaagagcaactccgccgtggcctggtccaacaagtccgatttcgcctgcgccaacgccttcaacaacagcattatccccgaggacacattcttcccaagccccgagagcagctgcggtacccagagttttgggttgttggaccctaaattgtgctatctgttggacggaatcctgttcatttacggagtgatcctgaccgcattgttcctgcgggttaagttttccagatccgcagacgcacccgcttaccaacaagggcagaaccaactctacaatgaacttaatttggggcggagggaagagtacgacgttctggacaaaaggaggggacgagatcccgagatgggcggaaagcctcagcgaaggaagaatccgcaagaggggctttataacgaactccagaaagataaaatggcagaagcctatagtgagattgggatgaagggagaaaggaggaggggtaaaggtcacgatgggttgtaccaaggattgagcacagccactaaagatacctatgatgcgctccacatgcaggccctgccgccaagataa

SEQ ID NO: 1092 - DNA, 2358 bp, synthetic construct
  source 1..2358: mol_type = other DNA
atggccttaccagtgaccgccttgctcctgccgctggccttgctgctccacgccgccaggccggacatccagatgacacagagccctagcagcctgtctgccagcgtgggagacagagtgaccatcacatgcaaggccagcgaccacatcaacaactggctggcctggtatcagcagaagcctggacaggcccctaagctgctgatctacggcgctaccacactggaaacaggcgtgcccagcagattttctggcagcggctctggcaccgactacaccctgacaatatccagcctccagcctgaggacttcgccacctactactgtcagcagagctggaacaccccttggacattcggccagggcaccaagctggaaatcaagagactcgaggacctgaagaacgtgttcccacctgaggtggccgtgttcgagcctagcgaggccgagatcagccacacccagaaagccaccctcgtgtgcctggctaccggcttctaccccgaccatgtggaactgtcttggtgggtcaacggcaaagaggtgcacagcggcgtgtctaccgacccccagccactgaaagaacagcccgccctgaacgacagccggtactgcctgagcagcagactgagagtgtccgccaccttctggcagaacccccggaaccacttcagatgccaggtgcagttctacggcctgagcgagaacgacgagtggacccaggacagagccaagcccgtgacccagatcgtgtctgccgaagcctggggcagagccgattgcggatccctgggagagcctcagctgtgctatatcctggacgccatcctgtttctgtacggcatcgtgctgaccctgctgtactgcaaacggggcagaaagaaactcctgtatatattcaaacaaccatttatgagaccagtacaaactactcaagaggaagatggctgtagctgccgatttccagaagaagaagaaggaggatgtgaactgcggctgaagatccaagtgcggaaggccgccatcaccagctacgagaaatccgacggcgtgtacaccggcctgagcaccagaaatcaagagacatacgagacactgaagcacgaaaagcctccacaaagggccaagcgatctggatctggagcaacaaacttctcactactcaaacaagcaggtgacgtggaggagaatcccgggcctactagtatggactggatttggcgcatccttttccttgtcggcgctgctaccggcgcgcattccttcgaacaagttcagcttcaacagcctggcgctgagctggtcaaacctggcgcttctgtgaagatgagctgcaaagccagcggctacgccttcagcagctactggatcaactggatgaagcagaaacccggccagggactcgaatggatcggccaaatctatcccggcgacggcgacaccaactacaacggcaagttcaagggcagagccacactgaccgccgatacctctagcagcacagcctacatgcagctgagcagcctgaccagcgaagatagcgccgtgtacttctgtgcccggtccatcacaacagtcgtgggctgcgctatggactattggggccagggaacaagcgtgaccgtgtctagtacgcgtatccagaaccctgatcctgccgtgtaccagctgcgggatagcaagagcagcgacaagagcgtgtgtctgttcaccgacttcgacagccagaccaacgtgtcccagagcaaggactccgacgtgtacatcaccgataagaccgtgctggacatgcggagcatggacttcaagagcaactccgccgtggcctggtccaacaagtccgatttcgcctgcgccaacgccttcaacaacagcattatccccgaggacacattcttcccaagccccgagagcagctgcggtacccagagttttgggttgttggaccctaaattgtgctatctgttggacggaatcctgttcatttacggagtgatcctgaccgcattgttcctgcgggttaagttttccagatccgcagacgcacccgcttaccaacaagggcagaaccaactctacaatgaacttaatttggggcggagggaagagtacgacgttctggacaaaaggaggggacgagatcccgagatgggcggaaagcctcagcgaaggaagaatccgcaagaggggctttataacgaactccagaaagataaaatggcagaagcctatagtgagattgggatgaagggagaaaggaggaggggtaaaggtcacgatgggttgtaccaaggattgagcacagccactaaagatacctatgatgcgctccacatgcaggccctgccgccaagataa

SEQ ID NO: 1093 - DNA, 2811 bp, synthetic construct
  source 1..2811: mol_type = other DNA
atggccttaccagtgaccgccttgctcctgccgctggccttgctgctccacgccgccaggccggacatccagatgacacagagccctagcagcctgtctgccagcgtgggagacagagtgaccatcacatgcaaggccagcgaccacatcaacaactggctggcctggtatcagcagaagcctggacaggcccctaagctgctgatctacggcgctaccacactggaaacaggcgtgcccagcagattttctggcagcggctctggcaccgactacaccctgacaatatccagcctccagcctgaggacttcgccacctactactgtcagcagagctggaacaccccttggacattcggccagggcaccaagctggaaatcaagagactcgaggacctgaagaacgtgttcccacctgaggtggccgtgttcgagcctagcgaggccgagatcagccacacccagaaagccaccctcgtgtgcctggctaccggcttctaccccgaccatgtggaactgtcttggtgggtcaacggcaaagaggtgcacagcggcgtgtgtaccgacccccagccactgaaagaacagcccgccctgaacgacagccggtactgcctgagcagcagactgagagtgtccgccaccttctggcagaacccccggaaccacttcagatgccaggtgcagttctacggcctgagcgagaacgacgagtggacccaggacagagccaagcccgtgacccagatcgtgtctgccgaagcctggggcagagccgattgcggctttaccagcgagagctaccagcagggcgtgctgagcgccaccatcctgtacgagatcctgctgggcaaggccaccctgtacgccgtgctggtgtctgccctggtgctgatggctatggtcaagcggaaggacagccggggaagggccaagcgatctggatctggagcaacaaacttctcactactcaaacaagcaggtgacgtggaggagaatcccgggcctactagtgccaccatggactggatttggcgcatccttttccttgtcggcgctgctaccggcgcccattccgggcccggaggcagctttaacgttctgatggtccaccgccgcagccatacaggcgaaagacctttccaatgcaaccagtgcggggcctcttttacccagaggggaaacctgctgagacacattcggctgcacaccggggaaagacccttcaggtgtcacctgtgtaactatgcctgtcagcggcgggatgctctgacagcttctgctgaagcccgccacatcagagctgagatgggattcgaacaagttcagcttcaacagcctggcgctgagctggtcaaacctggcgcttctgtgaagatgagctgcaaagccagcggctacgccttcagcagctactggatcaactggatgaagcagaaacccggccagggactcgaatggatcggccaaatctatcccggcgacggcgacaccaactacaacggcaagttcaagggcagagccacactgaccgccgatacctctagcagcacagcctacatgcagctgagcagcctgaccagcgaagatagcgccgtgtacttctgtgcccggtccatcacaacagtcgtgggctgcgctatggactattggggccagggaacaagcgtgaccgtgtctagtacgcgtatccagaaccctgatcctgccgtgtaccagctgcgggatagcaagagcagcgacaagagcgtgtgtctgttcaccgacttcgacagccagaccaacgtgtcccagagcaaggactccgacgtgtacatcaccgataagtgcgtgctggacatgcggagcatggacttcaagagcaactccgccgtggcctggtccaacaagtccgatttcgcctgcgccaacgccttcaacaacagcattatccccgaggacacattcttcccaagccccgagagcagctgcgacgtgaagctggtggaaaagagcttcgagacagacaccaacctgaacttccagaacctgagcgtgatcggcttcagaatcctgctgctgaaagtggccggctttaacctgctgatgaccctgcggctgtggtccagccgcgccaagagaagcggatctggcgtgaagcagaccctgaatttcgacctgctgaagctggctggcgacgtggaatccaacccaggcccttctagaggccatatgaccgagtacaagcccacggtgcgcctcgccacccgcgacgacgtccccagggccgtacgcaccctcgccgccgcgttcgccgactaccccgccacgcgccacaccgtcgatccggaccgccacatcgagcgggtcaccgagctgcaagaactcttcctcacgcgcgtcgggctcgacatcggcaaggtgtgggtcgcggacgacggcgccgcggtggcggtctggaccacgccggagagcgtcgaagcgggggcggtgttcgccgagatcggcccgcgcatggccgagttgagcggttcccggctggccgcgcagcaacagatggaaggcctcctggcgccgcaccggcccaaggagcccgcgtggttcctggccaccgtcggcgtctcgcccgaccaccagggcaagggtctgggcagcgccgtcgtgctccccggagtggaggcggccgagcgcgccggggtgcccgccttcctggagacctccgcgccccgcaacctccccttctacgagcggctcggcttcaccgtcaccgccgacgtcgaggtgcccgaaggaccgcgcacctggtgcatgacccgcaagcccggtgcctga

SEQ ID NO: 1094 - DNA, 2922 bp, synthetic construct
  source 1..2922: mol_type = other DNA
atggccttaccagtgaccgccttgctcctgccgctggccttgctgctccacgccgccaggccggacatccagatgacacagagccctagcagcctgtctgccagcgtgggagacagagtgaccatcacatgcaaggccagcgaccacatcaacaactggctggcctggtatcagcagaagcctggacaggcccctaagctgctgatctacggcgctaccacactggaaacaggcgtgcccagcagattttctggcagcggctctggcaccgactacaccctgacaatatccagcctccagcctgaggacttcgccacctactactgtcagcagagctggaacaccccttggacattcggccagggcaccaagctggaaatcaagagactcgaggacctgaagaacgtgttcccacctgaggtggccgtgttcgagcctagcgaggccgagatcagccacacccagaaagccaccctcgtgtgcctggctaccggcttctaccccgaccatgtggaactgtcttggtgggtcaacggcaaagaggtgcacagcggcgtgtgtaccgacccccagccactgaaagaacagcccgccctgaacgacagccggtactgcctgagcagcagactgagagtgtccgccaccttctggcagaacccccggaaccacttcagatgccaggtgcagttctacggcctgagcgagaacgacgagtggacccaggacagagccaagcccgtgacccagatcgtgtctgccgaagcctggggcagagccgattgcggctttaccagcgagagctaccagcagggcgtgctgagcgccaccatcctgtacgagatcctgctgggcaaggccaccctgtacgccgtgctggtgtctgccctggtgctgatggctatggtcaagcggaaggacagccggggaagggccaagcgatctggatctggagcaacaaacttctcactactcaaacaagcaggtgacgtggaggagaatcccgggcctactagtgccaccatggactggatttggcgcatccttttccttgtcggcgctgctaccggcgcccattccgggcccagcggcggaggcagcctggaaggcgttcaggtggaaacaatcagccctggcgacggcagaacattccctaagaggggccagacctgcgtggtgcactacaccggaatgctggaagatggcaagaaggtggacagcagccgggacagaaacaagcccttcaagttcatgctgggcaagcaagaagtgattcgcggctgggaagagggcgtcgcacagatgtctgttggacagagagccaagctgaccatctctcccgactacgcctatggcgctacaggacaccctggcatcattcctccacacgccacactggtgttcgacgtggaactgctgaagctggaattcgaacaagttcagcttcaacagcctggcgctgagctggtcaaacctggcgcttctgtgaagatgagctgcaaagccagcggctacgccttcagcagctactggatcaactggatgaagcagaaacccggccagggactcgaatggatcggccaaatctatcccggcgacggcgacaccaactacaacggcaagttcaagggcagagccacactgaccgccgatacctctagcagcacagcctacatgcagctgagcagcctgaccagcgaagatagcgccgtgtacttctgtgcccggtccatcacaacagtcgtgggctgcgctatggactattggggccagggaacaagcgtgaccgtgtctagtacgcgtatccagaaccctgatcctgccgtgtaccagctgcgggatagcaagagcagcgacaagagcgtgtgtctgttcaccgacttcgacagccagaccaacgtgtcccagagcaaggactccgacgtgtacatcaccgataagtgcgtgctggacatgcggagcatggacttcaagagcaactccgccgtggcctggtccaacaagtccgatttcgcctgcgccaacgccttcaacaacagcattatccccgaggacacattcttcccaagccccgagagcagctgcgacgtgaagctggtggaaaagagcttcgagacagacaccaacctgaacttccagaacctgagcgtgatcggcttcagaatcctgctgctgaaagtggccggctttaacctgctgatgaccctgcggctgtggtccagccgcgccaagagaagcggatctggcgtgaagcagaccctgaatttcgacctgctgaagctggctggcgacgtggaatccaacccaggcccttctagaggccatatgaccgagtacaagcccacggtgcgcctcgccacccgcgacgacgtccccagggccgtacgcaccctcgccgccgcgttcgccgactaccccgccacgcgccacaccgtcgatccggaccgccacatcgagcgggtcaccgagctgcaagaactcttcctcacgcgcgtcgggctcgacatcggcaaggtgtgggtcgcggacgacggcgccgcggtggcggtctggaccacgccggagagcgtcgaagcgggggcggtgttcgccgagatcggcccgcgcatggccgagttgagcggttcccggctggccgcgcagcaacagatggaaggcctcctggcgccgcaccggcccaaggagcccgcgtggttcctggccaccgtcggcgtctcgcccgaccaccagggcaagggtctgggcagcgccgtcgtgctccccggagtggaggcggccgagcgcgccggggtgcccgccttcctggagacctccgcgccccgcaacctccccttctacgagcggctcggcttcaccgtcaccgccgacgtcgaggtgcccgaaggaccgcgcacctggtgcatgacccgcaagcccggtgcctga

SEQ ID NO: 1095 - DNA, 2973 bp, synthetic construct
  source 1..2973: mol_type = other DNA
atggccttaccagtgaccgccttgctcctgccgctggccttgctgctccacgccgccaggccggacatccagatgacacagagccctagcagcctgtctgccagcgtgggagacagagtgaccatcacatgcaaggccagcgaccacatcaacaactggctggcctggtatcagcagaagcctggacaggcccctaagctgctgatctacggcgctaccacactggaaacaggcgtgcccagcagattttctggcagcggctctggcaccgactacaccctgacaatatccagcctccagcctgaggacttcgccacctactactgtcagcagagctggaacaccccttggacattcggccagggcaccaagctggaaatcaagagactcgaggacctgaagaacgtgttcccacctgaggtggccgtgttcgagcctagcgaggccgagatcagccacacccagaaagccaccctcgtgtgcctggctaccggcttctaccccgaccatgtggaactgtcttggtgggtcaacggcaaagaggtgcacagcggcgtgtgtaccgacccccagccactgaaagaacagcccgccctgaacgacagccggtactgcctgagcagcagactgagagtgtccgccaccttctggcagaacccccggaaccacttcagatgccaggtgcagttctacggcctgagcgagaacgacgagtggacccaggacagagccaagcccgtgacccagatcgtgtctgccgaagcctggggcagagccgattgcggctttaccagcgagagctaccagcagggcgtgctgagcgccaccatcctgtacgagatcctgctgggcaaggccaccctgtacgccgtgctggtgtctgccctggtgctgatggctatggtcaagcggaaggacagccggggaagggccaagcgatctggatctggagcaacaaacttctcactactcaaacaagcaggtgacgtggaggagaatcccgggcctactagtgccaccatggactggatttggcgcatccttttccttgtcggcgctgctaccggcgcccattccgggcccagcggcggaggcagcctggaaggcgttcaggtggaaacaatcagccctggcgacggcagaacattccctaagaggggccagacctgcgtggtgcactacaccggaatgctggaagatggcaagaaggtggacagcagccgggacagaaacaagcccttcaagttcatgctgggcaagcaagaagtgattcgcggctgggaagagggcgtcgcacagatgtctgttggacagagagccaagctgaccatctctcccgactacgcctatggcgctacaggacaccctggcatcattcctccacacgccacactggtgttcgacgtggaactgctgaagctggaaggatccggcggcggaggatctggcggaggcggatctgggggcggaggctctttcgaacaagttcagcttcaacagcctggcgctgagctggtcaaacctggcgcttctgtgaagatgagctgcaaagccagcggctacgccttcagcagctactggatcaactggatgaagcagaaacccggccagggactcgaatggatcggccaaatctatcccggcgacggcgacaccaactacaacggcaagttcaagggcagagccacactgaccgccgatacctctagcagcacagcctacatgcagctgagcagcctgaccagcgaagatagcgccgtgtacttctgtgcccggtccatcacaacagtcgtgggctgcgctatggactattggggccagggaacaagcgtgaccgtgtctagtacgcgtatccagaaccctgatcctgccgtgtaccagctgcgggatagcaagagcagcgacaagagcgtgtgtctgttcaccgacttcgacagccagaccaacgtgtcccagagcaaggactccgacgtgtacatcaccgataagtgcgtgctggacatgcggagcatggacttcaagagcaactccgccgtggcctggtccaacaagtccgatttcgcctgcgccaacgccttcaacaacagcattatccccgaggacacattcttcccaagccccgagagcagctgcgacgtgaagctggtggaaaagagcttcgagacagacaccaacctgaacttccagaacctgagcgtgatcggcttcagaatcctgctgctgaaagtggccggctttaacctgctgatgaccctgcggctgtggtccagccgcgccaagagaagcggatctggcgtgaagcagaccctgaatttcgacctgctgaagctggctggcgacgtggaatccaacccaggcccttctagaggccatatgaccgagtacaagcccacggtgcgcctcgccacccgcgacgacgtccccagggccgtacgcaccctcgccgccgcgttcgccgactaccccgccacgcgccacaccgtcgatccggaccgccacatcgagcgggtcaccgagctgcaagaactcttcctcacgcgcgtcgggctcgacatcggcaaggtgtgggtcgcggacgacggcgccgcggtggcggtctggaccacgccggagagcgtcgaagcgggggcggtgttcgccgagatcggcccgcgcatggccgagttgagcggttcccggctggccgcgcagcaacagatggaaggcctcctggcgccgcaccggcccaaggagcccgcgtggttcctggccaccgtcggcgtctcgcccgaccaccagggcaagggtctgggcagcgccgtcgtgctccccggagtggaggcggccgagcgcgccggggtgcccgccttcctggagacctccgcgccccgcaacctccccttctacgagcggctcggcttcaccgtcaccgccgacgtcgaggtgcccgaaggaccgcgcacctggtgcatgacccgcaagcccggtgcctga

SEQ ID NO: 1096 - DNA, 3408 bp, synthetic construct
  source 1..3408: mol_type = other DNA
atggccttaccagtgaccgccttgctcctgccgctggccttgctgctccacgccgccaggccggacatccagatgacacagagccctagcagcctgtctgccagcgtgggagacagagtgaccatcacatgcaaggccagcgaccacatcaacaactggctggcctggtatcagcagaagcctggacaggcccctaagctgctgatctacggcgctaccacactggaaacaggcgtgcccagcagattttctggcagcggctctggcaccgactacaccctgacaatatccagcctccagcctgaggacttcgccacctactactgtcagcagagctggaacaccccttggacattcggccagggcaccaagctggaaatcaagagactcgaggacctgaagaacgtgttcccacctgaggtggccgtgttcgagcctagcgaggccgagatcagccacacccagaaagccaccctcgtgtgcctggctaccggcttctaccccgaccatgtggaactgtcttggtgggtcaacggcaaagaggtgcacagcggcgtgtctaccgacccccagccactgaaagaacagcccgccctgaacgacagccggtactgcctgagcagcagactgagagtgtccgccaccttctggcagaacccccggaaccacttcagatgccaggtgcagttctacggcctgagcgagaacgacgagtggacccaggacagagccaagcccgtgacccagatcgtgtctgccgaagcctggggcagagccgattgcggatcccagagcttcggcctgctggaccccaagctgtgctacctgctggatggcatcctgttcatctacggcgtgatcctgaccgccctgttcctgagagtgagattcagcagaagcgccgacgcccctgcctaccagcagggacagaaccaactgtacaacgagctgaacctgggcagacgggaagagtacgacgtgctggacagacggagaggcagggaccctgagatgggcggaaagccccagcggagaagaaacccccaggaaggactgtataacgaactccagagagacagaatggccgaagcctacagcgagatcggcatgagaggcgagcggagaagaggcaagggccacgatggcctgtaccagggcctgagcaccgccaccagagacacctatgacgccctgcacatgcaggccctgcctccaagagaattcggtggatctggattcaatgtgctgatggtgcacagaagaagccacaccggcgagaggcccttccagtgtaatcagtgcggagccagcttcacccagagaggcaatctgctgcggcacatcagactgcacacaggcgagcggcctttcagatgccacctgtgcaattacgcctgccagagaagagatgccctgaccgcctctgccgaggccagacatattagagccgaaatgggcagggccaagcgatctggatctggagcaacaaacttctcactactcaaacaagcaggtgacgtggaggagaatcccgggcctactagtatggactggatttggcgcatccttttccttgtcggcgctgctaccggcgcgcattccttcgaacaagttcagcttcaacagcctggcgctgagctggtcaaacctggcgcttctgtgaagatgagctgcaaagccagcggctacgccttcagcagctactggatcaactggatgaagcagaaacccggccagggactcgaatggatcggccaaatctatcccggcgacggcgacaccaactacaacggcaagttcaagggcagagccacactgaccgccgatacctctagcagcacagcctacatgcagctgagcagcctgaccagcgaagatagcgccgtgtacttctgtgcccggtccatcacaacagtcgtgggctgcgctatggactattggggccagggaacaagcgtgaccgtgtctagtacgcgtatccagaaccctgatcctgccgtgtaccagctgcgggatagcaagagcagcgacaagagcgtgtgtctgttcaccgacttcgacagccagaccaacgtgtcccagagcaaggactccgacgtgtacatcaccgataagaccgtgctggacatgcggagcatggacttcaagagcaactccgccgtggcctggtccaacaagtccgatttcgcctgcgccaacgccttcaacaacagcattatccccgaggacacattcttcccaagccccgagagcagctgcggtaccctcggagaaccacagctctgttacattctggatgctatcctgttcctctatgggatcgtcctgacactcctgtattgcagactcaaaattcaagttcgcaaagccgccattacctcttacgagaagagtgatggggtgtacacaggactgtctacccggaatcaagaaacctacgaaaccctcaaacatgagaagccacctcaggggcccggaggcagctttaacgttctgatggtccaccgccgcagccatacaggcgaaagacctttccaatgcaaccagtgcggggcctcttttacccagaggggaaacctgctgagacacattcggctgcacaccggggaaagacccttcaggtgtcacctgtgtaactatgcctgtcagcggcgggatgctctgacagcttctgctgaagcccgccacatcagagctgagatgggacgcgccaagagaagcggatctggcgtgaagcagaccctgaatttcgacctgctgaagctggctggcgacgtggaatccaacccaggcccttctagaggccatatgaccgagtacaagcccacggtgcgcctcgccacccgcgacgacgtccccagggccgtacgcaccctcgccgccgcgttcgccgactaccccgccacgcgccacaccgtcgatccggaccgccacatcgagcgggtcaccgagctgcaagaactcttcctcacgcgcgtcgggctcgacatcggcaaggtgtgggtcgcggacgacggcgccgcggtggcggtctggaccacgccggagagcgtcgaagcgggggcggtgttcgccgagatcggcccgcgcatggccgagttgagcggttcccggctggccgcgcagcaacagatggaaggcctcctggcgccgcaccggcccaaggagcccgcgtggttcctggccaccgtcggcgtctcgcccgaccaccagggcaagggtctgggcagcgccgtcgtgctccccggagtggaggcggccgagcgcgccggggtgcccgccttcctggagacctccgcgccccgcaacctccccttctacgagcggctcggcttcaccgtcaccgccgacgtcgaggtgcccgaaggaccgcgcacctggtgcatgacccgcaagcccggtgcctga

SEQ ID NO: 1097 - DNA, 1479 bp, synthetic construct
  source 1..1479: mol_type = other DNA
atggccttaccagtgaccgccttgctcctgccgctggccttgctgctccacgccgccaggccggacatcgtgatgacacagagccctagcagcctgacagtgacagccggcgagaaagtgaccatgagctgcaagagcagccagagcctgctgaacagcggcaaccagaagaactacctgacctggtatcagcagaagcccggccagcctcctaagctgctgatctactgggccagcaccagagaaagcggcgtgcccgatagattcacaggcagcggcagcggaaccgacttcaccctgacaatcagctctgtgcaggccgaggatctggccgtgtactactgccagaacgactacagctaccctctgacctttggagccggcaccaagctggaacttaaaggcggaggcggatctggcggcggaggtagcggtggcggaggatctcaaattcagctggtgcagtctggccccgagctgaagaaacctggcgagacagtgaagatttcctgcaaggccagcggctacaccttcaccaactacggcatgaactgggtcaagcaggcccctggcaagggcctgaaatggatgggctggatcaacaccaacaccggcgagcctacctacgccgaagagttcaagggcagattcgccttcagcctggaaaccagcgccagcacagcctacctccagatcaacaacctgaagaacgaggacaccgccacctacttttgcgccagactcggcttcggcaacgctatggattattggggccagggcaccagcgtgaccgtttcttctacgcgtaccacgacgccagcgccgcgaccaccaacaccggcgcccaccatcgcgtcgcagcccctgtccctgcgcccagaggcgtgccggccagcggcggggggcgcagtgcacacgagggggctggacttcgcctgtgacatctacatctgggcgcccttggccgggacttgtggggtccttctcctgtcactggttatcaccctttactgcaaacggggcagaaagaaactcctgtatatattcaaacaaccatttatgagaccagtacaaactactcaagaggaagatggctgtagctgccgatttccagaagaagaagaaggaggatgtgaactgagagtgaagttcagcaggagcgcagacgcccccgcgtaccagcagggccagaaccagctctataacgagctgaatctaggacgaagagaggagtacgatgttttggacaagagacgtggccgggaccctgagatggggggaaagccgagaaggaagaaccctcaggaaggcctgtacaatgaactgcagaaagataagatggcggaggcctacagtgagattgggatgaaaggcgagcgccggaggggcaaggggcacgatggcctttaccagggtctcagtacagccaccaaggacacctacgacgcccttcacatgcaggccctgccccctcgctaa

SEQ ID NO: 1098 - DNA, 3423 bp, synthetic construct
  source 1..3423: mol_type = other DNA
atggccttaccagtgaccgccttgctcctgccgctggccttgctgctccacgccgccaggccggcatgcgaggtgcagctggttgaatctggcggaggactggttcagcctggcggatctctgagactgtcttgtgccgccagcggcaacacctacagcaccaattacatggcctggttcagacaggcccctggcaaaggactggaagaggtggccgtgatctacaccagaggcggccacacctattacgtggactctgtgcggggcagattcaccatcagccaggacaacgccaagaacagcctgtacctccagatgaactccctgagagccgaggacaccgccgtgtactattgtgctgccagcagcaggcacagactgggcctgaacaaccccagagactacgactattggggccagggcacactggtcacagtttctagcggtaccggcggaggcggatctggcggcggaggtagcggtggcggaggatctgaattcgacatccagatgacacagagccctagcagcctgtctgccagcgtgggagacagagtgaccatcacatgcaaggccagcgaccacatcaacaactggctggcctggtatcagcagaagcctggacaggcccctaagctgctgatctacggcgctaccacactggaaacaggcgtgcccagcagattttctggcagcggctctggcaccgactacaccctgacaatatccagcctccagcctgaggacttcgccacctactactgtcagcagagctggaacaccccttggacattcggccagggcaccaagctggaaatcaagagactcgaggacctgaagaacgtgttcccacctgaggtggccgtgttcgagcctagcgaggccgagatcagccacacccagaaagccaccctcgtgtgcctggctaccggcttctaccccgaccatgtggaactgtcttggtgggtcaacggcaaagaggtgcacagcggcgtgtgtaccgacccccagccactgaaagaacagcccgccctgaacgacagccggtactgcctgagcagcagactgagagtgtccgccaccttctggcagaacccccggaaccacttcagatgccaggtgcagttctacggcctgagcgagaacgacgagtggacccaggacagagccaagcccgtgacccagatcgtgtctgccgaagcctggggcagagccgattgcggctttaccagcgagagctaccagcagggcgtgctgagcgccaccatcctgtacgagatcctgctgggcaaggccaccctgtacgccgtgctggtgtctgccctggtgctgatggctatggtcaagcggaaggacagccggggaagggccaagcgatctggatctggagcaacaaacttctcactactcaaacaagcaggtgacgtggaggagaatcccgggcctactagtgccaccatggactggatttggcgcatccttttccttgtcggcgctgctaccggcgcccattccgggcccgaagtgcagctggttgaatctggcggaggactggttcaggctggcggatctctgagactgtcttgtgccgccagcggcagaacctttagcatgggctggtttagacaggcccctggcaaagagagagagttcgtcgccgccatcacatactctggcggcagcccttactacgccgactctgtgaagggcagattcaccatcagccgggacaacgccaagaacaccgtgtacctccagatgaacagcctgaagcctgaggacaccgccgtgtactactgcgccgccaatccaacatacggcagcgactggaacgccgagaattggggccagggaacccaagtgacagtgtctagcggatccggcggcggaggatctggcggaggcggatctgggggcggaggctctttcgaacaagttcagcttcaacagcctggcgctgagctggtcaaacctggcgcttctgtgaagatgagctgcaaagccagcggctacgccttcagcagctactggatcaactggatgaagcagaaacccggccagggactcgaatggatcggccaaatctatcccggcgacggcgacaccaactacaacggcaagttcaagggcagagccacactgaccgccgatacctctagcagcacagcctacatgcagctgagcagcctgaccagcgaagatagcgccgtgtacttctgtgcccggtccatcacaacagtcgtgggctgcgctatggactattggggccagggaacaagcgtgaccgtgtctagtacgcgtatccagaaccctgatcctgccgtgtaccagctgcgggatagcaagagcagcgacaagagcgtgtgtctgttcaccgacttcgacagccagaccaacgtgtcccagagcaaggactccgacgtgtacatcaccgataagtgcgtgctggacatgcggagcatggacttcaagagcaactccgccgtggcctggtccaacaagtccgatttcgcctgcgccaacgccttcaacaacagcattatccccgaggacacattcttcccaagccccgagagcagctgcgacgtgaagctggtggaaaagagcttcgagacagacaccaacctgaacttccagaacctgagcgtgatcggcttcagaatcctgctgctgaaagtggccggctttaacctgctgatgaccctgcggctgtggtccagccgcgccaagagaagcggatctggcgtgaagcagaccctgaatttcgacctgctgaagctggctggcgacgtggaatccaacccaggcccttctagaggccatatgaccgagtacaagcccacggtgcgcctcgccacccgcgacgacgtccccagggccgtacgcaccctcgccgccgcgttcgccgactaccccgccacgcgccacaccgtcgatccggaccgccacatcgagcgggtcaccgagctgcaagaactcttcctcacgcgcgtcgggctcgacatcggcaaggtgtgggtcgcggacgacggcgccgcggtggcggtctggaccacgccggagagcgtcgaagcgggggcggtgttcgccgagatcggcccgcgcatggccgagttgagcggttcccggctggccgcgcagcaacagatggaaggcctcctggcgccgcaccggcccaaggagcccgcgtggttcctggccaccgtcggcgtctcgcccgaccaccagggcaagggtctgggcagcgccgtcgtgctccccggagtggaggcggccgagcgcgccggggtgcccgccttcctggagacctccgcgccccgcaacctccccttctacgagcggctcggcttcaccgtcaccgccgacgtcgaggtgcccgaaggaccgcgcacctggtgcatgacccgcaagcccggtgcctga

SEQ ID NO: 1099 - DNA, 3402 bp, synthetic construct
  source 1..3402: mol_type = other DNA
atggccttaccagtgaccgccttgctcctgccgctggccttgctgctccacgccgccaggccggcatgcgaagtgcagctgcttgaaagtggcggcggactgattcagcctggcggatctctgagactgagctgtgccgccagcggcttcaccttttctagccacgccatgacctgggtccgacaggcacctggaaaagggcttgaatgggtgtccgccatcagcggctctggcgattacacacactacgccgacagcgtgaagggcagattcaccatcagcagagacaacagcaagaacaccgtgtacctccagatgaacagcctgagagccgaggacagcgccgtgtattattgcgccaaggatgaggatggcggcagcctgcttggacacagaggacaaggcaccctggtcaccgtttcttccggtaccggcggaggcggatctggcggcggaggtagcggtggcggaggatctgaattcgacatccagatgacacagagccctagcagcctgtctgccagcgtgggagacagagtgaccatcacatgcaaggccagcgaccacatcaacaactggctggcctggtatcagcagaagcctggacaggcccctaagctgctgatctacggcgctaccacactggaaacaggcgtgcccagcagattttctggcagcggctctggcaccgactacaccctgacaatatccagcctccagcctgaggacttcgccacctactactgtcagcagagctggaacaccccttggacattcggccagggcaccaagctggaaatcaagagactcgaggacctgaagaacgtgttcccacctgaggtggccgtgttcgagcctagcgaggccgagatcagccacacccagaaagccaccctcgtgtgcctggctaccggcttctaccccgaccatgtggaactgtcttggtgggtcaacggcaaagaggtgcacagcggcgtgtgtaccgacccccagccactgaaagaacagcccgccctgaacgacagccggtactgcctgagcagcagactgagagtgtccgccaccttctggcagaacccccggaaccacttcagatgccaggtgcagttctacggcctgagcgagaacgacgagtggacccaggacagagccaagcccgtgacccagatcgtgtctgccgaagcctggggcagagccgattgcggctttaccagcgagagctaccagcagggcgtgctgagcgccaccatcctgtacgagatcctgctgggcaaggccaccctgtacgccgtgctggtgtctgccctggtgctgatggctatggtcaagcggaaggacagccggggaagggccaagcgatctggatctggagcaacaaacttctcactactcaaacaagcaggtgacgtggaggagaatcccgggcctactagtaccatggactggatttggcgcatccttttccttgtcggcgctgctaccggcgcccattccgggccccaggtgcagctggttgaatctggtggcggagttgtgcagcctggcagaagcctgagactgtcttgtgccgccagcggctatagaagcagcgtgtgcatgggctggttcagacaggcccctggcaaaggactggaaagagtggccctgatcggcagagatggcagcaccacctacatcgacagcgtgaagggcagattcaccatcagccgggacaacagcaagaacaccctgtacctccagatgaacagcctgagagccgaggacaccgccgtgtactattgtgccagaggactcggctattgggcctgcgagtacaactattggggccagggcacactggtcaccgtttctagcggatccggcggcggaggatctggcggaggcggatctgggggcggaggctctttcgaacaagttcagcttcaacagcctggcgctgagctggtcaaacctggcgcttctgtgaagatgagctgcaaagccagcggctacgccttcagcagctactggatcaactggatgaagcagaaacccggccagggactcgaatggatcggccaaatctatcccggcgacggcgacaccaactacaacggcaagttcaagggcagagccacactgaccgccgatacctctagcagcacagcctacatgcagctgagcagcctgaccagcgaagatagcgccgtgtacttctgtgcccggtccatcacaacagtcgtgggctgcgctatggactattggggccagggaacaagcgtgaccgtgtctagtacgcgtatccagaaccctgatcctgccgtgtaccagctgcgggatagcaagagcagcgacaagagcgtgtgtctgttcaccgacttcgacagccagaccaacgtgtcccagagcaaggactccgacgtgtacatcaccgataagtgcgtgctggacatgcggagcatggacttcaagagcaactccgccgtggcctggtccaacaagtccgatttcgcctgcgccaacgccttcaacaacagcattatccccgaggacacattcttcccaagccccgagagcagctgcgacgtgaagctggtggaaaagagcttcgagacagacaccaacctgaacttccagaacctgagcgtgatcggcttcagaatcctgctgctgaaagtggccggctttaacctgctgatgaccctgcggctgtggtccagccgcgccaagagaagcggatctggcgtgaagcagaccctgaatttcgacctgctgaagctggctggcgacgtggaatccaacccaggcccttctagaggccatatgaccgagtacaagcccacggtgcgcctcgccacccgcgacgacgtccccagggccgtacgcaccctcgccgccgcgttcgccgactaccccgccacgcgccacaccgtcgatccggaccgccacatcgagcgggtcaccgagctgcaagaactcttcctcacgcgcgtcgggctcgacatcggcaaggtgtgggtcgcggacgacggcgccgcggtggcggtctggaccacgccggagagcgtcgaagcgggggcggtgttcgccgagatcggcccgcgcatggccgagttgagcggttcccggctggccgcgcagcaacagatggaaggcctcctggcgccgcaccggcccaaggagcccgcgtggttcctggccaccgtcggcgtctcgcccgaccaccagggcaagggtctgggcagcgccgtcgtgctccccggagtggaggcggccgagcgcgccggggtgcccgccttcctggagacctccgcgccccgcaacctccccttctacgagcggctcggcttcaccgtcaccgccgacgtcgaggtgcccgaaggaccgcgcacctggtgcatgacccgcaagcccggtgcctga

SEQ ID NO: 1100 - DNA, 3414 bp, synthetic construct
  source 1..3414: mol_type = other DNA
atggccttaccagtgaccgccttgctcctgccgctggccttgctgctccacgccgccaggccggcatgcgaagtgcagctgcttgaaagtggcggcggactgattcagcctggcggatctctgagactgagctgtgccgccagcggcttcaccttttctagccacgccatgacctgggtccgacaggcacctggaaaagggcttgaatgggtgtccgccatcagcggctctggcgattacacacactacgccgacagcgtgaagggcagattcaccatcagcagagacaacagcaagaacaccgtgtacctccagatgaacagcctgagagccgaggacagcgccgtgtattattgcgccaaggatgaggatggcggcagcctgcttggacacagaggacaaggcaccctggtcaccgtttcttccggtaccggcggaggcggatctggcggcggaggtagcggtggcggaggatctgaattcgacatccagatgacacagagccctagcagcctgtctgccagcgtgggagacagagtgaccatcacatgcaaggccagcgaccacatcaacaactggctggcctggtatcagcagaagcctggacaggcccctaagctgctgatctacggcgctaccacactggaaacaggcgtgcccagcagattttctggcagcggctctggcaccgactacaccctgacaatatccagcctccagcctgaggacttcgccacctactactgtcagcagagctggaacaccccttggacattcggccagggcaccaagctggaaatcaagagactcgaggacctgaagaacgtgttcccacctgaggtggccgtgttcgagcctagcgaggccgagatcagccacacccagaaagccaccctcgtgtgcctggctaccggcttctaccccgaccatgtggaactgtcttggtgggtcaacggcaaagaggtgcacagcggcgtgtgtaccgacccccagccactgaaagaacagcccgccctgaacgacagccggtactgcctgagcagcagactgagagtgtccgccaccttctggcagaacccccggaaccacttcagatgccaggtgcagttctacggcctgagcgagaacgacgagtggacccaggacagagccaagcccgtgacccagatcgtgtctgccgaagcctggggcagagccgattgcggctttaccagcgagagctaccagcagggcgtgctgagcgccaccatcctgtacgagatcctgctgggcaaggccaccctgtacgccgtgctggtgtctgccctggtgctgatggctatggtcaagcggaaggacagccggggaagggccaagcgatctggatctggagcaacaaacttctcactactcaaacaagcaggtgacgtggaggagaatcccgggcctactagtaccatggactggatttggcgcatccttttccttgtcggcgctgctaccggcgcccattccgggccccaggtgcagctccaagaaagcggacccggactggttaagccctctcagaccctgtctctgacctgcacagttagcggagccagcattaccacaggcgagtattattggaattggtttcggcagccaccaggcaaggggcttgagtggatgggtgctattgctgcctctggcagcaccacctactctcccagctttgagagcagaacctccatcagccgggacacctccaaaaaccagttctctctgaagctgtcctccgtgaccgctgctgacaccgccgtctattattgtggccggtctttcggcgtggcagctgtgaccacaggacagaacagaggccagggaacacttgtgaccgtgtcctctggatccggcggcggaggatctggcggaggcggatctgggggcggaggctctttcgaacaagttcagcttcaacagcctggcgctgagctggtcaaacctggcgcttctgtgaagatgagctgcaaagccagcggctacgccttcagcagctactggatcaactggatgaagcagaaacccggccagggactcgaatggatcggccaaatctatcccggcgacggcgacaccaactacaacggcaagttcaagggcagagccacactgaccgccgatacctctagcagcacagcctacatgcagctgagcagcctgaccagcgaagatagcgccgtgtacttctgtgcccggtccatcacaacagtcgtgggctgcgctatggactattggggccagggaacaagcgtgaccgtgtctagtacgcgtatccagaaccctgatcctgccgtgtaccagctgcgggatagcaagagcagcgacaagagcgtgtgtctgttcaccgacttcgacagccagaccaacgtgtcccagagcaaggactccgacgtgtacatcaccgataagtgcgtgctggacatgcggagcatggacttcaagagcaactccgccgtggcctggtccaacaagtccgatttcgcctgcgccaacgccttcaacaacagcattatccccgaggacacattcttcccaagccccgagagcagctgcgacgtgaagctggtggaaaagagcttcgagacagacaccaacctgaacttccagaacctgagcgtgatcggcttcagaatcctgctgctgaaagtggccggctttaacctgctgatgaccctgcggctgtggtccagccgcgccaagagaagcggatctggcgtgaagcagaccctgaatttcgacctgctgaagctggctggcgacgtggaatccaacccaggcccttctagaggccatatgaccgagtacaagcccacggtgcgcctcgccacccgcgacgacgtccccagggccgtacgcaccctcgccgccgcgttcgccgactaccccgccacgcgccacaccgtcgatccggaccgccacatcgagcgggtcaccgagctgcaagaactcttcctcacgcgcgtcgggctcgacatcggcaaggtgtgggtcgcggacgacggcgccgcggtggcggtctggaccacgccggagagcgtcgaagcgggggcggtgttcgccgagatcggcccgcgcatggccgagttgagcggttcccggctggccgcgcagcaacagatggaaggcctcctggcgccgcaccggcccaaggagcccgcgtggttcctggccaccgtcggcgtctcgcccgaccaccagggcaagggtctgggcagcgccgtcgtgctccccggagtggaggcggccgagcgcgccggggtgcccgccttcctggagacctccgcgccccgcaacctccccttctacgagcggctcggcttcaccgtcaccgccgacgtcgaggtgcccgaaggaccgcgcacctggtgcatgacccgcaagcccggtgcctga

SEQ ID NO: 1101 - DNA, 3402 bp, synthetic construct
  source 1..3402: mol_type = other DNA
atggccttaccagtgaccgccttgctcctgccgctggccttgctgctccacgccgccaggccggcatgccaggtgcagctggttgaatctggtggcggagttgtgcagcctggcagaagcctgagactgtcttgtgccgccagcggctatagaagcagcgtgtgcatgggctggttcagacaggcccctggcaaaggactggaacgagtggccgtgatcggcagagatggcagcacaacctacatcgacagcgtgaagggcagattcaccatcagccgggacaacagcaagaacaccctgtacctccagatgaacagcctgagagccgaggacaccgccgtgtactattgtgccagaggactcggctattgggcctgcgagtacgattattggggccagggcacactggtcaccgtgtcatctggtaccggcggaggcggatctggcggcggaggtagcggtggcggaggatctgaattcgacatccagatgacacagagccctagcagcctgtctgccagcgtgggagacagagtgaccatcacatgcaaggccagcgaccacatcaacaactggctggcctggtatcagcagaagcctggacaggcccctaagctgctgatctacggcgctaccacactggaaacaggcgtgcccagcagattttctggcagcggctctggcaccgactacaccctgacaatatccagcctccagcctgaggacttcgccacctactactgtcagcagagctggaacaccccttggacattcggccagggcaccaagctggaaatcaagagactcgaggacctgaagaacgtgttcccacctgaggtggccgtgttcgagcctagcgaggccgagatcagccacacccagaaagccaccctcgtgtgcctggctaccggcttctaccccgaccatgtggaactgtcttggtgggtcaacggcaaagaggtgcacagcggcgtgtgtaccgacccccagccactgaaagaacagcccgccctgaacgacagccggtactgcctgagcagcagactgagagtgtccgccaccttctggcagaacccccggaaccacttcagatgccaggtgcagttctacggcctgagcgagaacgacgagtggacccaggacagagccaagcccgtgacccagatcgtgtctgccgaagcctggggcagagccgattgcggctttaccagcgagagctaccagcagggcgtgctgagcgccaccatcctgtacgagatcctgctgggcaaggccaccctgtacgccgtgctggtgtctgccctggtgctgatggctatggtcaagcggaaggacagccggggaagggccaagcgatctggatctggagcaacaaacttctcactactcaaacaagcaggtgacgtggaggagaatcccgggcctactagtgccaccatggactggatttggcgcatccttttccttgtcggcgctgctaccggcgcccattccgggcccgaagtgcagctggttgaatctggcggaggactggttcaggctggcggatctctgagactgtcttgtgccgccagcggcagaacctttagcatgggctggtttagacaggcccctggcaaagagagagagttcgtcgccgccatcacatactctggcggcagcccttactacgccgactctgtgaagggcagattcaccatcagccgggacaacgccaagaacaccgtgtacctccagatgaacagcctgaagcctgaggacaccgccgtgtactactgcgccgccaatccaacatacggcagcgactggaacgccgagaattggggccagggaacccaagtgacagtgtctagcggatccggcggcggaggatctggcggaggcggatctgggggcggaggctctttcgaacaagttcagcttcaacagcctggcgctgagctggtcaaacctggcgcttctgtgaagatgagctgcaaagccagcggctacgccttcagcagctactggatcaactggatgaagcagaaacccggccagggactcgaatggatcggccaaatctatcccggcgacggcgacaccaactacaacggcaagttcaagggcagagccacactgaccgccgatacctctagcagcacagcctacatgcagctgagcagcctgaccagcgaagatagcgccgtgtacttctgtgcccggtccatcacaacagtcgtgggctgcgctatggactattggggccagggaacaagcgtgaccgtgtctagtacgcgtatccagaaccctgatcctgccgtgtaccagctgcgggatagcaagagcagcgacaagagcgtgtgtctgttcaccgacttcgacagccagaccaacgtgtcccagagcaaggactccgacgtgtacatcaccgataagtgcgtgctggacatgcggagcatggacttcaagagcaactccgccgtggcctggtccaacaagtccgatttcgcctgcgccaacgccttcaacaacagcattatccccgaggacacattcttcccaagccccgagagcagctgcgacgtgaagctggtggaaaagagcttcgagacagacaccaacctgaacttccagaacctgagcgtgatcggcttcagaatcctgctgctgaaagtggccggctttaacctgctgatgaccctgcggctgtggtccagccgcgccaagagaagcggatctggcgtgaagcagaccctgaatttcgacctgctgaagctggctggcgacgtggaatccaacccaggcccttctagaggccatatgaccgagtacaagcccacggtgcgcctcgccacccgcgacgacgtccccagggccgtacgcaccctcgccgccgcgttcgccgactaccccgccacgcgccacaccgtcgatccggaccgccacatcgagcgggtcaccgagctgcaagaactcttcctcacgcgcgtcgggctcgacatcggcaaggtgtgggtcgcggacgacggcgccgcggtggcggtctggaccacgccggagagcgtcgaagcgggggcggtgttcgccgagatcggcccgcgcatggccgagttgagcggttcccggctggccgcgcagcaacagatggaaggcctcctggcgccgcaccggcccaaggagcccgcgtggttcctggccaccgtcggcgtctcgcccgaccaccagggcaagggtctgggcagcgccgtcgtgctccccggagtggaggcggccgagcgcgccggggtgcccgccttcctggagacctccgcgccccgcaacctccccttctacgagcggctcggcttcaccgtcaccgccgacgtcgaggtgcccgaaggaccgcgcacctggtgcatgacccgcaagcccggtgcctga

SEQ ID NO: 1102 - DNA, 3414 bp, synthetic construct
  source 1..3414: mol_type = other DNA
atggccttaccagtgaccgccttgctcctgccgctggccttgctgctccacgccgccaggccggcatgccaggttcagctgcaagagtctggccctggcctggtcaagcctagccaaacactgagcctgacctgtaccgtgtctggcggctctatcaccaccggcgagttctactggaactggttcagacagcctcctggcaaaggactggaatggatgggagccattgccgccagcggcagcacaacatacagccctagcttcgagagccggaccagcatcagcagagacaccagcaagaatcagttcagcctgaagctgagcagcgtgacagccgccgatacagccgtgtattactgcggcagatcctttggagtggccgccgtgacaaccggccagaatagaggacagggcaccctggtcacagtgtctagcggtaccggcggaggcggatctggcggcggaggtagcggtggcggaggatctgaattcgacatccagatgacacagagccctagcagcctgtctgccagcgtgggagacagagtgaccatcacatgcaaggccagcgaccacatcaacaactggctggcctggtatcagcagaagcctggacaggcccctaagctgctgatctacggcgctaccacactggaaacaggcgtgcccagcagattttctggcagcggctctggcaccgactacaccctgacaatatccagcctccagcctgaggacttcgccacctactactgtcagcagagctggaacaccccttggacattcggccagggcaccaagctggaaatcaagagactcgaggacctgaagaacgtgttcccacctgaggtggccgtgttcgagcctagcgaggccgagatcagccacacccagaaagccaccctcgtgtgcctggctaccggcttctaccccgaccatgtggaactgtcttggtgggtcaacggcaaagaggtgcacagcggcgtgtgtaccgacccccagccactgaaagaacagcccgccctgaacgacagccggtactgcctgagcagcagactgagagtgtccgccaccttctggcagaacccccggaaccacttcagatgccaggtgcagttctacggcctgagcgagaacgacgagtggacccaggacagagccaagcccgtgacccagatcgtgtctgccgaagcctggggcagagccgattgcggctttaccagcgagagctaccagcagggcgtgctgagcgccaccatcctgtacgagatcctgctgggcaaggccaccctgtacgccgtgctggtgtctgccctggtgctgatggctatggtcaagcggaaggacagccggggaagggccaagcgatctggatctggagcaacaaacttctcactactcaaacaagcaggtgacgtggaggagaatcccgggcctactagtgccaccatggactggatttggcgcatccttttccttgtcggcgctgctaccggcgcccattccgggcccgaagtgcagctggttgaatctggcggaggactggttcaggctggcggatctctgagactgtcttgtgccgccagcggcagaacctttagcatgggctggtttagacaggcccctggcaaagagagagagttcgtcgccgccatcacatactctggcggcagcccttactacgccgactctgtgaagggcagattcaccatcagccgggacaacgccaagaacaccgtgtacctccagatgaacagcctgaagcctgaggacaccgccgtgtactactgcgccgccaatccaacatacggcagcgactggaacgccgagaattggggccagggaacccaagtgacagtgtctagcggatccggcggcggaggatctggcggaggcggatctgggggcggaggctctttcgaacaagttcagcttcaacagcctggcgctgagctggtcaaacctggcgcttctgtgaagatgagctgcaaagccagcggctacgccttcagcagctactggatcaactggatgaagcagaaacccggccagggactcgaatggatcggccaaatctatcccggcgacggcgacaccaactacaacggcaagttcaagggcagagccacactgaccgccgatacctctagcagcacagcctacatgcagctgagcagcctgaccagcgaagatagcgccgtgtacttctgtgcccggtccatcacaacagtcgtgggctgcgctatggactattggggccagggaacaagcgtgaccgtgtctagtacgcgtatccagaaccctgatcctgccgtgtaccagctgcgggatagcaagagcagcgacaagagcgtgtgtctgttcaccgacttcgacagccagaccaacgtgtcccagagcaaggactccgacgtgtacatcaccgataagtgcgtgctggacatgcggagcatggacttcaagagcaactccgccgtggcctggtccaacaagtccgatttcgcctgcgccaacgccttcaacaacagcattatccccgaggacacattcttcccaagccccgagagcagctgcgacgtgaagctggtggaaaagagcttcgagacagacaccaacctgaacttccagaacctgagcgtgatcggcttcagaatcctgctgctgaaagtggccggctttaacctgctgatgaccctgcggctgtggtccagccgcgccaagagaagcggatctggcgtgaagcagaccctgaatttcgacctgctgaagctggctggcgacgtggaatccaacccaggcccttctagaggccatatgaccgagtacaagcccacggtgcgcctcgccacccgcgacgacgtccccagggccgtacgcaccctcgccgccgcgttcgccgactaccccgccacgcgccacaccgtcgatccggaccgccacatcgagcgggtcaccgagctgcaagaactcttcctcacgcgcgtcgggctcgacatcggcaaggtgtgggtcgcggacgacggcgccgcggtggcggtctggaccacgccggagagcgtcgaagcgggggcggtgttcgccgagatcggcccgcgcatggccgagttgagcggttcccggctggccgcgcagcaacagatggaaggcctcctggcgccgcaccggcccaaggagcccgcgtggttcctggccaccgtcggcgtctcgcccgaccaccagggcaagggtctgggcagcgccgtcgtgctccccggagtggaggcggccgagcgcgccggggtgcccgccttcctggagacctccgcgccccgcaacctccccttctacgagcggctcggcttcaccgtcaccgccgacgtcgaggtgcccgaaggaccgcgcacctggtgcatgacccgcaagcccggtgcctga

SEQ ID NO: 1103 - DNA, 4473 bp, synthetic construct
  source 1..4473: mol_type = other DNA
atggccttaccagtgaccgccttgctcctgccgctggccttgctgctccacgccgccaggccggaattcaatgctggcgtgacccagacacctaagttccaggtgctgaaaaccggccagagcatgaccctgcaatgcgcccaggacatgaaccatgagtacatgagctggtacagacaggaccccggcatgggcctgagactgatccactactctgtggctatccagaccaccgaccagggcgaagtgcccaatggctacaacgtgtccagaagcaccatcgaggacttcccactgagactgctgtctgccgctcctagccagaccagcgtgtacttttgtgccagcagctacctgggcaacaccggcgagctgttttttggcgagggcagcagactgaccgtgctcgaggacctgaagaacgtgttcccacctgaggtggccgtgttcgagcctagcgaggccgagatcagccacacccagaaagccaccctcgtgtgcctggctaccggcttctaccccgaccatgtggaactgtcttggtgggtcaacggcaaagaggtgcacagcggcgtgtctaccgacccccagccactgaaagaacagcccgccctgaacgacagccggtactgcctgagcagcagactgagagtgtccgccaccttctggcagaacccccggaaccacttcagatgccaggtgcagttctacggcctgagcgagaacgacgagtggacccaggacagagccaagcccgtgacccagatcgtgtctgccgaagcctggggcagagccgattgcggatcccagagcttcggcctgctggaccccaagctgtgctacctgctggatggcatcctgttcatctacggcgtgatcctgaccgccctgttcctgagagtgaagttcagcagaagcgccgacgcccctgcctaccagcagggacagaaccaactgtacaacgagctgaacctgggcagacgggaagagtacgacgtgctggacaagcggagaggcagggaccctgagatgggcggaaagccccagcggagaaagaacccccaggaaggactgtataacgaactccagaaagacaagatggccgaagcctacagcgagatcggcatgaagggcgagcggagaagaggcaagggccacgatggcctgtaccagggcctgagcaccgccaccaaggacacctatgacgccctgcacatgcaggccctgcctccaagaagggccaagcgatctggatctggagcaacaaacttctcactactcaaacaagcaggtgacgtggaggagaatcccgggcctactagtatggactggatttggcgcatccttttccttgtcggcgctgctaccggcgcgcattccttcgaacaagaagtgacacagatccctgccgctctgtctgtgcctgagggcgaaaacctggtgctgaactgctccttcaccgacagcgccatctacaacctccagtggttcaggcaggaccctggaaagggactgacaagcctgctgctgatccagagcagccagagagagcagacctccggcagactgaatgccagcctggataagagcagcggcaggtctaccctgtatatcgccgcttctcagcctggcgatagcgccacatatctgtgtgctgtgcggcctacaagcggcggcagctacatccctacatttggcagaggcaccagcctgatcgtgcacccttatacgcgtatccagaaccctgatcctgccgtgtaccagctgcgggatagcaagagcagcgacaagagcgtgtgtctgttcaccgacttcgacagccagaccaacgtgtcccagagcaaggactccgacgtgtacatcaccgataagaccgtgctggacatgcggagcatggacttcaagagcaactccgccgtggcctggtccaacaagtccgatttcgcctgcgccaacgccttcaacaacagcattatccccgaggacacattcttcccaagccccgagagcagctgcggtacccagagttttgggttgttggaccctaaattgtgctatctgttggacggaatcctgttcatttacggagtgatcctgaccgcattgttcctgcgggttaagttttccagatccgcagacgcacccgcttaccaacaagggcagaaccaactctacaatgaacttaatttggggcggagggaagagtacgacgttctggacaaaaggaggggacgagatcccgagatgggcggaaagcctcagcgaaggaagaatccgcaagaggggctttataacgaactccagaaagataaaatggcagaagcctatagtgagattgggatgaagggagaaaggaggaggggtaaaggtcacgatgggttgtaccaaggattgagcacagccactaaagatacctatgatgcgctccacatgcaggccctgccgccaagacgcgccaagagaagcggatctggcgtgaagcagaccctgaatttcgacctgctgaagctggctggcgacgtggaatccaacccaggcccttctagcaccatgaggccaagactgtggctgctgctggctgctcagctgacagtgctgcacggcaattctgtgctccagcagacccctgcctacatcaaggtgcagaccaacaagatggtcatgctgagctgcgaggccaaaatcagcctgagcaacatgcggatctactggctgcggcagagacaggcccctagcagcgatagccaccacgaatttctggccctgtgggatagcgccaagggcacaattcacggcgaggaagtggaacaagagaagatcgccgtgttccgggacgccagcagattcatcctgaacctgaccagcgtgaagcccgaggacagcggcatctatttctgcatgatcgtgggcagccccgagctgacatttggcaagggaacacagctgagcgtggtggacttcctgcctactacagcccagcctaccaagaagtctaccctgaagaaaagagtgtgcaggctgcccagacctgagacacagaaaggccctctgtgcagccctatcacactgggattgctggtggctggcgtgctggtgctgctggtttctctgggagttgccatccacctgtgctgtagaagaaggcgggccagactgcggtttatgaagcagttctacaagagagcaaagcgaagtggtagcggagcaaccaacttttctctgctcaagcaagccggtgacgtggaagagaaccctggtcctactagtatggctctgcctgtgacagctctgctgctgcctctggcactgctgcttcatgctgctagacctagccagtttagagtgtcccctctggacagaacctggaacctgggcgagacagtggaactgaagtgccaggtgctgctgagcaaccctacaagcggctgctcctggctgtttcagcctagaggtgcagccgcctctcctacctttctgctgtacctgagccagaacaagcccaaggccgccgaaggactggacacccagagattcagcggcaagagactgggcgacaccttcgtgctgaccctgagcgacttcagaagagagaacgagggctactacttctgtagcgccctgagcaacagcatcatgtacttcagccacttcgtgcccgtgtttctgcccgccaagcctacaacaacccctgctcctagacctcctacaccagctcctacaatcgccagccagcctctgtctctcagacccgaagcctgtagacctgctgctggcggagctgtgcataccagaggactggatttcgcctgcgacatctacatctgggctcctctggctggcacatgtggcgtgctgctgctgtccctggtcatcaccctgtactgcaaccaccggaacaggcggagagtgtgcaagtgccctagacctgtggtcaagagcggcgacaagcctagcctgagcgccagatatgttagcgccaagcgatctggctctggagtgaagcagacgctgaacttcgacctccttaagttggctggggatgtcgaaagcaaccccggaccttctagaggccatatggccaagcctttgtctcaagaagaatccaccctcattgaaagagcaacggctacaatcaacagcatccccatctctgaagactacagcgtcgccagcgcagctctctctagcgacggccgcatcttcactggtgtcaatgtatatcattttactgggggaccttgtgcagaactcgtggtgctgggcactgctgctgctgcggcagctggcaacctgacttgtatcgtcgcgatcggaaatgagaacaggggcatcttgagcccctgcggacggtgccgacaggtgcttctcgatctgcatcctgggatcaaagccatagtgaaggacagtgatggacagccgacggcagttgggattcgtgaattgctgccctctggttatgtgtgggagggctaa

SEQ ID NO: 1104 - DNA, 3756 bp, synthetic construct
  source 1..3756: mol_type = other DNA
atggccttaccagtgaccgccttgctcctgccgctggccttgctgctccacgccgccaggccggaattcaatgctggcgtgacccagacacctaagttccaggtgctgaaaaccggccagagcatgaccctgcaatgcgcccaggacatgaaccatgagtacatgagctggtacagacaggaccccggcatgggcctgagactgatccactactctgtggctatccagaccaccgaccagggcgaagtgcccaatggctacaacgtgtccagaagcaccatcgaggacttcccactgagactgctgtctgccgctcctagccagaccagcgtgtacttttgtgccagcagctacctgggcaacaccggcgagctgttttttggcgagggcagcagactgaccgtgctcgaggacctgaagaacgtgttcccacctgaggtggccgtgttcgagcctagcgaggccgagatcagccacacccagaaagccaccctcgtgtgcctggctaccggcttctaccccgaccatgtggaactgtcttggtgggtcaacggcaaagaggtgcacagcggcgtgtctaccgacccccagccactgaaagaacagcccgccctgaacgacagccggtactgcctgagcagcagactgagagtgtccgccaccttctggcagaacccccggaaccacttcagatgccaggtgcagttctacggcctgagcgagaacgacgagtggacccaggacagagccaagcccgtgacccagatcgtgtctgccgaagcctggggcagagccgattgcggatcccagagcttcggcctgctggaccccaagctgtgctacctgctggatggcatcctgttcatctacggcgtgatcctgaccgccctgttcctgagagtgaagttcagcagaagcgccgacgcccctgcctaccagcagggacagaaccaactgtacaacgagctgaacctgggcagacgggaagagtacgacgtgctggacaagcggagaggcagggaccctgagatgggcggaaagccccagcggagaaagaacccccaggaaggactgtataacgaactccagaaagacaagatggccgaagcctacagcgagatcggcatgaagggcgagcggagaagaggcaagggccacgatggcctgtaccagggcctgagcaccgccaccaaggacacctatgacgccctgcacatgcaggccctgcctccaagaagggccaagcgatctggatctggagcaacaaacttctcactactcaaacaagcaggtgacgtggaggagaatcccgggcctactagtatggactggatttggcgcatccttttccttgtcggcgctgctaccggcgcgcattccttcgaacaagaagtgacacagatccctgccgctctgtctgtgcctgagggcgaaaacctggtgctgaactgctccttcaccgacagcgccatctacaacctccagtggttcaggcaggaccctggaaagggactgacaagcctgctgctgatccagagcagccagagagagcagacctccggcagactgaatgccagcctggataagagcagcggcaggtctaccctgtatatcgccgcttctcagcctggcgatagcgccacatatctgtgtgctgtgcggcctacaagcggcggcagctacatccctacatttggcagaggcaccagcctgatcgtgcacccttatacgcgtatccagaaccctgatcctgccgtgtaccagctgcgggatagcaagagcagcgacaagagcgtgtgtctgttcaccgacttcgacagccagaccaacgtgtcccagagcaaggactccgacgtgtacatcaccgataagaccgtgctggacatgcggagcatggacttcaagagcaactccgccgtggcctggtccaacaagtccgatttcgcctgcgccaacgccttcaacaacagcattatccccgaggacacattcttcccaagccccgagagcagctgcggtacccagagttttgggttgttggaccctaaattgtgctatctgttggacggaatcctgttcatttacggagtgatcctgaccgcattgttcctgcgggttaagttttccagatccgcagacgcacccgcttaccaacaagggcagaaccaactctacaatgaacttaatttggggcggagggaagagtacgacgttctggacaaaaggaggggacgagatcccgagatgggcggaaagcctcagcgaaggaagaatccgcaagaggggctttataacgaactccagaaagataaaatggcagaagcctatagtgagattgggatgaagggagaaaggaggaggggtaaaggtcacgatgggttgtaccaaggattgagcacagccactaaagatacctatgatgcgctccacatgcaggccctgccgccaagacgcgccaagagaagcggatctggcgtgaagcagaccctgaatttcgacctgctgaagctggctggcgacgtggaatccaacccaggcccttctagcaccatggctctgcctgtgacagctctgctgctgcctctggcactgctgcttcatgctgctagacctagccagtttagagtgtcccctctggacagaacctggaacctgggcgagacagtggaactgaagtgccaggtgctgctgagcaaccctacaagcggctgctcctggctgtttcagcctagaggtgcagccgcctctcctacctttctgctgtacctgagccagaacaagcccaaggccgccgaaggactggacacccagagattcagcggcaagagactgggcgacaccttcgtgctgaccctgagcgacttcagaagagagaacgagggctactacttctgtagcgccctgagcaacagcatcatgtacttcagccacttcgtgcccgtgtttctgcccgccaagcctacaacaacccctgctcctagacctcctacaccagctcctacaatcgccagccagcctctgtctctcagacccgaagcctgtagacctgctgctggcggagctgtgcataccagaggactggatttcgcctgcgacatctacatctgggctcctctggctggcacatgtggcgtgctgctgctgtccctggtcatcaccctgtactgcaaccaccggaacaggcggagagtgtgcaagtgccctagacctgtggtcaagagcggcgacaagcctagcctgagcgccagatatgttagcgccaagcgatctggctctggagtgaagcagacgctgaacttcgacctccttaagttggctggggatgtcgaaagcaaccccggaccttctagaggccatatggccaagcctttgtctcaagaagaatccaccctcattgaaagagcaacggctacaatcaacagcatccccatctctgaagactacagcgtcgccagcgcagctctctctagcgacggccgcatcttcactggtgtcaatgtatatcattttactgggggaccttgtgcagaactcgtggtgctgggcactgctgctgctgcggcagctggcaacctgacttgtatcgtcgcgatcggaaatgagaacaggggcatcttgagcccctgcggacggtgccgacaggtgcttctcgatctgcatcctgggatcaaagccatagtgaaggacagtgatggacagccgacggcagttgggattcgtgaattgctgccctctggttatgtgtgggagggctaa

SEQ ID NO: 1105 - DNA, 2871 bp, synthetic construct
  source 1..2871: mol_type = other DNA
atggccttaccagtgaccgccttgctcctgccgctggccttgctgctccacgccgccaggccggacatccagatgacacagagccctagcagcctgtctgccagcgtgggagacagagtgaccatcacatgcaaggccagcgaccacatcaacaactggctggcctggtatcagcagaagcctggacaggcccctaagctgctgatctacggcgctaccacactggaaacaggcgtgcccagcagattttctggcagcggctctggcaccgactacaccctgacaatatccagcctccagcctgaggacttcgccacctactactgtcagcagagctggaacaccccttggacattcggccagggcaccaagctggaaatcaagagactcgaggacctgaagaacgtgttcccacctgaggtggccgtgttcgagcctagcgaggccgagatcagccacacccagaaagccaccctcgtgtgcctggctaccggcttctaccccgaccatgtggaactgtcttggtgggtcaacggcaaagaggtgcacagcggcgtgtctaccgacccccagccactgaaagaacagcccgccctgaacgacagccggtactgcctgagcagcagactgagagtgtccgccaccttctggcagaacccccggaaccacttcagatgccaggtgcagttctacggcctgagcgagaacgacgagtggacccaggacagagccaagcccgtgacccagatcgtgtctgccgaagcctggggcagagccgattgcggatcccagagcttcggcctgctggaccccaagctgtgctacctgctggatggcatcctgttcatctacggcgtgatcctgaccgccctgttcctgagagtgaagttcagcagaagcgccgacgcccctgcctaccagcagggacagaaccaactgtacaacgagctgaacctgggcagacgggaagagtacgacgtgctggacaagcggagaggcagggaccctgagatgggcggaaagccccggagaaagaacccccaggaaggactgtataacgaactccagaaagacaagatggccgaagcctacagcgagatcggcatgaagggcgagcggagaagaggcaagggccacgatggcctgtaccagggcctgagcaccgccaccaaggacacctatgacgccctgcacatgcaggccctgcctccaagaagggccaagcgatctggatctggagcaacaaacttctcactactcaaacaagcaggtgacgtggaggagaatcccgggcctactagtactagtgccaccatggactggatttggcgcatccttttccttgtcggcgctgctaccggcgcccattccgggcccgaagtgcagctggttgaatctggcggaggactggttcaggctggcggatctctgagactgtcttgtgccgccagcggcagaacctttagcatgggctggtttagacaggcccctggcaaagagagagagttcgtcgccgccatcacatactctggcggcagcccttactacgccgactctgtgaagggcagattcaccatcagccgggacaacgccaagaacaccgtgtacctccagatgaacagcctgaagcctgaggacaccgccgtgtactactgcgccgccaatccaacatacggcagcgactggaacgccgagaattggggccagggaacccaagtgacagtgtctagcggatccggcggcggaggatctggcggaggcggatctgggggcggaggctctttcgaacaagttcagcttcaacagcctggcgctgagctggtcaaacctggcgcttctgtgaagatgagctgcaaagccagcggctacgccttcagcagctactggatcaactggatgaagcagaaacccggccagggactcgaatggatcggccaaatctatcccggcgacggcgacaccaactacaacggcaagttcaagggcagagccacactgaccgccgatacctctagcagcacagcctacatgcagctgagcagcctgaccagcgaagatagcgccgtgtacttctgtgcccggtccatcacaacagtcgtgggctgcgctatggactattggggccagggaacaagcgtgaccgtgtctagtacgcgtatccagaaccctgatcctgccgtgtaccagctgcgggatagcaagagcagcgacaagagcgtgtgtctgttcaccgacttcgacagccagaccaacgtgtcccagagcaaggactccgacgtgtacatcaccgataagaccgtgctggacatgcggagcatggacttcaagagcaactccgccgtggcctggtccaacaagtccgatttcgcctgcgccaacgccttcaacaacagcattatccccgaggacacattcttcccaagccccgagagcagctgcggtacccagagttttgggttgttggaccctaaattgtgctatctgttggacggaatcctgttcatttacggagtgatcctgaccgcattgttcctgcgggttaagttttccagatccgcagacgcacccgcttaccaacaagggcagaaccaactctacaatgaacttaatttggggcggagggaagagtacgacgttctggacaaaaggaggggacgagatcccgagatgggcggaaagcctcgaaggaagaatccgcaagaggggctttataacgaactccagaaagataaaatggcagaagcctatagtgagattgggatgaagggagaaaggaggaggggtaaaggtcacgatgggttgtaccaaggattgagcacagccactaaagatacctatgatgcgctccacatgcaggccctgccgccaaga

SEQ ID NO: 1106 - DNA, 2565 bp, synthetic construct
  source 1..2565: mol_type = other DNA
atggccttaccagtgaccgccttgctcctgccgctggccttgctgctccacgccgccaggccggacatccagatgacacagagccctagcagcctgtctgccagcgtgggagacagagtgaccatcacatgcaaggccagcgaccacatcaacaactggctggcctggtatcagcagaagcctggacaggcccctaagctgctgatctacggcgctaccacactggaaacaggcgtgcccagcagattttctggcagcggctctggcaccgactacaccctgacaatatccagcctccagcctgaggacttcgccacctactactgtcagcagagctggaacaccccttggacattcggccagggcaccaagctggaaatcaagagactcgaggacctgaagaacgtgttcccacctgaggtggccgtgttcgagcctagcgaggccgagatcagccacacccagaaagccaccctcgtgtgcctggctaccggcttctaccccgaccatgtggaactgtcttggtgggtcaacggcaaagaggtgcacagcggcgtgtctaccgacccccagccactgaaagaacagcccgccctgaacgacagccggtactgcctgagcagcagactgagagtgtccgccaccttctggcagaacccccggaaccacttcagatgccaggtgcagttctacggcctgagcgagaacgacgagtggacccaggacagagccaagcccgtgacccagatcgtgtctgccgaagcctggggcagagccgattgcggatcccagagcttcggcctgctggaccccaagctgtgctacctgctggatggcatcctgttcatctacggcgtgatcctgaccgccctgttcctgagagtgaagttcagcagaagcgccgacgcccctgcctaccagcagggacagaaccaactgtacaacgagctgaacctgggcagacgggaagagtacgacgtgctggacaagcggagaggcagggaccctgagatgggcggaaagccccggagaaagaacccccaggaaggactgtataacgaactccagaaagacaagatggccgaagcctacagcgagatcggcatgaagggcgagcggagaagaggcaagggccacgatggcctgtaccagggcctgagcaccgccaccaaggacacctatgacgccctgcacatgcaggccctgcctccaagaagggccaagcgatctggatctggagcaacaaacttctcactactcaaacaagcaggtgacgtggaggagaatcccgggcctactagtactagtgccaccatggactggatttggcgcatccttttccttgtcggcgctgctaccggcgcccattccgggcccgaagtgcagctggttgaatctggcggaggactggttcaggctggcggatctctgagactgtcttgtgccgccagcggcagaacctttagcatgggctggtttagacaggcccctggcaaagagagagagttcgtcgccgccatcacatactctggcggcagcccttactacgccgactctgtgaagggcagattcaccatcagccgggacaacgccaagaacaccgtgtacctccagatgaacagcctgaagcctgaggacaccgccgtgtactactgcgccgccaatccaacatacggcagcgactggaacgccgagaattggggccagggaacccaagtgacagtgtctagcggatccggcggcggaggatctggcggaggcggatctgggggcggaggctctttcgaacaagttcagcttcaacagcctggcgctgagctggtcaaacctggcgcttctgtgaagatgagctgcaaagccagcggctacgccttcagcagctactggatcaactggatgaagcagaaacccggccagggactcgaatggatcggccaaatctatcccggcgacggcgacaccaactacaacggcaagttcaagggcagagccacactgaccgccgatacctctagcagcacagcctacatgcagctgagcagcctgaccagcgaagatagcgccgtgtacttctgtgcccggtccatcacaacagtcgtgggctgcgctatggactattggggccagggaacaagcgtgaccgtgtctagtacgcgtatccagaaccctgatcctgccgtgtaccagctgcgggatagcaagagcagcgacaagagcgtgtgtctgttcaccgacttcgacagccagaccaacgtgtcccagagcaaggactccgacgtgtacatcaccgataagaccgtgctggacatgcggagcatggacttcaagagcaactccgccgtggcctggtccaacaagtccgatttcgcctgcgccaacgccttcaacaacagcattatccccgaggacacattcttcccaagccccgagagcagctgcggtaccattacccaaggactggctgtgcctacaatctctagcttctttccgcctggataccaagtctccttctgtcttgtgatggtcctcctgtttgctgtggacacaggactgtacttttccgtg

SEQ ID NO: 1107 - DNA, 2640 bp, synthetic construct
  source 1..2640: mol_type = other DNA
atggccttaccagtgaccgccttgctcctgccgctggccttgctgctccacgccgccaggccggacatccagatgacacagagccctagcagcctgtctgccagcgtgggagacagagtgaccatcacatgcaaggccagcgaccacatcaacaactggctggcctggtatcagcagaagcctggacaggcccctaagctgctgatctacggcgctaccacactggaaacaggcgtgcccagcagattttctggcagcggctctggcaccgactacaccctgacaatatccagcctccagcctgaggacttcgccacctactactgtcagcagagctggaacaccccttggacattcggccagggcaccaagctggaaatcaagagactcgaggacctgaagaacgtgttcccacctgaggtggccgtgttcgagcctagcgaggccgagatcagccacacccagaaagccaccctcgtgtgcctggctaccggcttctaccccgaccatgtggaactgtcttggtgggtcaacggcaaagaggtgcacagcggcgtgtctaccgacccccagccactgaaagaacagcccgccctgaacgacagccggtactgcctgagcagcagactgagagtgtccgccaccttctggcagaacccccggaaccacttcagatgccaggtgcagttctacggcctgagcgagaacgacgagtggacccaggacagagccaagcccgtgacccagatcgtgtctgccgaagcctggggcagagccgattgcggatcccagagcttcggcctgctggaccccaagctgtgctacctgctggatggcatcctgttcatctacggcgtgatcctgaccgccctgttcctgagagtgaagttcagcagaagcgccgacgcccctgcctaccagcagggacagaaccaactgtacaacgagctgaacctgggcagacgggaagagtacgacgtgctggacaagcggagaggcagggaccctgagatgggcggaaagccccggagaaagaacccccaggaaggactgtataacgaactccagaaagacaagatggccgaagcctacagcgagatcggcatgaagggcgagcggagaagaggcaagggccacgatggcctgtaccagggcctgagcaccgccaccaaggacacctatgacgccctgcacatgcaggccctgcctccaagaagggccaagcgatctggatctggagcaacaaacttctcactactcaaacaagcaggtgacgtggaggagaatcccgggcctactagtactagtgccaccatggactggatttggcgcatccttttccttgtcggcgctgctaccggcgcccattccgggcccgaagtgcagctggttgaatctggcggaggactggttcaggctggcggatctctgagactgtcttgtgccgccagcggcagaacctttagcatgggctggtttagacaggcccctggcaaagagagagagttcgtcgccgccatcacatactctggcggcagcccttactacgccgactctgtgaagggcagattcaccatcagccgggacaacgccaagaacaccgtgtacctccagatgaacagcctgaagcctgaggacaccgccgtgtactactgcgccgccaatccaacatacggcagcgactggaacgccgagaattggggccagggaacccaagtgacagtgtctagcggatccggcggcggaggatctggcggaggcggatctgggggcggaggctctttcgaacaagttcagcttcaacagcctggcgctgagctggtcaaacctggcgcttctgtgaagatgagctgcaaagccagcggctacgccttcagcagctactggatcaactggatgaagcagaaacccggccagggactcgaatggatcggccaaatctatcccggcgacggcgacaccaactacaacggcaagttcaagggcagagccacactgaccgccgatacctctagcagcacagcctacatgcagctgagcagcctgaccagcgaagatagcgccgtgtacttctgtgcccggtccatcacaacagtcgtgggctgcgctatggactattggggccagggaacaagcgtgaccgtgtctagtacgcgtatccagaaccctgatcctgccgtgtaccagctgcgggatagcaagagcagcgacaagagcgtgtgtctgttcaccgacttcgacagccagaccaacgtgtcccagagcaaggactccgacgtgtacatcaccgataagaccgtgctggacatgcggagcatggacttcaagagcaactccgccgtggcctggtccaacaagtccgatttcgcctgcgccaacgccttcaacaacagcattatccccgaggacacattcttcccaagccccgagagcagctgcggtaccatcactcaaggtttggcagtgtcaaccatctcatcattctttccacctggctaccaagtgtccttctgcctggtcatggtgctgctgttcgccgtggataccggcctgtacttcagcgtcaagaccaacatccggtccagcaccagagactggaaggaccacaagttcaagtggcggaaggaccctcaggacaag

SEQ ID NO: 1108 - DNA, 2430 bp, synthetic construct
  source 1..2430: mol_type = other DNA
atggccttaccagtgaccgccttgctcctgccgctggccttgctgctccacgccgccaggccggacatccagatgacacagagccctagcagcctgtctgccagcgtgggagacagagtgaccatcacatgcaaggccagccaggatgtgggcacagccgtggattggtatcagcagaagcctggcaaggcccctaagctgctgatctactgggccagcacaagacacacaggcgtgcccagcagattttctggcagcggctctggcaccgacttcaccctgacaatatccagcctccagcctgaggacttcgccacctactactgccagcagtacaacagctaccctctgaccttcggccagggcaccaaggtggaaatcaaaagactcgaggacctgaagaacgtgttcccacctgaggtggccgtgttcgagcctagcgaggccgagatcagccacacccagaaagccaccctcgtgtgcctggctaccggcttctaccccgaccatgtggaactgtcttggtgggtcaacggcaaagaggtgcacagcggcgtgtctaccgacccccagccactgaaagaacagcccgccctgaacgacagccggtactgcctgagcagcagactgagagtgtccgccaccttctggcagaacccccggaaccacttcagatgccaggtgcagttctacggcctgagcgagaacgacgagtggacccaggacagagccaagcccgtgacccagatcgtgtctgccgaagcctggggcagagccgattgcggatcccagagcttcggcctgctggaccccaagctgtgctacctgctggatggcatcctgttcatctacggcgtgatcctgaccgccctgttcctgagagtgaagttcagcagaagcgccgacgcccctgcctaccagcagggacagaaccaactgtacaacgagctgaacctgggcagacgggaagagtacgacgtgctggacaagcggagaggcagggaccctgagatgggcggaaagccccagcggagaaagaacccccaggaaggactgtataacgaactccagaaagacaagatggccgaagcctacagcgagatcggcatgaagggcgagcggagaagaggcaagggccacgatggcctgtaccagggcctgagcaccgccaccaaggacacctatgacgccctgcacatgcaggccctgcctccaagaagggccaagcgatctggatctggagcaacaaacttctcactactcaaacaagcaggtgacgtggaggagaatcccgggcctactagtatggactggatttggcgcatccttttccttgtcggcgctgctaccggcgcgcattccttcgaagtgcagctggttgaatcaggtggcggcctggttcaacctggcggatctctgagactgagctgtgccgccagcggctacacctttaccgagtacacaatccactgggtccgacaggcccctggcaaaggacttgagtgggtcgccaacatcaaccccaacaatggcggcaccacctacaaccagaagttcgaggacagattcaccatcagccgggacaacagcaagaacaccctgtacctccagatgaactccctgagagccgaggacaccgccgtgtactattgtgccagaggctggaacttcgactactggggccagggaacactggtcaccgttagctctacgcgtatccagaaccctgatcctgccgtgtaccagctgcgggatagcaagagcagcgacaagagcgtgtgtctgttcaccgacttcgacagccagaccaacgtgtcccagagcaaggactccgacgtgtacatcaccgataagaccgtgctggacatgcggagcatggacttcaagagcaactccgccgtggcctggtccaacaagtccgatttcgcctgcgccaacgccttcaacaacagcattatccccgaggacacattcttcccaagccccgagagcagctgcggtacccagagttttgggttgttggaccctaaattgtgctatctgttggacggaatcctgttcatttacggagtgatcctgaccgcattgttcctgcgggttaagttttccagatccgcagacgcacccgcttaccaacaagggcagaaccaactctacaatgaacttaatttggggcggagggaagagtacgacgttctggacaaaaggaggggacgagatcccgagatgggcggaaagcctcgaaggaagaatccgcaagaggggctttataacgaactccagaaagataaaatggcagaagcctatagtgagattgggatgaagggagaaaggaggaggggtaaaggtcacgatgggttgtaccaaggattgagcacagccactaaagatacctatgatgcgctccacatgcaggccctgccgccaaga

SEQ ID NO: 1109 - DNA, 2427 bp, synthetic construct
  source 1..2427: mol_type = other DNA
atggccttaccagtgaccgccttgctcctgccgctggccttgctgctccacgccgccaggccggacatccagatgacacagagccctagcagcctgtctgccagcgtgggagacagagtgaccatcacatgcaaggccagccaggatgtgggcacagccgtggattggtatcagcagaagcctggcaaggcccctaagctgctgatctactgggccagcacaagacacacaggcgtgcccagcagattttctggcagcggctctggcaccgacttcaccctgacaatatccagcctccagcctgaggacttcgccacctactactgccagcagtacaacagctaccctctgaccttcggccagggcaccaaggtggaaatcaaaagactcgaggacctgaagaacgtgttcccacctgaggtggccgtgttcgagcctagcgaggccgagatcagccacacccagaaagccaccctcgtgtgcctggctaccggcttctaccccgaccatgtggaactgtcttggtgggtcaacggcaaagaggtgcacagcggcgtgtctaccgacccccagccactgaaagaacagcccgccctgaacgacagccggtactgcctgagcagcagactgagagtgtccgccaccttctggcagaacccccggaaccacttcagatgccaggtgcagttctacggcctgagcgagaacgacgagtggacccaggacagagccaagcccgtgacccagatcgtgtctgccgaagcctggggcagagccgattgcggatcccagagcttcggcctgctggaccccaagctgtgctacctgctggatggcatcctgttcatctacggcgtgatcctgaccgccctgttcctgagagtgaagttcagcagaagcgccgacgcccctgcctaccagcagggacagaaccaactgtacaacgagctgaacctgggcagacgggaagagtacgacgtgctggacaagcggagaggcagggaccctgagatgggcggaaagccccggagaaagaacccccaggaaggactgtataacgaactccagaaagacaagatggccgaagcctacagcgagatcggcatgaagggcgagcggagaagaggcaagggccacgatggcctgtaccagggcctgagcaccgccaccaaggacacctatgacgccctgcacatgcaggccctgcctccaagaagggccaagcgatctggatctggagcaacaaacttctcactactcaaacaagcaggtgacgtggaggagaatcccgggcctactagtatggactggatttggcgcatccttttccttgtcggcgctgctaccggcgcgcattccttcgaagtgcagctggttgaatcaggtggcggcctggttcaacctggcggatctctgagactgagctgtgccgccagcggctacacctttaccgagtacacaatccactgggtccgacaggcccctggcaaaggacttgagtgggtcgccaacatcaaccccaacaatggcggcaccacctacaaccagaagttcgaggacagattcaccatcagccgggacaacagcaagaacaccctgtacctccagatgaactccctgagagccgaggacaccgccgtgtactattgtgccagaggctggaacttcgactactggggccagggaacactggtcaccgttagctctacgcgtatccagaaccctgatcctgccgtgtaccagctgcgggatagcaagagcagcgacaagagcgtgtgtctgttcaccgacttcgacagccagaccaacgtgtcccagagcaaggactccgacgtgtacatcaccgataagaccgtgctggacatgcggagcatggacttcaagagcaactccgccgtggcctggtccaacaagtccgatttcgcctgcgccaacgccttcaacaacagcattatccccgaggacacattcttcccaagccccgagagcagctgcggtacccagagttttgggttgttggaccctaaattgtgctatctgttggacggaatcctgttcatttacggagtgatcctgaccgcattgttcctgcgggttaagttttccagatccgcagacgcacccgcttaccaacaagggcagaaccaactctacaatgaacttaatttggggcggagggaagagtacgacgttctggacaaaaggaggggacgagatcccgagatgggcggaaagcctcgaaggaagaatccgcaagaggggctttataacgaactccagaaagataaaatggcagaagcctatagtgagattgggatgaagggagaaaggaggaggggtaaaggtcacgatgggttgtaccaaggattgagcacagccactaaagatacctatgatgcgctccacatgcaggccctgccgccaaga

SEQ ID NO: 1110 - DNA, 2196 bp, synthetic construct
  source 1..2196: mol_type = other DNA
atggccttaccagtgaccgccttgctcctgccgctggccttgctgctccacgccgccaggccggacatccagatgacacagagccctagcagcctgtctgccagcgtgggagacagagtgaccatcacatgcaaggccagccaggatgtgggcacagccgtggattggtatcagcagaagcctggcaaggcccctaagctgctgatctactgggccagcacaagacacacaggcgtgcccagcagattttctggcagcggctctggcaccgacttcaccctgacaatatccagcctccagcctgaggacttcgccacctactactgccagcagtacaacagctaccctctgaccttcggccagggcaccaaggtggaaatcaaaagactcgaggacctgaagaacgtgttcccacctgaggtggccgtgttcgagcctagcgaggccgagatcagccacacccagaaagccaccctcgtgtgcctggctaccggcttctaccccgaccatgtggaactgtcttggtgggtcaacggcaaagaggtgcacagcggcgtgtctaccgacccccagccactgaaagaacagcccgccctgaacgacagccggtactgcctgagcagcagactgagagtgtccgccaccttctggcagaacccccggaaccacttcagatgccaggtgcagttctacggcctgagcgagaacgacgagtggacccaggacagagccaagcccgtgacccagatcgtgtctgccgaagcctggggcagagccgattgcggatcccagagcttcggcctgctggaccccaagctgtgctacctgctggatggcatcctgttcatctacggcgtgatcctgaccgccctgttcctgagagtgaagttcagcagaagcgccgacgcccctgcctaccagcagggacagaaccaactgtacaacgagctgaacctgggcagacgggaagagtacgacgtgctggacaagcggagaggcagggaccctgagatgggcggaaagccccggagaaagaacccccaggaaggactgtataacgaactccagaaagacaagatggccgaagcctacagcgagatcggcatgaagggcgagcggagaagaggcaagggccacgatggcctgtaccagggcctgagcaccgccaccaaggacacctatgacgccctgcacatgcaggccctgcctccaagaagggccaagcgatctggatctggagcaacaaacttctcactactcaaacaagcaggtgacgtggaggagaatcccgggcctactagtatggactggatttggcgcatccttttccttgtcggcgctgctaccggcgcgcattccttcgaagtgcagctggttgaatcaggtggcggcctggttcaacctggcggatctctgagactgagctgtgccgccagcggctacacctttaccgagtacacaatccactgggtccgacaggcccctggcaaaggacttgagtgggtcgccaacatcaaccccaacaatggcggcaccacctacaaccagaagttcgaggacagattcaccatcagccgggacaacagcaagaacaccctgtacctccagatgaactccctgagagccgaggacaccgccgtgtactattgtgccagaggctggaacttcgactactggggccagggaacactggtcaccgttagctctacgcgtatccagaaccctgatcctgccgtgtaccagctgcgggatagcaagagcagcgacaagagcgtgtgtctgttcaccgacttcgacagccagaccaacgtgtcccagagcaaggactccgacgtgtacatcaccgataagaccgtgctggacatgcggagcatggacttcaagagcaactccgccgtggcctggtccaacaagtccgatttcgcctgcgccaacgccttcaacaacagcattatccccgaggacacattcttcccaagccccgagagcagctgcggtaccatcactcaaggtttggcagtgtcaaccatctcatcattctttccacctggctaccaagtgtccttctgcctggtcatggtgctgctgttcgccgtggataccggcctgtacttcagcgtcaagaccaacatccggtccagcaccagagactggaaggaccacaagttcaagtggcggaaggaccctcaggacaag

SEQ ID NO: 1111 - DNA, 1464 bp, synthetic construct
  source 1..1464: mol_type = other DNA
atggccttaccagtgaccgccttgctcctgccgctggccttgctgctccacgccgccaggccggacgtgcagatgatccagacccccgatagcctggccgtgtccctgggacagagagccaccatctcttgcagagccagcgagagcgtggacaactacggcatcagcttcatgcactggtatcagcagaagcccggccagagccccaagctgctgatctacagagcctccaacctggaaagcggcatccccgccagattttccggcagcggcagcagaaccgacttcaccctgaccatcaaccccgtggaaaccgacgacgtggcaacctactactgccagcagaacaacaaggacccccccacctttggcggaggcaccaagctggaaatcaagggcggaggcggaagtggaggcggaggatctggcggcggaggctctgggggaggcggctctcaggtgcaactccagcagtctggcgctgagcttgtgaagcctggggccagcgtgaagattagctgcaaggccagcggctacgccttcagcagctactggatgaactgggtcaagcagcggcctggcaagggcctggaatggatcggccaaatctaccccggcgacggcgacaccacctacaacggcaagttcaagggcaaggccaccctgacagccgacaagagcagcagcaccgtgtacatgcaactgaacagcctgaccagcgaggacagcgccgtgtacttctgcgtgcggtactactacggcagctccggctacttcgactattggggccagggcaccacactgaccgtgtcctctacgcgtggaatgaggactgaggatcttcccaaagctgtcgtctttctcgaaccccaatggtatcgggtgctcgaaaaagactctgtgacactgaaatgccaaggggcctactctcccgaggacaactccacacagtggtttcataatgagtccctcatcagctctcaggccagctcttatttcattgatgccgctacagtggacgactccggcgagtatcggtgtcagaccaatctgtctacactgtctgaccccgtgcagcttgaggtccacattggatggttgctcttgcaagccccacgctgggttttcaaagaggaagatccaatccatctgcggtgccacagctggaaaaacaccgctctccacaaagtcacatacctgcaaaatggcaaaggacgcaaatacttccatcacaattccgatttttacattccgaaggctaccctgaaagacagcggcagctatttctgccggggactcgtcggctccaagaatgtgtcctccgaaaccgtgaatatcacgattacccaaggactggctgtgcctacaatctctagcttctttccgcctggataccaagtctccttctgtcttgtgatggtcctcctgtttgctgtggacacaggactgtacttttccgtgaaa

SEQ ID NO: 1112 - DNA, 1437 bp, synthetic construct
  source 1..1437: mol_type = other DNA
atggccttaccagtgaccgccttgctcctgccgctggccttgctgctccacgccgccaggccggacgtgcagatgatccagacccccagcagcctgtctgccagcctgggcgatagagtgaccatcagctgtcgggccagccaggacatcggcaactacctgaactggtatcagcagaaacccgacggcaccgtgaagctgctgatctactacaccagcagactgcacagcggcgtgcccagcagattttctggcagcggctctggcaccgagtacagcctgaccatctccaacctggaacaggaagatattgctacctacttctgtcagcaaggcagcgccctgccccctacatttggcggcggaacaaagctggaaatcaacggcggaggcggaagtggaggcggaggatctggcggcggaggctctgctctccagctccagcagtctggcgcagaactcgtgcggcctggcgcttctgtgaccctgagctgtaaagccagcggctacaccttcaccgactacgagatgcactgggtcaagcagacccctgtgcacggcctggaatggatcggagccatcgaccctgagacaggcggcaccgcctacaaccagaagttcgagggcaaggccatcctgaccgccgacaagagcagcagcacagcctacatggaactgcggagcctgacctccgaggacagccccgtgtactactgtgccagacggcggtactacggcagcagctccttcgactattggggccagggcaccaccctgaccgtgtctagtacgcgtggaatgaggactgaggatcttcccaaagctgtcgtctttctcgaaccccaatggtatcgggtgctcgaaaaagactctgtgacactgaaatgccaaggggcctactctcccgaggacaactccacacagtggtttcataatgagtccctcatcagctctcaggccagctcttatttcattgatgccgctacagtggacgactccggcgagtatcggtgtcagaccaatctgtctacactgtctgaccccgtgcagcttgaggtccacattggatggttgctcttgcaagccccacgctgggttttcaaagaggaagatccaatccatctgcggtgccacagctggaaaaacaccgctctccacaaagtcacatacctgcaaaatggcaaaggacgcaaatacttccatcacaattccgatttttacattccgaaggctaccctgaaagacagcggcagctatttctgccggggactcgtcggctccaagaatgtgtcctccgaaaccgtgaatatcacgattacccaaggactggctgtgcctacaatctctagcttctttccgcctggataccaagtctccttctgtcttgtgatggtcctcctgtttgctgtggacacaggactgtacttttccgtgaaa

SEQ ID NO: 1113 - DNA, 1443 bp, synthetic construct
  source 1..1443: mol_type = other DNA
atggccttaccagtgaccgccttgctcctgccgctggccttgctgctccacgccgccaggccggacatcgtgctgacacagagccctgccaccctgtctctgagccctggcgatagagccaccatcagctgtagagccagcgagagcgtgaccatcctgggcagccacctgatctactggtatcagcagaagcccggccagccccccagactgctgattcagctggcctccaatgtgcagaccggcgtgccagccagattttccggcagcggcagcagaaccgacttcaccctgaccatcagcagcgtggaacccgaggacttcgccgtgtactactgcctccagagccggaccatccccagaacattcggccagggcaccaagctggaaatcaagagaggcggaggcggaagtggaggcggaggatctggcggcggaggctctcaggtgcagctggtgcagtctggccccgaagtgaagaaacccggcgagtccgtgaagatcagctgcaaggccagcggctacaccttccggcactacagcatgaactgggtcaagcaggccccaggccagggcctgaagtggatgggcagaatcaacaccgagagcggcgtgcccatctacgccgacgacttcaagggccggttcagcttcaccgtggacaccagcgccagcaccgcctacctggaaatctccagcctgaccagcgaggataccgccgtgtatttctgctccaacgactacctgtacagcctggatttctggggccagggaaccaccctgacagtgtcctctacgcgtggaatgaggactgaggatcttcccaaagctgtcgtctttctcgaaccccaatggtatcgggtgctcgaaaaagactctgtgacactgaaatgccaaggggcctactctcccgaggacaactccacacagtggtttcataatgagtccctcatcagctctcaggccagctcttatttcattgatgccgctacagtggacgactccggcgagtatcggtgtcagaccaatctgtctacactgtctgaccccgtgcagcttgaggtccacattggatggttgctcttgcaagccccacgctgggttttcaaagaggaagatccaatccatctgcggtgccacagctggaaaaacaccgctctccacaaagtcacatacctgcaaaatggcaaaggacgcaaatacttccatcacaattccgatttttacattccgaaggctaccctgaaagacagcggcagctatttctgccggggactcgtcggctccaagaatgtgtcctccgaaaccgtgaatatcacgattacccaaggactggctgtgcctacaatctctagcttctttccgcctggataccaagtctccttctgtcttgtgatggtcctcctgtttgctgtggacacaggactgtacttttccgtgaaa

SEQ ID NO: 1114 - DNA, 1443 bp, synthetic construct
  source 1..1443: mol_type = other DNA
atggccttaccagtgaccgccttgctcctgccgctggccttgctgctccacgccgccaggccggacatccagatgacccagagccctagctcactgagcgccagcgtgggcgacagggtgaccattacctgctccgccagccaggacatcagcaactacctgaactggtaccagcagaagcccggcaaggcccccaagctgctgatctactacacctccaacctgcactccggcgtgcccagcaggttcagcggaagcggcagcggcaccgatttcaccctgaccatctccagcctgcagcccgaggacttcgccacctactactgccagcagtacaggaagctcccctggactttcggccagggcaccaaactggagatcaagcgtggcggaggcggaagtggaggcggaggatctggcggcggaggctctcaggtgcagctggtccagagcggcgccgaagtgaagaagcccggcagctccgtgaaagtgagctgcaaggccagcggcggcaccttcagcaactactggatgcactgggtgaggcaggcccccggacagggcctggagtggatgggcgccacctacaggggccacagcgacacctactacaaccagaagttcaagggccgggtgaccatcaccgccgacaagagcaccagcaccgcctacatggaactgagcagcctcaggagcgaggacaccgctgtgtattactgcgccaggggcgccatctacgacggctacgacgtgctggacaactggggccagggcacactggtgaccgtgtccagcacgcgtggaatgaggactgaggatcttcccaaagctgtcgtctttctcgaaccccaatggtatcgggtgctcgaaaaagactctgtgacactgaaatgccaaggggcctactctcccgaggacaactccacacagtggtttcataatgagtccctcatcagctctcaggccagctcttatttcattgatgccgctacagtggacgactccggcgagtatcggtgtcagaccaatctgtctacactgtctgaccccgtgcagcttgaggtccacattggatggttgctcttgcaagccccacgctgggttttcaaagaggaagatccaatccatctgcggtgccacagctggaaaaacaccgctctccacaaagtcacatacctgcaaaatggcaaaggacgcaaatacttccatcacaattccgatttttacattccgaaggctaccctgaaagacagcggcagctatttctgccggggactcgtcggctccaagaatgtgtcctccgaaaccgtgaatatcacgattacccaaggactggctgtgcctacaatctctagcttctttccgcctggataccaagtctccttctgtcttgtgatggtcctcctgtttgctgtggacacaggactgtacttttccgtgaaa

SEQ ID NO: 1115 - DNA, 1458 bp, synthetic construct
  source 1..1458: mol_type = other DNA
atggccttaccagtgaccgccttgctcctgccgctggccttgctgctccacgccgccaggccggacatcgtgatgacccagagccccgatagcctggccgtgtctctgggagagagagccaccatcaactgcgagagcagccagagcctgctgaacagcggcaaccagaagaactacctgacctggtatcagcagaagcccggccagccccccaagcccctgatctattgggccagcaccagagaaagcggcgtgcccgatagattcagcggcagcggaagcggcaccgacttcaccctgaccatcagttctcttcaggccgaggacgtggccgtgtactactgccagaacgactacagctacccctacaccttcggccagggcaccaagctggaaatcaagagaggcggaggcggaagtggaggcggaggatctggcggcggaggctctgaagtgcagctggtgcagtctggggccgaagtgaagaagcctggcgagagcctgaagatcagctgcaagggcagcggctacagcttcaccgactactacatgaagtgggccagacagatgcccggcaagggcctggaatggatgggcgacatcatccccagcaacggggccaccttctacaaccagaaattcaagggccaagtgaccatctccgccgacaagagcatcagcaccacctacctccagtggtccagcctgaaggccagcgacaccgccatgtactattgcgccagaagccatctgctgcgggccagttggttcgcctattggggccagggaacaatggtcacagtgtccagcacgcgtggaatgaggactgaggatcttcccaaagctgtcgtctttctcgaaccccaatggtatcgggtgctcgaaaaagactctgtgacactgaaatgccaaggggcctactctcccgaggacaactccacacagtggtttcataatgagtccctcatcagctctcaggccagctcttatttcattgatgccgctacagtggacgactccggcgagtatcggtgtcagaccaatctgtctacactgtctgaccccgtgcagcttgaggtccacattggatggttgctcttgcaagccccacgctgggttttcaaagaggaagatccaatccatctgcggtgccacagctggaaaaacaccgctctccacaaagtcacatacctgcaaaatggcaaaggacgcaaatacttccatcacaattccgatttttacattccgaaggctaccctgaaagacagcggcagctatttctgccggggactcgtcggctccaagaatgtgtcctccgaaaccgtgaatatcacgattacccaaggactggctgtgcctacaatctctagcttctttccgcctggataccaagtctccttctgtcttgtgatggtcctcctgtttgctgtggacacaggactgtacttttccgtgaaa

SEQ ID NO: 1116 - DNA, 1443 bp, synthetic construct
  source 1..1443: mol_type = other DNA
atggccttaccagtgaccgccttgctcctgccgctggccttgctgctccacgccgccaggccggacatccagatgacccagtctaccagttccctgagtgcatccctcggagacagggtgacgatcagttgcagcgcaagccaagggatcaataactatctgaactggtatcagcagaaaccggacggaacagtcgaactcctgatttattacaccagcacccttcagagtggcgtcccttcccggttcagtggctccggaagcgggaccgattactccctgaccatttctaatctggagccagaggacataggaacgtattattgccagcagtatagtaaactgccacgaacttttggaggggggacgaaactggagatcaaaggcggaggcggaagtggaggcggaggatctggcggcggaggctctcaggtgcaactccagcagtccggaagcgagcttatgatgccaggggcatcagtgaagatcagctgcaaggctactggctacaccttctctaattactggatagagtgggttaaacaaaggccagggcacggcctggaatggatcggcgagatcctgcctgggacaggccgaaccatttataacgagaagttcaaaggcaaggctactttcaccgcagatataagctctaatacagtgcaaatgcagctctcttccctgacaagtgaggatagtgccgtgtattattgcgcacgaagagattactatggaaatttttattacgctatggattattggggtcaaggaacaagtgtgaccgttagcagcacgcgtggaatgaggactgaggatcttcccaaagctgtcgtctttctcgaaccccaatggtatcgggtgctcgaaaaagactctgtgacactgaaatgccaaggggcctactctcccgaggacaactccacacagtggtttcataatgagtccctcatcagctctcaggccagctcttatttcattgatgccgctacagtggacgactccggcgagtatcggtgtcagaccaatctgtctacactgtctgaccccgtgcagcttgaggtccacattggatggttgctcttgcaagccccacgctgggttttcaaagaggaagatccaatccatctgcggtgccacagctggaaaaacaccgctctccacaaagtcacatacctgcaaaatggcaaaggacgcaaatacttccatcacaattccgatttttacattccgaaggctaccctgaaagacagcggcagctatttctgccggggactcgtcggctccaagaatgtgtcctccgaaaccgtgaatatcacgattacccaaggactggctgtgcctacaatctctagcttctttccgcctggataccaagtctccttctgtcttgtgatggtcctcctgtttgctgtggacacaggactgtacttttccgtgaaa

SEQ ID NO: 1117 - DNA, 1428 bp, synthetic construct
  source 1..1428: mol_type = other DNA
atggccttaccagtgaccgccttgctcctgccgctggccttgctgctccacgccgccaggccggacatccagatgacccagagccctgccagcctgtccgtgtctgtgggcgagacagtgaccatcacctgtcgggccagcgagaacatctacagcaacctggcctggtatcagcagaagcagggcaagagcccccaactgctggtgtacgccgccaccaatctggccgatggcgtgcccagcagattttccggctctggcagcggcacccagtacagcctgaagatcaacagcctccagagcgaggacttcggcagctactactgccagcacttctggggcacctggacctttggaggaggcaccaccctggaaatcaagggcggaggcggaagtggaggcggaggatctggcggcggaggctctgaagtgcaactccagcagagcggccctgagcttgtgaagcctggcgcttccgtgaagatgagctgcaaggccagcggctacaccttcaccgactactacatgaagtggatgaagcagagccacggcaagtccctggaatggatcggcgacatcaaccccaacaacggcggcaccacctacaaccagaagttcaagggcaaggccaccctgaccgtggacaagagcagcagcaccgcctacatgcaactgaacagcctgaccagcgaggacagcgccgtgtactactgcgccagagactacggctacggctatttcgactactggggccagggcacaaccctgacagtgtcctctacgcgtggaatgaggactgaggatcttcccaaagctgtcgtctttctcgaaccccaatggtatcgggtgctcgaaaaagactctgtgacactgaaatgccaaggggcctactctcccgaggacaactccacacagtggtttcataatgagtccctcatcagctctcaggccagctcttatttcattgatgccgctacagtggacgactccggcgagtatcggtgtcagaccaatctgtctacactgtctgaccccgtgcagcttgaggtccacattggatggttgctcttgcaagccccacgctgggttttcaaagaggaagatccaatccatctgcggtgccacagctggaaaaacaccgctctccacaaagtcacatacctgcaaaatggcaaaggacgcaaatacttccatcacaattccgatttttacattccgaaggctaccctgaaagacagcggcagctatttctgccggggactcgtcggctccaagaatgtgtcctccgaaaccgtgaatatcacgattacccaaggactggctgtgcctacaatctctagcttctttccgcctggataccaagtctccttctgtcttgtgatggtcctcctgtttgctgtggacacaggactgtacttttccgtgaaa

SEQ ID NO: 1118 - DNA, 1440 bp, synthetic construct
  source 1..1440: mol_type = other DNA
atggccttaccagtgaccgccttgctcctgccgctggccttgctgctccacgccgccaggccggacgagatcgtgctgacacagagccccgccaccctgtcactgtctccaggcgaaagagccaccctgagctgtagcgccagcagcagcgtgtcctacatgcactggtatcagcagaagcccggccaggcccccagactgctgatctacgataccagcaagctggcctccggcatccccgccagattttctggcagcggctccggcaccgacttcaccctgacaatcagcagcctggaacccgaggacgtggccgtgtactactgttttcaaggcagcgtgtaccccttcaccttcggccagggcaccaagctggaaatcaagagaggtggcggtggctcgggcggtggtgggtcgggtggcggcggatctcaggtgcagctccaggaatctggccctggcctcgtgaagcctagccagaccctgagcctgacctgtaccgtgtctggcggcagcatcagcacaagcggcatgggcgtgggctggatcagacagcaccctggcaagggcctggaatggatcggccacatttggtgggacgacgacaagcggtacaaccccgccctgaagtccagagtgaccatcagcgtggacaccagcaagaaccagttcagcctgaagctgagcagcgtgacagccgccgataccgccgtgtattattgcgcccggatggaactgtggtcctactacttcgactactggggccagggaaccctcgtgaccgtgtctagtacgcgtggaatgaggactgaggatcttcccaaagctgtcgtctttctcgaaccccaatggtatcgggtgctcgaaaaagactctgtgacactgaaatgccaaggggcctactctcccgaggacaactccacacagtggtttcataatgagtccctcatcagctctcaggccagctcttatttcattgatgccgctacagtggacgactccggcgagtatcggtgtcagaccaatctgtctacactgtctgaccccgtgcagcttgaggtccacattggatggttgctcttgcaagccccacgctgggttttcaaagaggaagatccaatccatctgcggtgccacagctggaaaaacaccgctctccacaaagtcacatacctgcaaaatggcaaaggacgcaaatacttccatcacaattccgatttttacattccgaaggctaccctgaaagacagcggcagctatttctgccggggactcgtcggctccaagaatgtgtcctccgaaaccgtgaatatcacgattacccaaggactggctgtgcctacaatctctagcttctttccgcctggataccaagtctccttctgtcttgtgatggtcctcctgtttgctgtggacacaggactgtacttttccgtgaaa

SEQ ID NO: 1119 - DNA, 1437 bp, synthetic construct
  source 1..1437: mol_type = other DNA
atggccttaccagtgaccgccttgctcctgccgctggccttgctgctccacgccgccaggccggacatccagatgacacagactacatcctccctgtctgcctctctgggagacagagtcaccatcagttgcagggcaagtcaggacattagtaaatatttaaattggtatcagcagaaaccagatggaactgttaaactcctgatctaccatacatcaagattacactcaggagtcccatcaaggttcagtggcagtgggtctggaacagattattctctcaccattagcaacctggagcaagaagatattgccacttacttttgccaacagggtaatacgcttccgtacacgttcggaggggggaccaagctggagatcacaggtggcggtggctcgggcggtggtgggtcgggtggcggcggatctgaggtgaaactgcaggagtcaggacctggcctggtggcgccctcacagagcctgtccgtcacatgcactgtctcaggggtctcattacccgactatggtgtaagctggattcgccagcctccacgaaagggtctggagtggctgggagtaatatggggtagtgaaaccacatactataattcagctctcaaatccagactgaccatcatcaaggacaactccaagagccaagttttcttaaaaatgaacagtctgcaaactgatgacacagccatttactactgtgccaaacattattactacggtggtagctatgctatggactactggggtcaaggaacctcagtcaccgtctcctcaacgcgtggaatgaggactgaggatcttcccaaagctgtcgtctttctcgaaccccaatggtatcgggtgctcgaaaaagactctgtgacactgaaatgccaaggggcctactctcccgaggacaactccacacagtggtttcataatgagtccctcatcagctctcaggccagctcttatttcattgatgccgctacagtggacgactccggcgagtatcggtgtcagaccaatctgtctacactgtctgaccccgtgcagcttgaggtccacattggatggttgctcttgcaagccccacgctgggttttcaaagaggaagatccaatccatctgcggtgccacagctggaaaaacaccgctctccacaaagtcacatacctgcaaaatggcaaaggacgcaaatacttccatcacaattccgatttttacattccgaaggctaccctgaaagacagcggcagctatttctgccggggactcgtcggctccaagaatgtgtcctccgaaaccgtgaatatcacgattacccaaggactggctgtgcctacaatctctagcttctttccgcctggataccaagtctccttctgtcttgtgatggtcctcctgtttgctgtggacacaggactgtacttttccgtgaaa

SEQ ID NO: 1120 - DNA, 1437 bp, synthetic construct
  source 1..1437: mol_type = other DNA
atggccttaccagtgaccgccttgctcctgccgctggccttgctgctccacgccgccaggccggagatcgtgatgacccagagccctgccaccctgtctctgagccctggcgaaagagccaccctgagctgtagagccagccaggacatcagcaagtacctgaactggtatcagcagaagcccggccaggcccccagactgctgatctaccacaccagcagactgcacagcggcatccccgccagattttctggctctggcagcggcaccgactacaccctgacaatcagcagcctccagcccgaggacttcgccgtgtacttctgtcagcaaggcaacaccctgccctacaccttcggccagggcaccaagctggaaatcaagggcggaggcggaagtggaggcggaggatctggcggcggaggctctcaggtgcaactccaggaatctggccctggcctcgtgaagcccagcgagacactgagcctgacctgtaccgtgtccggcgtgtccctgcctgactatggcgtgtcctggatcagacagccccctggcaagggcctggaatggatcggagtgatttggggcagcgaaaccacctactacaacagctccctgaagtccagagtgaccatctccaaggacaactccaagaaccaggtgtccctgaagctgagcagcgtgacagccgccgacaccgccgtgtattactgcgccaagcactactactacggcggcagctacgctatggactactggggccagggaaccctcgtgaccgtgtctagtacgcgtggaatgaggactgaggatcttcccaaagctgtcgtctttctcgaaccccaatggtatcgggtgctcgaaaaagactctgtgacactgaaatgccaaggggcctactctcccgaggacaactccacacagtggtttcataatgagtccctcatcagctctcaggccagctcttatttcattgatgccgctacagtggacgactccggcgagtatcggtgtcagaccaatctgtctacactgtctgaccccgtgcagcttgaggtccacattggatggttgctcttgcaagccccacgctgggttttcaaagaggaagatccaatccatctgcggtgccacagctggaaaaacaccgctctccacaaagtcacatacctgcaaaatggcaaaggacgcaaatacttccatcacaattccgatttttacattccgaaggctaccctgaaagacagcggcagctatttctgccggggactcgtcggctccaagaatgtgtcctccgaaaccgtgaatatcacgattacccaaggactggctgtgcctacaatctctagcttctttccgcctggataccaagtctccttctgtcttgtgatggtcctcctgtttgctgtggacacaggactgtacttttccgtgaaa

SEQ ID NO: 1121 - DNA, 1443 bp, synthetic construct
  source 1..1443: mol_type = other DNA
atggccttaccagtgaccgccttgctcctgccgctggccttgctgctccacgccgccaggccggagatcgtgctgacacagagccctgccaccctgtctctgagccctggcgaaagagccaccctgagctgtagagccagccagagcgtgtccagctacctggcctggtatcagcagaagcccggccaggctccccggctgctgatctacgatgccagcaatagagccaccggcatccccgccagattttccggctctggcagcggcaccgacttcaccctgaccatcagctccctggaacccgaggacttcgccgtgtactactgccagcagcggagcaactggcccatcacattcggccagggcacccggctggaaatcaaaggcggaggcggaagtggaggcggaggatctggcggcggaggctctgaagtgcagctggtggaatcaggcggcggactggtgcagcctggcagaagcctgagactgagctgtgccgccagcggcttcaccttcaacgactacgccatgcactgggtgcgccaggcccctggaaaaggactggaatgggtgtccacaatcagctggaacagcggcagcatcggctacgccgatagcgtgaagggccggttcaccatcagccgggacaacgccaagaagtccctgtacctccagatgaacagcctgcgggccgaggacacagccctgtactattgcgccaaggacatccagtacggcaactactactacggcatggacgtgtggggccagggaaccaccgtgaccgtgtcatctacgcgtggaatgaggactgaggatcttcccaaagctgtcgtctttctcgaaccccaatggtatcgggtgctcgaaaaagactctgtgacactgaaatgccaaggggcctactctcccgaggacaactccacacagtggtttcataatgagtccctcatcagctctcaggccagctcttatttcattgatgccgctacagtggacgactccggcgagtatcggtgtcagaccaatctgtctacactgtctgaccccgtgcagcttgaggtccacattggatggttgctcttgcaagccccacgctgggttttcaaagaggaagatccaatccatctgcggtgccacagctggaaaaacaccgctctccacaaagtcacatacctgcaaaatggcaaaggacgcaaatacttccatcacaattccgatttttacattccgaaggctaccctgaaagacagcggcagctatttctgccggggactcgtcggctccaagaatgtgtcctccgaaaccgtgaatatcacgattacccaaggactggctgtgcctacaatctctagcttctttccgcctggataccaagtctccttctgtcttgtgatggtcctcctgtttgctgtggacacaggactgtacttttccgtgaaa

SEQ ID NO: 1122 - DNA, 1452 bp, synthetic construct
  source 1..1452: mol_type = other DNA
atggccttaccagtgaccgccttgctcctgccgctggccttgctgctccacgccgccaggccggacatcgtgatgacccagacccccctgagcctgcctgtgacacctggcgagcctgccagcatctcctgcagaagcagcaagagcctgctgcacagcaacggcatcacctacctgtactggtatctgcagaaacccggccagagcccccaactgctgatctaccagatgagcaacctggtgtccggcgtgcccgacagattttctggcagcggctccggcaccgacttcaccctgaagatcagccgggtggaagccgaggacgtgggcgtgtactactgcgcccagaacctggaactgccctacacctttggcggcggaacaaaggtggaaatcaagcggggcggaggcggaagtggaggcggaggatctggcggcggaggctctcaggtgcaactggtgcagagcggagccgaagtgaaaaagcccggcagcagcgtgaaggtgtcctgcaaggccagcggctacgccttcagctactcctggatcaactgggtgcgccaggcccctggacagggcctggaatggatgggcagaatcttccccggcgacggcgacaccgactacaacggcaagttcaagggcagagtgaccatcaccgccgacaagagcaccagcaccgcctacatggaactgagcagcctgcggagcgaggataccgccgtgtactattgtgccagaaacgtgttcgacggctactggctggtgtactggggccagggaacacttgtgaccgtgtccagcacgcgtggaatgaggactgaggatcttcccaaagctgtcgtctttctcgaaccccaatggtatcgggtgctcgaaaaagactctgtgacactgaaatgccaaggggcctactctcccgaggacaactccacacagtggtttcataatgagtccctcatcagctctcaggccagctcttatttcattgatgccgctacagtggacgactccggcgagtatcggtgtcagaccaatctgtctacactgtctgaccccgtgcagcttgaggtccacattggatggttgctcttgcaagccccacgctgggttttcaaagaggaagatccaatccatctgcggtgccacagctggaaaaacaccgctctccacaaagtcacatacctgcaaaatggcaaaggacgcaaatacttccatcacaattccgatttttacattccgaaggctaccctgaaagacagcggcagctatttctgccggggactcgtcggctccaagaatgtgtcctccgaaaccgtgaatatcacgattacccaaggactggctgtgcctacaatctctagcttctttccgcctggataccaagtctccttctgtcttgtgatggtcctcctgtttgctgtggacacaggactgtacttttccgtgaaa

SEQ ID NO: 1123 - DNA, 1455 bp, synthetic construct
  source 1..1455: mol_type = other DNA
atggccttaccagtgaccgccttgctcctgccgctggccttgctgctccacgccgccaggccggacatccagatgacccagagccccagcagcctgtctgccagcgtgggcgacagagtgaccatcacctgtcggagcagccagagcatcgtgcactccgtgggcaacaccttcctggaatggtatcagcagaagcccggcaaggcccccaagctgctgatctacaaggtgtccaacagattcagcggcgtgcccagcaggtttagcggctctggcagcggcaccgacttcaccctgaccatctctagcctccagcccgaggacttcgccacctactactgttttcaaggcagccagttcccctacaccttcggccagggaacaaaggtggaaatcaagcggggcggaggcggaagtggaggcggaggatctggcggcggaggctctgaagtgcaactggtggaaagcggaggcggcctggtgcagcctggcggatctctgagactgagctgtgccgccagcggctacgagttcagccggtcctggatgaactgggtgcgccaggcccctggcaagggactggaatgggtgggaagaatctaccccggcgacggcgacaccaactacagcggcaagttcaagggccggttcaccatcagcgccgacaccagcaagaacaccgcctacctccagatgaacagcctgcgggccgaggataccgccgtgtactactgtgccagagatggcagctcctgggactggtacttcgacgtgtggggacagggaacccttgtgaccgtgtccagcacgcgtggaatgaggactgaggatcttcccaaagctgtcgtctttctcgaaccccaatggtatcgggtgctcgaaaaagactctgtgacactgaaatgccaaggggcctactctcccgaggacaactccacacagtggtttcataatgagtccctcatcagctctcaggccagctcttatttcattgatgccgctacagtggacgactccggcgagtatcggtgtcagaccaatctgtctacactgtctgaccccgtgcagcttgaggtccacattggatggttgctcttgcaagccccacgctgggttttcaaagaggaagatccaatccatctgcggtgccacagctggaaaaacaccgctctccacaaagtcacatacctgcaaaatggcaaaggacgcaaatacttccatcacaattccgatttttacattccgaaggctaccctgaaagacagcggcagctatttctgccggggactcgtcggctccaagaatgtgtcctccgaaaccgtgaatatcacgattacccaaggactggctgtgcctacaatctctagcttctttccgcctggataccaagtctccttctgtcttgtgatggtcctcctgtttgctgtggacacaggactgtacttttccgtgaaa

SEQ ID NO: 1124 - DNA, 1437 bp, synthetic construct
  source 1..1437: mol_type = other DNA
atggccttaccagtgaccgccttgctcctgccgctggccttgctgctccacgccgccaggccggagatcgtgctgacacagagccctggcaccctgagcctgtctccaggcgaaagagccacactgagctgtcgggcctctcagagcgtgggaggctacctggcttggtatcagcagaagccaggccaggcccccagactgctgatctacgacgccagcaatcgggccacaggcatccccgccagattttctggcagcggctccggcaccgacttcaccctgacaatcagcagcctggaacccgaggacttcgccgtgtactactgccagcagcggaacaactggccccccatgtacacattcggccagggcaccaagctggaaatcaagagaggcggaggcggaagtggaggcggaggatctggcggcggaggctctcaggtgcaactggtgcagagcggagccgaagtgaagaaacccggcagcagcgtgaaggtgtcctgcaaggcttccggcggcaccttcagcagctacgccatttcttgggtgcgccaggctcctggacagggcctggaatggatgggcggcatcatccctatcctgggcaccgccaactacgcccagaaattccagggcagagtgaccatcaccgccgacgagagcaccagcaccgcctacatggaactgagcagcctgcggagcgaggacacagccgtgtattattgcgccagatggggcggaggggccttcgacatttggggccagggaacaatggtcaccgtgtccagcacgcgtggaatgaggactgaggatcttcccaaagctgtcgtctttctcgaaccccaatggtatcgggtgctcgaaaaagactctgtgacactgaaatgccaaggggcctactctcccgaggacaactccacacagtggtttcataatgagtccctcatcagctctcaggccagctcttatttcattgatgccgctacagtggacgactccggcgagtatcggtgtcagaccaatctgtctacactgtctgaccccgtgcagcttgaggtccacattggatggttgctcttgcaagccccacgctgggttttcaaagaggaagatccaatccatctgcggtgccacagctggaaaaacaccgctctccacaaagtcacatacctgcaaaatggcaaaggacgcaaatacttccatcacaattccgatttttacattccgaaggctaccctgaaagacagcggcagctatttctgccggggactcgtcggctccaagaatgtgtcctccgaaaccgtgaatatcacgattacccaaggactggctgtgcctacaatctctagcttctttccgcctggataccaagtctccttctgtcttgtgatggtcctcctgtttgctgtggacacaggactgtacttttccgtgaaa

SEQ ID NO: 1125 - DNA, 1428 bp, synthetic construct
  source 1..1428: mol_type = other DNA
atggccttaccagtgaccgccttgctcctgccgctggccttgctgctccacgccgccaggccggacatccagatgacccagagccccgccaccatcgagaacacaagcctgtctgccagcgtgggcgacagagtgaccatcacctgtagagccagccagggcatcagctcttggctgacctggtatcagcagaagcccgagaaggcccccaagagcctgatctacgccgccagctctctgcagtctggcgtgcccagcagattttccggcagcggctctggcaccgacttcaccctgacaatcagcagcctgcagcccgaggacttcgccacctactactgccagcagtacgacagctaccccatcaccttcggccagggcacccggctggaaatcaagggcggaggcggaagtggaggcggaggatctggcggcggaggctctcaggtgcaactgcagcagtggggagccggactgctgaagcctagcgagacactgagcctgacctgcgccgtgtacggcggcagcttcagcgcctactattggagctggatcagacagccccctggcaagggcctggaatggatcggcgacatcaatcacggcggaggcaccaactacaaccccagcctgaagtcccgcgtgaccatctccgtggacaccagcaagaaccagttctccctgaagctgaacagcgtgacagccgccgacacagccgtgtactactgtgccagcctgaccgcctattggggccagggatctcttgtgaccgtgtccagcacgcgtggaatgaggactgaggatcttcccaaagctgtcgtctttctcgaaccccaatggtatcgggtgctcgaaaaagactctgtgacactgaaatgccaaggggcctactctcccgaggacaactccacacagtggtttcataatgagtccctcatcagctctcaggccagctcttatttcattgatgccgctacagtggacgactccggcgagtatcggtgtcagaccaatctgtctacactgtctgaccccgtgcagcttgaggtccacattggatggttgctcttgcaagccccacgctgggttttcaaagaggaagatccaatccatctgcggtgccacagctggaaaaacaccgctctccacaaagtcacatacctgcaaaatggcaaaggacgcaaatacttccatcacaattccgatttttacattccgaaggctaccctgaaagacagcggcagctatttctgccggggactcgtcggctccaagaatgtgtcctccgaaaccgtgaatatcacgattacccaaggactggctgtgcctacaatctctagcttctttccgcctggataccaagtctccttctgtcttgtgatggtcctcctgtttgctgtggacacaggactgtacttttccgtgaaa

SEQ ID NO: 1126 - DNA, 1440 bp, synthetic construct
  source 1..1440: mol_type = other DNA
atggccttaccagtgaccgccttgctcctgccgctggccttgctgctccacgccgccaggccggagatcgtgctgacccagagccctgatagcctggccgtgtctctgggcgagagagccaccatcaactgcaaggccagccagagcgtggacttcgacggcgacagctacctgaactggtatcagcagaagcccggccagccccccaaggtgctgatctatgccgccagcacactgcagagcggcgtgcccagcagattttctggcagcggctccggcaccgacttcaccctgaccatcaacagcctggaagccgaggacgccgccacctactactgccagcagagcaacgaggacccctggacctttggcggcggaacaaaggtggaaatcaagggcggaggcggaagtggaggcggaggatctggcggcggaggctctcaggtgcaactggtgcagtccggcgctgaagtgaagaaacctggggccagcgtgaaggtgtcctgcaaggtgtccggctacacctttaccgactactacattacctgggtgcgccaggcccctggacaggccctggaatggatgggctggatctaccccggcagcggcaacaccaagtacagccagaagttccagggcagattcgtgttcagcgtggacaccagcgccagcaccgcctacctgcaactgtctagcctgaaggccgaagataccgccgtgtactactgcgccaactacggcaactattggttcgcctattggggccagggaacccttgtgaccgtgtcctctacgcgtggaatgaggactgaggatcttcccaaagctgtcgtctttctcgaaccccaatggtatcgggtgctcgaaaaagactctgtgacactgaaatgccaaggggcctactctcccgaggacaactccacacagtggtttcataatgagtccctcatcagctctcaggccagctcttatttcattgatgccgctacagtggacgactccggcgagtatcggtgtcagaccaatctgtctacactgtctgaccccgtgcagcttgaggtccacattggatggttgctcttgcaagccccacgctgggttttcaaagaggaagatccaatccatctgcggtgccacagctggaaaaacaccgctctccacaaagtcacatacctgcaaaatggcaaaggacgcaaatacttccatcacaattccgatttttacattccgaaggctaccctgaaagacagcggcagctatttctgccggggactcgtcggctccaagaatgtgtcctccgaaaccgtgaatatcacgattacccaaggactggctgtgcctacaatctctagcttctttccgcctggataccaagtctccttctgtcttgtgatggtcctcctgtttgctgtggacacaggactgtacttttccgtgaaa

SEQ ID NO: 1127 - DNA, 1434 bp, synthetic construct
  source 1..1434: mol_type = other DNA
atggccttaccagtgaccgccttgctcctgccgctggccttgctgctccacgccgccaggccggacatccagatgacccagagccccagcagcctgtctgccagcgtgggcgacagagtgaccatcacctgtagagccagccagggcatcagctcttggctggcctggtatcagcagaagcccgagaaggcccccaagagcctgatctacgccgcctctagtctccagagcggcgtgcccagcagattttctggcagcggctccggcaccgacttcaccctgacaatcagctccctccagcccgaggacttcgccacctactactgccagcagtacaacagctaccctcccacctttggcggaggcaccaaggtggaaatcaagggcggaggcggaagtggaggcggaggatctggcggcggaggctctgaagtgcaactggtgcagtctggcggagggctggtgcatcctgggggaagcctgagactgagctgtgccggctctggcttcgccttcagcagcagcaccatgcactggatcagacaggcccctggcaagggcctggaatggatcagcctgatcggaagcggagggggcatctactacggcgacagcgtgaagggccggttcaccatcagccgggacaacgccaagaacagcctgtacctccagatgaactccctgcgggccgaggacatggccgtgtactattgtgtgcggggctacttcgactgggtggactacttcgattactggggccagggcaccctcgtgaccgtgtcatctacgcgtggaatgaggactgaggatcttcccaaagctgtcgtctttctcgaaccccaatggtatcgggtgctcgaaaaagactctgtgacactgaaatgccaaggggcctactctcccgaggacaactccacacagtggtttcataatgagtccctcatcagctctcaggccagctcttatttcattgatgccgctacagtggacgactccggcgagtatcggtgtcagaccaatctgtctacactgtctgaccccgtgcagcttgaggtccacattggatggttgctcttgcaagccccacgctgggttttcaaagaggaagatccaatccatctgcggtgccacagctggaaaaacaccgctctccacaaagtcacatacctgcaaaatggcaaaggacgcaaatacttccatcacaattccgatttttacattccgaaggctaccctgaaagacagcggcagctatttctgccggggactcgtcggctccaagaatgtgtcctccgaaaccgtgaatatcacgattacccaaggactggctgtgcctacaatctctagcttctttccgcctggataccaagtctccttctgtcttgtgatggtcctcctgtttgctgtggacacaggactgtacttttccgtgaaa

SEQ ID NO: 1128 - DNA, 1452 bp, synthetic construct
  source 1..1452: mol_type = other DNA
atggccttaccagtgaccgccttgctcctgccgctggccttgctgctccacgccgccaggccggacgtcgtgatgacccagagccctctgagcctgcctgtgacactgggacagcctgccagcatctcctgtcggagcagccagagcatcgtgcacagcgacggcaacacctacctggaatggtatcagcagcggccaggccagagccccagacggctgatctacaaggtgtccaacagattcagcggcgtgcccgacagattctccggcagcggctctggcaccgacttcaccctgaagatcagcagagtggaagccgaggacgtgggcgtgtactactgttttcaaggcagccacgccccctggacctttggcggaggaacaaaggtggaaatcaagggcggaggcggaagtggaggcggaggatctggcggcggaggctctgaagtgcaactggtggaatcaggcggcggactggtgcagcctggcggatctctgagactgagctgtgccgccagcggcttcaccttcagcagctacggaatgcactgggtgcgccaggcccctggcaaaggactggaatgggtggcctacatcaccaccagaagcagcaccatctactacgccgacagcgtgaagggccggttcaccatctccagagacaacgccaagaacagcctgtacctccagatgaactccctgcgggccgaggacaccgccgtgtactattgcaccagagagcccctgaccggctactacgctatggactattggggccagggcaccagcgtgaccgtgtctagtacgcgtggaatgaggactgaggatcttcccaaagctgtcgtctttctcgaaccccaatggtatcgggtgctcgaaaaagactctgtgacactgaaatgccaaggggcctactctcccgaggacaactccacacagtggtttcataatgagtccctcatcagctctcaggccagctcttatttcattgatgccgctacagtggacgactccggcgagtatcggtgtcagaccaatctgtctacactgtctgaccccgtgcagcttgaggtccacattggatggttgctcttgcaagccccacgctgggttttcaaagaggaagatccaatccatctgcggtgccacagctggaaaaacaccgctctccacaaagtcacatacctgcaaaatggcaaaggacgcaaatacttccatcacaattccgatttttacattccgaaggctaccctgaaagacagcggcagctatttctgccggggactcgtcggctccaagaatgtgtcctccgaaaccgtgaatatcacgattacccaaggactggctgtgcctacaatctctagcttctttccgcctggataccaagtctccttctgtcttgtgatggtcctcctgtttgctgtggacacaggactgtacttttccgtgaaa

SEQ ID NO: 1129 - DNA, 1422 bp, synthetic construct
  source 1..1422: mol_type = other DNA
atggccttaccagtgaccgccttgctcctgccgctggccttgctgctccacgccgccaggccgcagatcgtgctgacacagagccctgccctgatgagcgccagccctggcgagaaagtgaccatgacctgtagcgccagcagcagcgtgcgctacatgtactggtatcagcagaagcccagaagcagccccaagccctggattcacctgaccagcaatctggcctctggcgtgcccgctagattttccggctctggcagcggcaccagctacagcctgaccatcagcagcatggaagccgaggacgccgccacctactactgccagcagtggtccagccaccccttcacatttggctccggcaccaagctggaaatcaagggcggaggcggaagtggaggcggaggatctggcggcggaggctctgatgtgcaactccaggaaagcggccctggccttgtgaagcctagccagagcctgtccctgacctgtaccgtgaccggcttcagcatcaccagcgactactcttggaactggatcagacagttccctggcaacaaactggaatggatgggctacatcagctactccggccacacctcctacaaccccagcctggaaagccggatctccatcaccagagacaccagcaagaaccagttcttcttgcaactgaacagcgtgaccaccgaggataccgccacatattactgtaccagaggcaactgggacgtggtgtactggggccagggcacacttgtgaccgtgtctgctacgcgtggaatgaggactgaggatcttcccaaagctgtcgtctttctcgaaccccaatggtatcgggtgctcgaaaaagactctgtgacactgaaatgccaaggggcctactctcccgaggacaactccacacagtggtttcataatgagtccctcatcagctctcaggccagctcttatttcattgatgccgctacagtggacgactccggcgagtatcggtgtcagaccaatctgtctacactgtctgaccccgtgcagcttgaggtccacattggatggttgctcttgcaagccccacgctgggttttcaaagaggaagatccaatccatctgcggtgccacagctggaaaaacaccgctctccacaaagtcacatacctgcaaaatggcaaaggacgcaaatacttccatcacaattccgatttttacattccgaaggctaccctgaaagacagcggcagctatttctgccggggactcgtcggctccaagaatgtgtcctccgaaaccgtgaatatcacgattacccaaggactggctgtgcctacaatctctagcttctttccgcctggataccaagtctccttctgtcttgtgatggtcctcctgtttgctgtggacacaggactgtacttttccgtgaaa

SEQ ID NO: 1130 - DNA, 1449 bp, synthetic construct
  source 1..1449: mol_type = other DNA
atggccttaccagtgaccgccttgctcctgccgctggccttgctgctccacgccgccaggccggagatcgtgctgacacagagccctggaagcctggccgtgtctcctggcgagcgcgtgacaatgagctgcaagagcagccagagcgtgttcttcagcagctcccagaagaactacctggcctggtatcagcagatccccggccagagccccagactgctgatctactgggccagcaccagagaaagcggcgtgcccgatagattcaccggcagcggctctggcaccgacttcaccctgacaatcagcagcgtgcagcccgaggacctggctatctactactgccaccagtacctgagcagccggaccttcggccagggcaccaagctggaaatcaagagaggcggaggcggaagtggaggcggaggatctggcggcggaggctctcaggtgcaactgcagcagcctggcgctgaggtcgtgaagccaggcgcttccgtgaagatgtcctgcaaggccagcggctacaccttcaccagctactacatccactggatcaagcagacccctggacagggcctggaatgggtgggagtgatctaccccggcaacgacgacatcagctacaaccagaagttccagggcaaggccaccctgaccgccgacaagtctagcaccaccgcctacatgcaactgtccagcctgaccagcgaggacagcgccgtgtactactgcgccagagaagtgcggctgcggtacttcgatgtgtggggccagggaaccaccgtgaccgtgtcatctacgcgtggaatgaggactgaggatcttcccaaagctgtcgtctttctcgaaccccaatggtatcgggtgctcgaaaaagactctgtgacactgaaatgccaaggggcctactctcccgaggacaactccacacagtggtttcataatgagtccctcatcagctctcaggccagctcttatttcattgatgccgctacagtggacgactccggcgagtatcggtgtcagaccaatctgtctacactgtctgaccccgtgcagcttgaggtccacattggatggttgctcttgcaagccccacgctgggttttcaaagaggaagatccaatccatctgcggtgccacagctggaaaaacaccgctctccacaaagtcacatacctgcaaaatggcaaaggacgcaaatacttccatcacaattccgatttttacattccgaaggctaccctgaaagacagcggcagctatttctgccggggactcgtcggctccaagaatgtgtcctccgaaaccgtgaatatcacgattacccaaggactggctgtgcctacaatctctagcttctttccgcctggataccaagtctccttctgtcttgtgatggtcctcctgtttgctgtggacacaggactgtacttttccgtgaaa

SEQ ID NO: 1131 - DNA, 1461 bp, synthetic construct
  source 1..1461: mol_type = other DNA
atggccttaccagtgaccgccttgctcctgccgctggccttgctgctccacgccgccaggccggacatcgtgatgacacagtcaccagatagcctcaccgtctccctgggggagcggaccaccattaattgtaaatccagccaaagcgtgctggactcaagcaagaacaagaatagcctcgcctggtatcagcagaagcccggtcagcctccaaagctgctgctttcttgggcctccaccagagagtccgggattcctgataggtttagtggttcaggctccggcacagattttactctgaccattgattctctccagccagaggattctgcaacttattactgccagcaaagcgcccactttcctataacttttggccagggaacccgacttgaaatcaagggcggaggcggaagtggaggcggaggatctggcggcggaggctctcaggtgcagctggtgcagagcggtgccgaagtgaagaaaccaggtgcatccgttaaagtttcatgtaaggctagtggatataccttcaccaattacggaatgaactgggtgaaacaggcccctggccagggactgaagtggatggggtggattaacacctacaccggggagccgacttatgcagacgactttaaggggcgggtcacgatgacctccgacacctccaccagtaccgcctacctggagctgcacaaccttaggtcagacgataccgccgtgtattactgtgcccgatggtcttggtccgacggatactatgtctacttcgactattggggccaggggaccacagttaccgtgtcctctacgcgtggaatgaggactgaggatcttcccaaagctgtcgtctttctcgaaccccaatggtatcgggtgctcgaaaaagactctgtgacactgaaatgccaaggggcctactctcccgaggacaactccacacagtggtttcataatgagtccctcatcagctctcaggccagctcttatttcattgatgccgctacagtggacgactccggcgagtatcggtgtcagaccaatctgtctacactgtctgaccccgtgcagcttgaggtccacattggatggttgctcttgcaagccccacgctgggttttcaaagaggaagatccaatccatctgcggtgccacagctggaaaaacaccgctctccacaaagtcacatacctgcaaaatggcaaaggacgcaaatacttccatcacaattccgatttttacattccgaaggctaccctgaaagacagcggcagctatttctgccggggactcgtcggctccaagaatgtgtcctccgaaaccgtgaatatcacgattacccaaggactggctgtgcctacaatctctagcttctttccgcctggataccaagtctccttctgtcttgtgatggtcctcctgtttgctgtggacacaggactgtacttttccgtgaaa

SEQ ID NO: 1132 - DNA, 1461 bp, synthetic construct
  source 1..1461: mol_type = other DNA
atggccttaccagtgaccgccttgctcctgccgctggccttgctgctccacgccgccaggccggatgtgctgctgacccagagccctctgagcctgcctgtgacactgggacagcctgccagcatctcctgtcggagcagccagaccatcgtgcacagcaacggcaacacctacctggaatggttccagcagcggccaggccagagccccagactgctgatctaccaggtgtccaacagattcagcggcgtgcccgacagattctccggcagcggctctggcaccgacttcaccctgaagatcagccgggtggaagccgaggacgtgggcgtgtactactgttttcaaggcagccacgtgccccggacctttggcggaggaacaaaggtggaaatcaagagaggcggaggcggaagtggaggcggaggatctggcggcggaggctctcagatccaactggtgcagagcggcagcgagctgaagaaacctggggccagcgtgaaggtgtcctgcaaggccagcggctacacctttaccaactacggcatgaactgggtgcgccaggcccctggacagggcctgaaatggatgggctggatcaacaccaacaccggcgagcctaagtacgccgaagagttcaagggcagattcgccctgagcctggacaccagcgtgtccacagcctacctccagatcaacagcctgaaggccgaggataccgccgtgtacttctgcgccagaggctacggcaactacgccagaggggcttggctggcctattggggccagggaacactcgtgaccgtgtcctctacgcgtggaatgaggactgaggatcttcccaaagctgtcgtctttctcgaaccccaatggtatcgggtgctcgaaaaagactctgtgacactgaaatgccaaggggcctactctcccgaggacaactccacacagtggtttcataatgagtccctcatcagctctcaggccagctcttatttcattgatgccgctacagtggacgactccggcgagtatcggtgtcagaccaatctgtctacactgtctgaccccgtgcagcttgaggtccacattggatggttgctcttgcaagccccacgctgggttttcaaagaggaagatccaatccatctgcggtgccacagctggaaaaacaccgctctccacaaagtcacatacctgcaaaatggcaaaggacgcaaatacttccatcacaattccgatttttacattccgaaggctaccctgaaagacagcggcagctatttctgccggggactcgtcggctccaagaatgtgtcctccgaaaccgtgaatatcacgattacccaaggactggctgtgcctacaatctctagcttctttccgcctggataccaagtctccttctgtcttgtgatggtcctcctgtttgctgtggacacaggactgtacttttccgtgaaa

SEQ ID NO: 1133 - DNA, 1446 bp, synthetic construct
  source 1..1446: mol_type = other DNA
atggccttaccagtgaccgccttgctcctgccgctggccttgctgctccacgccgccaggccggaccacatcgtgctgacccagagccctagcagcctgtctgccagcctgggcgacagagtgaccatcagctgtagagccagccaggacatcagcacctacctgaactggtatcagcagaaacccgacggcaccgtgaagctgctgatcttctacaccagcagactgcacgccggggtgcccagcagattttctggcagcggctctggcacccaccacagcctgaccatctccaacctggaacaggaagatattgctacctacttctgtcagcaaggcaacagcctgcccttcaccttcggcagcggcaccaagctggaaatcaagagaggcggaggcggaagtggaggcggaggatctggcggcggaggctctcaggtgcagctgaaagagagcggccctgagctggaaaagcctggggccagcgtgaagattagctgcaaggccagcggctacagcttcaccgcctacagcatgaactgggtcaagcagaacaacggcatgagcctggaatggatcggcagcatcgacccctactacggcgacaccaaatacgcccagaagttcaagggcaaggccaccctgaccgtggataaggccagcagcaccgcctacctccagctgaagtctctgaccagcgaggacagcgccgtgtactactgcgccagacggatgattaccaccggcgactggtacttcgacgtgtggggagccggaaccaccgtgacagtgtctagcacgcgtggaatgaggactgaggatcttcccaaagctgtcgtctttctcgaaccccaatggtatcgggtgctcgaaaaagactctgtgacactgaaatgccaaggggcctactctcccgaggacaactccacacagtggtttcataatgagtccctcatcagctctcaggccagctcttatttcattgatgccgctacagtggacgactccggcgagtatcggtgtcagaccaatctgtctacactgtctgaccccgtgcagcttgaggtccacattggatggttgctcttgcaagccccacgctgggttttcaaagaggaagatccaatccatctgcggtgccacagctggaaaaacaccgctctccacaaagtcacatacctgcaaaatggcaaaggacgcaaatacttccatcacaattccgatttttacattccgaaggctaccctgaaagacagcggcagctatttctgccggggactcgtcggctccaagaatgtgtcctccgaaaccgtgaatatcacgattacccaaggactggctgtgcctacaatctctagcttctttccgcctggataccaagtctccttctgtcttgtgatggtcctcctgtttgctgtggacacaggactgtacttttccgtgaaa

SEQ ID NO: 1134 - DNA, 1446 bp, synthetic construct; identical to SEQ ID NO: 1133
  source 1..1446: mol_type = other DNA

SEQ ID NO: 1135 - DNA, 1446 bp, synthetic construct
  source 1..1446: mol_type = other DNA
atggccttaccagtgaccgccttgctcctgccgctggccttgctgctccacgccgccaggccggacatcgtgatgacccagagccccgatagcctggccgtgtctctgggagagagagccaccatcaactgccgggccagcaagagcgtgtccaccagcggctacagcttcatgcactggtatcagcagaagcccggccagccccccaagctgctgatctacctggcctccaacctggaaagcggcgtgcccgatagattcagcggcagcggctctggcaccgacttcaccctgaccatcagttctcttcaggccgaggacgtggccgtgtactactgccagcacagcagagaggtgccctggacattcggccagggcacaaaggtggaaatcaagcggggcggaggcggaagtggaggcggaggatctggcggcggaggctctcaggtgcagctggtgcagtctggggccgaagtgaagaaacctggggccagcgtgaaggtgtcctgcaaggccagcggatacacctttaccaactacggcatgaactgggtgcgccaggcccctggacagggcctggaatggatgggctggatcaacacctacaccggcgagcccacatacgccgacgccttcaagggcagattcgccttcagcctggacaccagcacctccaccgcctacctccagatcaacagcctgcggagcgacgacaccgccgtgtattattgcgccagagattacggcgactacgggatggactattggggccagggaaccaccgtgaccgtgtcctctacgcgtggaatgaggactgaggatcttcccaaagctgtcgtctttctcgaaccccaatggtatcgggtgctcgaaaaagactctgtgacactgaaatgccaaggggcctactctcccgaggacaactccacacagtggtttcataatgagtccctcatcagctctcaggccagctcttatttcattgatgccgctacagtggacgactccggcgagtatcggtgtcagaccaatctgtctacactgtctgaccccgtgcagcttgaggtccacattggatggttgctcttgcaagccccacgctgggttttcaaagaggaagatccaatccatctgcggtgccacagctggaaaaacaccgctctccacaaagtcacatacctgcaaaatggcaaaggacgcaaatacttccatcacaattccgatttttacattccgaaggctaccctgaaagacagcggcagctatttctgccggggactcgtcggctccaagaatgtgtcctccgaaaccgtgaatatcacgattacccaaggactggctgtgcctacaatctctagcttctttccgcctggataccaagtctccttctgtcttgtgatggtcctcctgtttgctgtggacacaggactgtacttttccgtgaaa

SEQ ID NO: 1136 - DNA, 1434 bp, synthetic construct
  source 1..1434: mol_type = other DNA
atggccttaccagtgaccgccttgctcctgccgctggccttgctgctccacgccgccaggccggacatcgtgatgacccagacccccctgaccctgagcgtgacaatcggacagcctgccagcatctcctgcaagagcagccagagcctgctggacagcgacggcaagacctacctgaactggctgctgcagaggccaggccagagccccgagagactgatctacctggtgtccaagctggactccggcgtgcccgatagattcacaggcagcggctccggcaccgacttcaccctgaagatcagccgggtggaagccgaggacctgggcgtgtactgttgttggcagggcacccacttcccttacaccttcggcggagggaccaaggtggaaatcaagggcggcggaggcggaagtggaggcggaggatctggcggcggaggctctcaggtgcaactgcagcagcctggcgctgaacttgtgcggccaggcgcctctgtgaagctgagctgtaaagccagcggctacaccttcaccagctactggatgaactgggtcaagcagcgcccaggccagggcctggaatggatcggaatgatcgaccccagcgacagcgagacacactacaaccacatcttcaaggacaaggccaccctgaccgtggacaagtccagcagcacagcctacctgcaactgtccagcctgaccagcgaggacagcgccgtgtactactgcgcccggaacctgtatctgtggggccagggaacaagcgtgaccgtgtctagcacgcgtggaatgaggactgaggatcttcccaaagctgtcgtctttctcgaaccccaatggtatcgggtgctcgaaaaagactctgtgacactgaaatgccaaggggcctactctcccgaggacaactccacacagtggtttcataatgagtccctcatcagctctcaggccagctcttatttcattgatgccgctacagtggacgactccggcgagtatcggtgtcagaccaatctgtctacactgtctgaccccgtgcagcttgaggtccacattggatggttgctcttgcaagccccacgctgggttttcaaagaggaagatccaatccatctgcggtgccacagctggaaaaacaccgctctccacaaagtcacatacctgcaaaatggcaaaggacgcaaatacttccatcacaattccgatttttacattccgaaggctaccctgaaagacagcggcagctatttctgccggggactcgtcggctccaagaatgtgtcctccgaaaccgtgaatatcacgattacccaaggactggctgtgcctacaatctctagcttctttccgcctggataccaagtctccttctgtcttgtgatggtcctcctgtttgctgtggacacaggactgtacttttccgtgaaa

SEQ ID NO: 1137 - DNA, 1443 bp, synthetic construct
  source 1..1443: mol_type = other DNA
atggccttaccagtgaccgccttgctcctgccgctggccttgctgctccacgccgccaggccggacatccagttgacccagtcccccagctcactcagcgccagtgtgggggaccgggtgaccattacctgtaaagccagtcagagtgtggactatgagggggatagcttcctgaattggtatcagcagaagcctggcaaagccccaaagctgctgatctacgctgcatctaatctggagtcaggcgtgccttctaggttctccggtagtgggtctgggaccgatttcacattgaccatttcatccctccaacccgaggatttcgctacatattactgtcagcagtccaatgaggaccctctcacctttggccagggcaccaaagttgaaattaagagaggcggaggcggaagtggaggcggaggatctggcggcggaggctctgaagtccaacttgtggagtctggagggggcctggtgcagcccggcggctctctcagactgtcttgtgcggcaagcggctacaccttcagctcttactggatagaatgggtgaggcaggcacctggaaagggactggagtggattggagagattctgccaggagggggagatacaaattacaatgaaatcttcaaggggcgggccaccttttcagcggataccagcaagaatacagcttacctgcagatgaatagcctccgggcagaagataccgctgtttattattgcacgagacgggtgccaataagactggactattgggggcaagggactcttgtcaccgtcagttcaacgcgtggaatgaggactgaggatcttcccaaagctgtcgtctttctcgaaccccaatggtatcgggtgctcgaaaaagactctgtgacactgaaatgccaaggggcctactctcccgaggacaactccacacagtggtttcataatgagtccctcatcagctctcaggccagctcttatttcattgatgccgctacagtggacgactccggcgagtatcggtgtcagaccaatctgtctacactgtctgaccccgtgcagcttgaggtccacattggatggttgctcttgcaagccccacgctgggttttcaaagaggaagatccaatccatctgcggtgccacagctggaaaaacaccgctctccacaaagtcacatacctgcaaaatggcaaaggacgcaaatacttccatcacaattccgatttttacattccgaaggctaccctgaaagacagcggcagctatttctgccggggactcgtcggctccaagaatgtgtcctccgaaaccgtgaatatcacgattacccaaggactggctgtgcctacaatctctagcttctttccgcctggataccaagtctccttctgtcttgtgatggtcctcctgtttgctgtggacacaggactgtacttttccgtgaaa

SEQ ID NO: 1138 - DNA, 1467 bp, synthetic construct
  source 1..1467: mol_type = other DNA
atggccttaccagtgaccgccttgctcctgccgctggccttgctgctccacgccgccaggccggacatcgtgatgagccagagccctagcagcctggccgtgtccgtgggcgagaaagtgaccatgagctgcaagagcagccagtccctgctgcacagcagcaaccagaagaactacctggcctggtatcagcagaagcccggccagtcccccaaggtgctgatctactgggccagcaccagagaaagcggcgtgcccgatagattcaccggcagcggctctggcaccgacttcaccctgaccatcaccagcgtgaagtccgaggacctggctgtgtactactgccagcagtattacagctacccctggaccttcggcggaggcacccggctggaaatcaaaagaggcggaggcggaagtggaggcggaggatctggcggcggaggctctgaagtgcaactccagcagagcgtggccgagcttgtgaagcctggcgcttccgtgaagatgtcctgcaaggtgtccggctacaccctgacagaccacaccatccactggatgaagcagcggcctgagcagggcctggaatggatcggctacatctaccccagggacggcatcaccggctacaacgagaagttcaagggcaaggccacactgaccgccgacaccagcagcagcacagcctacatgcaactgaacagcctgaccagcgaggacagcgccgtgtacttctgtgccagatggggctacagctacagaaactacgcctactactacgactactggggccagggcacaaccctgaccgtgtctagtacgcgtggaatgaggactgaggatcttcccaaagctgtcgtctttctcgaaccccaatggtatcgggtgctcgaaaaagactctgtgacactgaaatgccaaggggcctactctcccgaggacaactccacacagtggtttcataatgagtccctcatcagctctcaggccagctcttatttcattgatgccgctacagtggacgactccggcgagtatcggtgtcagaccaatctgtctacactgtctgaccccgtgcagcttgaggtccacattggatggttgctcttgcaagccccacgctgggttttcaaagaggaagatccaatccatctgcggtgccacagctggaaaaacaccgctctccacaaagtcacatacctgcaaaatggcaaaggacgcaaatacttccatcacaattccgatttttacattccgaaggctaccctgaaagacagcggcagctatttctgccggggactcgtcggctccaagaatgtgtcctccgaaaccgtgaatatcacgattacccaaggactggctgtgcctacaatctctagcttctttccgcctggataccaagtctccttctgtcttgtgatggtcctcctgtttgctgtggacacaggactgtacttttccgtgaaa

SEQ ID NO: 1139 - DNA, 1458 bp, synthetic construct
  source 1..1458: mol_type = other DNA
atggccttaccagtgaccgccttgctcctgccgctggccttgctgctccacgccgccaggccggagatcgtgctgacacagagccctggcaccctgagcctgtctccaggcgaaagagccacactgagctgtcgggccagccagagcgtgtccagctcttacctggcctggtatcagcagaagcccggccaggctccccggctgctgatctacggaacaagcagcagagccaccggcatccccgacagattttctggcagcggctccggcaccgacttcaccctgacaatcagcagactggaacccgaggacttcgccgtgtactactgccagcagtacggcagcagccccttcacctttggcggaggcaccaaggtggaaatcaagagaggcggaggcggaagtggaggcggaggatctggcggcggaggctctcaggtgcaactccaggaatctggccccggactggctaagcccagcgagacactgagcctgacctgtaccgtgtccggcgacagcatcaccagctactactggtcctggatcagacagccccctggcaagggcctggaatggatcggctacatctactacagcggcagcaccaactacaaccccagcctgaagtccagagtgaccatcagcgtggacaccagcaagaaccagttctccctgaagctgagcagcgtgacagccgccgacaccgccgtgtattattgcgccagagatcagcggagaatcgccgctgccggcacccacttttacggcatggatgtgtggggccagggcaccaccgtgaccgtgtcatctacgcgtggaatgaggactgaggatcttcccaaagctgtcgtctttctcgaaccccaatggtatcgggtgctcgaaaaagactctgtgacactgaaatgccaaggggcctactctcccgaggacaactccacacagtggtttcataatgagtccctcatcagctctcaggccagctcttatttcattgatgccgctacagtggacgactccggcgagtatcggtgtcagaccaatctgtctacactgtctgaccccgtgcagcttgaggtccacattggatggttgctcttgcaagccccacgctgggttttcaaagaggaagatccaatccatctgcggtgccacagctggaaaaacaccgctctccacaaagtcacatacctgcaaaatggcaaaggacgcaaatacttccatcacaattccgatttttacattccgaaggctaccctgaaagacagcggcagctatttctgccggggactcgtcggctccaagaatgtgtcctccgaaaccgtgaatatcacgattacccaaggactggctgtgcctacaatctctagcttctttccgcctggataccaagtctccttctgtcttgtgatggtcctcctgtttgctgtggacacaggactgtacttttccgtgaaa

SEQ ID NO: 1140 - DNA, 1428 bp, synthetic construct
  source 1..1428: mol_type = other DNA
atggccttaccagtgaccgccttgctcctgccgctggccttgctgctccacgccgccaggccggacatccagatgacccagagccccagcagcctgtctgccagcgtgggcgacagagtgaccatcacctgtagagccagccagagcatcagcctgtggctgaactggtatcagcagaagcccggcaaggcccccaagctgctgatctacgccgccagcacactccagagcggcgtgccaagcagattttccggcagcggctccggcaccgacttcaccctgacaatcagctccctccagcccgaggacttcgccacctactactgccagcagtactacaccagcccctacaccttcggccagggcaccaaggtggaaatcaagagaggcggaggcggaagtggaggcggaggatctggcggcggaggctctcaggtgcaactgctggaatctggcggcggactggtgcagcctggcggatctctgagactgagctgtgccgccagcggcttcaccttcagcagctacgccatgagctgggtgcgccaggcccctggaaaaggactggaatgggtgtccgtgatccggtccagcggcagcagcacctattacgccgatagcgtgaagggccggttcaccatcagccgggacaacagcaagaacaccctgtacctccagatgaacagcctgcgggccgaggacaccgccgtgtactattgtgctaggggaggcggctacttcgactactggggccagggaacactcgtgaccgtgtcctctacgcgtggaatgaggactgaggatcttcccaaagctgtcgtctttctcgaaccccaatggtatcgggtgctcgaaaaagactctgtgacactgaaatgccaaggggcctactctcccgaggacaactccacacagtggtttcataatgagtccctcatcagctctcaggccagctcttatttcattgatgccgctacagtggacgactccggcgagtatcggtgtcagaccaatctgtctacactgtctgaccccgtgcagcttgaggtccacattggatggttgctcttgcaagccccacgctgggttttcaaagaggaagatccaatccatctgcggtgccacagctggaaaaacaccgctctccacaaagtcacatacctgcaaaatggcaaaggacgcaaatacttccatcacaattccgatttttacattccgaaggctaccctgaaagacagcggcagctatttctgccggggactcgtcggctccaagaatgtgtcctccgaaaccgtgaatatcacgattacccaaggactggctgtgcctacaatctctagcttctttccgcctggataccaagtctccttctgtcttgtgatggtcctcctgtttgctgtggacacaggactgtacttttccgtgaaa

SEQ ID NO: 1141 - DNA, 1437 bp, synthetic construct
  source 1..1437: mol_type = other DNA
atggccttaccagtgaccgccttgctcctgccgctggccttgctgctccacgccgccaggccggacatccagatgacccagagccccagcagcctgtctgccagcgtgggcgacagagtgaccatcacctgtagagccagccagagcatcagcagctacctgaactggtatcagcagaagcccggcaaggcccccaaactgctgatctacgccgtgtccacactccagagcggcgtgcccagcagattttctggcagcggctccggcaccgacttcaccctgacaatcagctccctccagcccgaggacttcgccacctactactgtcagcagagcggcaccttccctcccaccacatttggacagggcaccaaggtggaaatcaagagaggcggaggcggaagtggaggcggaggatctggcggcggaggctctcaggtgcaactgctggaatctggcggcggactggtgcagcctggcggatctctgagactgagctgtgccgccagcggcttcaccttcagcagccacggaatgcactgggtgcgccaggcccctggaaagggactggaatgggtgtccgtgatctccggcagcggcagcaataccggctacgccgatagcgtgaagggccggttcaccatcagccgggacaacagcaagaacaccctgtacctccagatgaacagcctgcgggccgaggacaccgccgtgtactattgtgccagacagtggggcagctacgccttcgattcttggggccagggcaccctcgtgaccgtgtcatctacgcgtggaatgaggactgaggatcttcccaaagctgtcgtctttctcgaaccccaatggtatcgggtgctcgaaaaagactctgtgacactgaaatgccaaggggcctactctcccgaggacaactccacacagtggtttcataatgagtccctcatcagctctcaggccagctcttatttcattgatgccgctacagtggacgactccggcgagtatcggtgtcagaccaatctgtctacactgtctgaccccgtgcagcttgaggtccacattggatggttgctcttgcaagccccacgctgggttttcaaagaggaagatccaatccatctgcggtgccacagctggaaaaacaccgctctccacaaagtcacatacctgcaaaatggcaaaggacgcaaatacttccatcacaattccgatttttacattccgaaggctaccctgaaagacagcggcagctatttctgccggggactcgtcggctccaagaatgtgtcctccgaaaccgtgaatatcacgattacccaaggactggctgtgcctacaatctctagcttctttccgcctggataccaagtctccttctgtcttgtgatggtcctcctgtttgctgtggacacaggactgtacttttccgtgaaa

SEQ ID NO: 1142 - DNA, 1413 bp, synthetic construct
  source 1..1413: mol_type = other DNA
atggccttaccagtgaccgccttgctcctgccgctggccttgctgctccacgccgccaggccgatgacccagagccccaagttcctgctggtgtctgccggcgacagagtgaccctgacatgcaaggccagccagagcgtgaacaacgacgtgtactggtatcagcaggaacccggccagtcccccaagctgctgatctactgggccagcaccagagaaagcggcgtgcccgatagattcaccggcagcggctctggcaccgacttcaccctgacaatcagcagcgtgcaggccgaggacctggccgtgtactactgcaagcagagctacaacctgtacaccttcggcggaggcaccaagctggaaatcaagagaggcggcggaggatctggcggaggcggatctgggggcggaggctctgaatctggaagaggactggtgcagcctggcggcagcagaaagctgtcttgtgccgccagcggcttcaccttcagcaccagcggaatgcactgggtgcgccaggcccctgagaagggactggaatgggtggcctacatcagctccggcagcaccaccatctaccacgccgataccgtgaagggccggttcaccatcagccgggacaaccccaagaataccctgttcctccagatgaccagcctgcggagcgaggacaccgccatgtactattgctgcgccagaagcggccagttcggcaactacttcgactactggggccagggcaccaccctgaccgtgtcatctacgcgtggaatgaggactgaggatcttcccaaagctgtcgtctttctcgaaccccaatggtatcgggtgctcgaaaaagactctgtgacactgaaatgccaaggggcctactctcccgaggacaactccacacagtggtttcataatgagtccctcatcagctctcaggccagctcttatttcattgatgccgctacagtggacgactccggcgagtatcggtgtcagaccaatctgtctacactgtctgaccccgtgcagcttgaggtccacattggatggttgctcttgcaagccccacgctgggttttcaaagaggaagatccaatccatctgcggtgccacagctggaaaaacaccgctctccacaaagtcacatacctgcaaaatggcaaaggacgcaaatacttccatcacaattccgatttttacattccgaaggctaccctgaaagacagcggcagctatttctgccggggactcgtcggctccaagaatgtgtcctccgaaaccgtgaatatcacgattacccaaggactggctgtgcctacaatctctagcttctttccgcctggataccaagtctccttctgtcttgtgatggtcctcctgtttgctgtggacacaggactgtacttttccgtgaaa

SEQ ID NO: 1143 - DNA, 1428 bp, synthetic construct
  source 1..1428: mol_type = other DNA
atggccttaccagtgaccgccttgctcctgccgctggccttgctgctccacgccgccaggccgcagagcccatctagcctggctgtgtctgccggcgagaaagtgaccatgagctgcaagagcagccagagcctgctgaacagccggacccggaagaactacctggcctggtatcagcagaagcccggccagagccccaagctgctgatctactgggccagcaccagagaaagcggcgtgcccgatagattcaccggctctggcagcggcaccgacttcaccctgacaatcagcagcgtgcaggccgaggacctggccgtgtactactgcaagcagagcaacctgtacaccttcggcggaggcaccaagctggaaatcaagggcggaggcggaagtggaggcggaggatctggcggcggaggctctcaggtgcagctggaagagtctggacccgagcttgtgaagcctggggccagcgtgaagctgtcctgtaaagccagcggctacaccttcaccgagtacatcatccactgggtcaagcagcggagcggccagggcctggaatggatcggctggttttaccctggctccggcagcatcaagtacaacgagaagttcaaggacaaggccaccctgaccgccgacaagtccagcagcaccgtgtacatggaactgagcggcctgaccagcgaggacagcgccgtgtatttctgcgccagacacgacggctacagctacttcgactattggggccagggcaccacactgaccgtgtcctctacgcgtggaatgaggactgaggatcttcccaaagctgtcgtctttctcgaaccccaatggtatcgggtgctcgaaaaagactctgtgacactgaaatgccaaggggcctactctcccgaggacaactccacacagtggtttcataatgagtccctcatcagctctcaggccagctcttatttcattgatgccgctacagtggacgactccggcgagtatcggtgtcagaccaatctgtctacactgtctgaccccgtgcagcttgaggtccacattggatggttgctcttgcaagccccacgctgggttttcaaagaggaagatccaatccatctgcggtgccacagctggaaaaacaccgctctccacaaagtcacatacctgcaaaatggcaaaggacgcaaatacttccatcacaattccgatttttacattccgaaggctaccctgaaagacagcggcagctatttctgccggggactcgtcggctccaagaatgtgtcctccgaaaccgtgaatatcacgattacccaaggactggctgtgcctacaatctctagcttctttccgcctggataccaagtctccttctgtcttgtgatggtcctcctgtttgctgtggacacaggactgtacttttccgtgaaa

SEQ ID NO: 1144 - DNA, 1437 bp, synthetic construct
  source 1..1437: mol_type = other DNA
atggccttaccagtgaccgccttgctcctgccgctggccttgctgctccacgccgccaggccggacatccagatgacccagagccccagcagcctgtctgcctctctgggcgagagagtgtccctgacctgtcgggccacacaggaactgagcggctacctgtcttggctgcagcagaagcccgacggcaccatcaagcggctgatctacgccgccagcaccctggatagcggcgtgcccaagagattcagcggcaacagaagcggcagcgactacagcctgaccatcagctccctggaaagcgaggacttcgccgactactactgcctgcagtacgccatctacccctacaccttcggcggaggcaccaagctggaaatcaagggcggaggcggaagtggaggcggaggatctggcggcggaggctctgaggtgcaactgcagcagtctggccccgagcttgtgaagcctggcgcctccgtgaagatgagctgcaaggccagcggctacacctttaccagctacttcatccactgggtcaagcagaaacccggccagggcctggaatggatcggcttcatcaacccttacaacgacggcagcaagtacaacgagaagttcaagggcaaggccaccctgaccagcgacaagagcagcagcaccgcctacatggaactgtccagcctgacatccgaggacagcgccgtgtactactgcaccagggacgacggctactacggctacgccatggactactggggccagggaacaagcgtcaccgtgtcctctacgcgtggaatgaggactgaggatcttcccaaagctgtcgtctttctcgaaccccaatggtatcgggtgctcgaaaaagactctgtgacactgaaatgccaaggggcctactctcccgaggacaactccacacagtggtttcataatgagtccctcatcagctctcaggccagctcttatttcattgatgccgctacagtggacgactccggcgagtatcggtgtcagaccaatctgtctacactgtctgaccccgtgcagcttgaggtccacattggatggttgctcttgcaagccccacgctgggttttcaaagaggaagatccaatccatctgcggtgccacagctggaaaaacaccgctctccacaaagtcacatacctgcaaaatggcaaaggacgcaaatacttccatcacaattccgatttttacattccgaaggctaccctgaaagacagcggcagctatttctgccggggactcgtcggctccaagaatgtgtcctccgaaaccgtgaatatcacgattacccaaggactggctgtgcctacaatctctagcttctttccgcctggataccaagtctccttctgtcttgtgatggtcctcctgtttgctgtggacacaggactgtacttttccgtgaaa

SEQ ID NO: 1145 - DNA, 1452 bp, synthetic construct
  source 1..1452: mol_type = other DNA
atggccttaccagtgaccgccttgctcctgccgctggccttgctgctccacgccgccaggccggacaccatcgtgctgacacagagccctgcttccctggccgtgtccctgggacagagagccaccatctcttgcagagccagcgagagcgtggacagctacggcaacagcttcatgcactggtatcagcagaagcccggccagccccccaagctgctgatctacctggcctccaacctggaaagcggcgtgcccgccagattttctggcagcggcagcagaaccgacttcaccctgaccatcgaccccgtggaagccgatgatgccgccacctactactgccagcagaacaactacgacccctggaccttcggcggaggcaccaagctggaaatcaagggcggaggcggaagtggaggcggaggatctggcggcggaggctctgaagtgcaactccagcagagcggccctgagcttgtgaagcctggcgcttccgtgaagatgagctgcaaggccagcggctacaccttcaccagctacgtgatgcactgggtcaagcagaaacctggacagggcctggaatggatcggctacatcaacccctacaacgacggcaccaagtacaacgagaagttcaagggcaaggccaccctgacaagcgacaccagcagcagcaccgcctacatggaactgaacagcctgaccagcgaggacagcgccgtgtacttctgcgccagacccatctacttcgacaacgactacttcgattactggggccagggcaccaccctgaaggtgtcctctacgcgtggaatgaggactgaggatcttcccaaagctgtcgtctttctcgaaccccaatggtatcgggtgctcgaaaaagactctgtgacactgaaatgccaaggggcctactctcccgaggacaactccacacagtggtttcataatgagtccctcatcagctctcaggccagctcttatttcattgatgccgctacagtggacgactccggcgagtatcggtgtcagaccaatctgtctacactgtctgaccccgtgcagcttgaggtccacattggatggttgctcttgcaagccccacgctgggttttcaaagaggaagatccaatccatctgcggtgccacagctggaaaaacaccgctctccacaaagtcacatacctgcaaaatggcaaaggacgcaaatacttccatcacaattccgatttttacattccgaaggctaccctgaaagacagcggcagctatttctgccggggactcgtcggctccaagaatgtgtcctccgaaaccgtgaatatcacgattacccaaggactggctgtgcctacaatctctagcttctttccgcctggataccaagtctccttctgtcttgtgatggtcctcctgtttgctgtggacacaggactgtacttttccgtgaaa

SEQ ID NO: 1146 - DNA, 1434 bp, synthetic construct
  source 1..1434: mol_type = other DNA
atggccttaccagtgaccgccttgctcctgccgctggccttgctgctccacgccgccaggccggacatccagatgacccagagccccagcagcctgtctgccagcgtgggcgacagagtgaccatcacatgcaaggccagccaggacgtgggaatcgccgtggcctggtatcagcagaaacccggcaaggtgcccaagctgctgatctactgggccagcaccagacacaccggcgtgcccgatagattttccggcagcggctccggcaccgacttcaccctgacaatcagctccctccagcccgaggacgtggcaacctactactgccagcagtacagcagctacccctacaccttcggccagggcaccaaggtggaaatcaagggcggaggcggaagtggaggcggaggatctggcggcggaggctctgaagtgcaactggtggaatcaggcggcggactggtgcagcctggcggatctctgagactgagctgtgccgccagcggcttcgacttcagccggtactggatgagctgggtgcgccaggcccctggcaaaggactggaatggatcggcgagatcaaccccgacagcagcaccatcaactacgcccccagcctgaaggacaagttcatcatcagccgggacaacgccaagaacagcctgtacctccagatgaactccctgcgggccgaggacaccgccgtgtactattgcgccagacccgacggcaactactggtacttcgacgtgtggggccagggaaccctcgtgaccgtgtcatctacgcgtggaatgaggactgaggatcttcccaaagctgtcgtctttctcgaaccccaatggtatcgggtgctcgaaaaagactctgtgacactgaaatgccaaggggcctactctcccgaggacaactccacacagtggtttcataatgagtccctcatcagctctcaggccagctcttatttcattgatgccgctacagtggacgactccggcgagtatcggtgtcagaccaatctgtctacactgtctgaccccgtgcagcttgaggtccacattggatggttgctcttgcaagccccacgctgggttttcaaagaggaagatccaatccatctgcggtgccacagctggaaaaacaccgctctccacaaagtcacatacctgcaaaatggcaaaggacgcaaatacttccatcacaattccgatttttacattccgaaggctaccctgaaagacagcggcagctatttctgccggggactcgtcggctccaagaatgtgtcctccgaaaccgtgaatatcacgattacccaaggactggctgtgcctacaatctctagcttctttccgcctggataccaagtctccttctgtcttgtgatggtcctcctgtttgctgtggacacaggactgtacttttccgtgaaa

SEQ ID NO: 1147 - DNA, 1437 bp, synthetic construct
  source 1..1437: mol_type = other DNA
atggccttaccagtgaccgccttgctcctgccgctggccttgctgctccacgccgccaggccggacatcgtgatgacccagagccagaagagcatgagcaccagcgtgggcgacagagtgagcatcacctgcaaggccagccaggacgtgatcaccggcgtggcctggtaccagcagaagcccggccagagccccaagctgctgatctacagcgccagctacagatacaccggcgtgcccgacagattcaccggcagcggcagcggcaccgacttcaccttcaccatcagcaacgtgcaggccgaggacctggccgtgtactactgccagcagcactacagcacccccctgaccttcggcgccggcaccaagctggagctgaagggcggaggcggaagtggaggcggaggatctggcggcggaggctctcaggtgcagctgcagcagcccggcgccgagctggtgagacccggcgccagcgtgaagctgagctgcaaggccagcggctacagcttcaccacctactggatgaactgggtgaagcagagacccggccagggcctggagtggatcggcatgatccaccccagcgacagcgagaccagactgaaccagaagttcaaggacaaggccaccctgaccgtggacaagagcagcagcaccgcctacatgcagctgagcagccccaccagcgaggacagcgccgtgtactactgcgccagaagcaccatgatcgccaccagagccatggactactggggccagggcaccagcgtgaccgtgagcagcacgcgtggaatgaggactgaggatcttcccaaagctgtcgtctttctcgaaccccaatggtatcgggtgctcgaaaaagactctgtgacactgaaatgccaaggggcctactctcccgaggacaactccacacagtggtttcataatgagtccctcatcagctctcaggccagctcttatttcattgatgccgctacagtggacgactccggcgagtatcggtgtcagaccaatctgtctacactgtctgaccccgtgcagcttgaggtccacattggatggttgctcttgcaagccccacgctgggttttcaaagaggaagatccaatccatctgcggtgccacagctggaaaaacaccgctctccacaaagtcacatacctgcaaaatggcaaaggacgcaaatacttccatcacaattccgatttttacattccgaaggctaccctgaaagacagcggcagctatttctgccggggactcgtcggctccaagaatgtgtcctccgaaaccgtgaatatcacgattacccaaggactggctgtgcctacaatctctagcttctttccgcctggataccaagtctccttctgtcttgtgatggtcctcctgtttgctgtggacacaggactgtacttttccgtgaaa

SEQ ID NO: 1148 - DNA, 1455 bp, synthetic construct
  source 1..1455: mol_type = other DNA
atggccttaccagtgaccgccttgctcctgccgctggccttgctgctccacgccgccaggccgcagagcgtgctgacacagcctccatccgtgtctggcgctccaggccagagagtgaccatctcctgtaccggcagcggcagcaacatcggagccccctacgacgtgtcctggtatcagcaactgcctggcaccgcccccaagctgctgatctaccacaacaacaagcggcccagcggcgtgcccgatagattcagcggctctaagagcggcaccagcgccagcctggctatcactggactccaggccgaggacgaggccgactactactgtgccacagtggaagccggcctgagcggctctgtgtttggcggcggaacaaagctgaccgtgctgggagctggcggaggcggaagtggaggcggaggatctggcggcggaggctctcaggtgcaactggtgcagagcggagccgaagtgaagaaacctggggccagcgtgaaggtgtcctgcaaggtgtccggctacaccctgaccgagctgagcattcactgggtgcgccaggcccctggcaagggactggaatggatgggcggcttcgaccccgaagagaacgagatcgtgtacgcccagcggttccagggcagagtgacaatgaccgaggacaccagcaccgacaccgcctacatggaactgagcagcctgcggagcgaggataccgccgtgtactactgcgccatcgtgggcagcttcagccctctgacactgggcctgtggggccagggaactatggtcaccgtgtccagcacgcgtggaatgaggactgaggatcttcccaaagctgtcgtctttctcgaaccccaatggtatcgggtgctcgaaaaagactctgtgacactgaaatgccaaggggcctactctcccgaggacaactccacacagtggtttcataatgagtccctcatcagctctcaggccagctcttatttcattgatgccgctacagtggacgactccggcgagtatcggtgtcagaccaatctgtctacactgtctgaccccgtgcagcttgaggtccacattggatggttgctcttgcaagccccacgctgggttttcaaagaggaagatccaatccatctgcggtgccacagctggaaaaacaccgctctccacaaagtcacatacctgcaaaatggcaaaggacgcaaatacttccatcacaattccgatttttacattccgaaggctaccctgaaagacagcggcagctatttctgccggggactcgtcggctccaagaatgtgtcctccgaaaccgtgaatatcacgattacccaaggactggctgtgcctacaatctctagcttctttccgcctggataccaagtctccttctgtcttgtgatggtcctcctgtttgctgtggacacaggactgtacttttccgtgaaa

SEQ ID NO: 1149 - DNA, 1455 bp, synthetic construct
  source 1..1455: mol_type = other DNA
atggccttaccagtgaccgccttgctcctgccgctggccttgctgctccacgccgccaggccgcagagcgtgctgacacagcctccatccgtgtctggcgctccaggccagagagtgaccatctcctgtaccggcagcggcagcaacatcggagccccctacgacgtgtcctggtatcagcaactgcctggcaccgcccccaagctgctgatctaccacaacaacaagcggcccagcggcgtgcccgatagattcagcggctctaagagcggcaccagcgccagcctggctatcactggactccaggccgaggacgaggccgactactactgccagagctacgacagcagcagcatcagcaccatcttcggcggaggcaccaagctgacagtgctgggagctggcggaggcggaagtggaggcggaggatctggcggcggaggctctcaggtgcaactggtgcagagcggagccgaagtgaagaaacctggggccagcgtgaaggtgtcctgcaaggtgtccggctacaccctgaccgagctgagcattcactgggtgcgccaggcccctggcaagggactggaatggatgggcggcttcgaccccgaagagaacgagatcgtgtacgcccagcggttccagggcagagtgacaatgaccgaggacaccagcaccgacaccgcctacatggaactgagcagcctgcggagcgaggataccgccgtgtactactgtgccatcgtgggcagcttcagcggaatcgcctacagaccttggggccagggcacaatggtcaccgtgtctagcacgcgtggaatgaggactgaggatcttcccaaagctgtcgtctttctcgaaccccaatggtatcgggtgctcgaaaaagactctgtgacactgaaatgccaaggggcctactctcccgaggacaactccacacagtggtttcataatgagtccctcatcagctctcaggccagctcttatttcattgatgccgctacagtggacgactccggcgagtatcggtgtcagaccaatctgtctacactgtctgaccccgtgcagcttgaggtccacattggatggttgctcttgcaagccccacgctgggttttcaaagaggaagatccaatccatctgcggtgccacagctggaaaaacaccgctctccacaaagtcacatacctgcaaaatggcaaaggacgcaaatacttccatcacaattccgatttttacattccgaaggctaccctgaaagacagcggcagctatttctgccggggactcgtcggctccaagaatgtgtcctccgaaaccgtgaatatcacgattacccaaggactggctgtgcctacaatctctagcttctttccgcctggataccaagtctccttctgtcttgtgatggtcctcctgtttgctgtggacacaggactgtacttttccgtgaaa

SEQ ID NO: 1150 - DNA, 1449 bp, synthetic construct
  source 1..1449: mol_type = other DNA
atggccttaccagtgaccgccttgctcctgccgctggccttgctgctccacgccgccaggccggacatccagatgacccagagccccagcagcctgtctgccagcgtgggcgacagagtgaccatcacctgtagcgccagcagcagcgtgtcctacatgtactggtatcagcagaagcccggcaaggcccccaagctgctgatctacctgaccagcaatctggcctccggcgtgcccagcagattttctggcagcggctccggcaccgacttcaccctgacaatcagctccctccagcccgaggacttcgccacctactactgtcagcagtggcggagcaaccccttcaccttcggccagggcaccaagctggaaatcaagagaggcggaggcggaagtggaggcggaggatctggcggcggaggctctcagatcaccctgaaagagtccggccccaccctcgtgaagcctacccagaccctgacactgacctgcaccttcagcggcttcagcctgagcacaagcggcatgggcgtgggctggatcagacagcctcctggaaaggccctggaatggctggcccacatttggtgggacgacgtgaagcggtacagccccagcctgaagtcccggctgaccattaccaaggacaccagcaagaaccaggtggtgctgaccatgacaaacatggaccccgtggacaccgccacatattactgcgcccggatcgtgtccttcgacaacgacgtggtgtccgctatggactactggggccagggaaccctcgtgaccgtgtctagtacgcgtggaatgaggactgaggatcttcccaaagctgtcgtctttctcgaaccccaatggtatcgggtgctcgaaaaagactctgtgacactgaaatgccaaggggcctactctcccgaggacaactccacacagtggtttcataatgagtccctcatcagctctcaggccagctcttatttcattgatgccgctacagtggacgactccggcgagtatcggtgtcagaccaatctgtctacactgtctgaccccgtgcagcttgaggtccacattggatggttgctcttgcaagccccacgctgggttttcaaagaggaagatccaatccatctgcggtgccacagctggaaaaacaccgctctccacaaagtcacatacctgcaaaatggcaaaggacgcaaatacttccatcacaattccgatttttacattccgaaggctaccctgaaagacagcggcagctatttctgccggggactcgtcggctccaagaatgtgtcctccgaaaccgtgaatatcacgattacccaaggactggctgtgcctacaatctctagcttctttccgcctggataccaagtctccttctgtcttgtgatggtcctcctgtttgctgtggacacaggactgtacttttccgtgaaa

SEQ ID NO: 1151 - DNA, 1434 bp, synthetic construct
  source 1..1434: mol_type = other DNA
atggccttaccagtgaccgccttgctcctgccgctggccttgctgctccacgccgccaggccggagatcgtgatgacccagagccctgccaccctgtccgtgtctccaggcgaaagagccaccctgagctgcaaggcttcccagagcgtgtccaacgacgtcgtgtggtatcagcagaagcccggccaggcccccagactgctgatctactacgccagcaacagatacaccggcatccccgccagattcagcggctctggcagcggcaccgagttcaccctgacaatcagcagcctccagagcgaggacttcgccgtgtactactgtcagcaggactacaccagcccctggaccttcggccagggcaccaagctggaaatcaagagaggcggaggcggaagtggaggcggaggatctggcggcggaggctctcaggtgcaactggtgcagagcggagccgaagtgaagaaacctggggccagcgtgaaggtgtcctgcaaggccagcggctacacctttaccaactacggcatgaactgggtgcgccaggctcctggacagggcctggaatggatgggctggatcaacacctacaccggcgagcccacctacgccgacgacttcaagggcagagtgaccatgaccaccgacaccagcacctccaccgcctacatggaactgcggagcctgagaagcgacgacaccgccgtgtattattgcgcccggatcggcgacagcagccccagcgattattggggccagggaaccctcgtgaccgtgtcctctacgcgtggaatgaggactgaggatcttcccaaagctgtcgtctttctcgaaccccaatggtatcgggtgctcgaaaaagactctgtgacactgaaatgccaaggggcctactctcccgaggacaactccacacagtggtttcataatgagtccctcatcagctctcaggccagctcttatttcattgatgccgctacagtggacgactccggcgagtatcggtgtcagaccaatctgtctacactgtctgaccccgtgcagcttgaggtccacattggatggttgctcttgcaagccccacgctgggttttcaaagaggaagatccaatccatctgcggtgccacagctggaaaaacaccgctctccacaaagtcacatacctgcaaaatggcaaaggacgcaaatacttccatcacaattccgatttttacattccgaaggctaccctgaaagacagcggcagctatttctgccggggactcgtcggctccaagaatgtgtcctccgaaaccgtgaatatcacgattacccaaggactggctgtgcctacaatctctagcttctttccgcctggataccaagtctccttctgtcttgtgatggtcctcctgtttgctgtggacacaggactgtacttttccgtgaaa

SEQ ID NO: 1152 - DNA, 1434 bp, synthetic construct
  source 1..1434: mol_type = other DNA
atggccttaccagtgaccgccttgctcctgccgctggccttgctgctccacgccgccaggccggacatcctgctgacccagagccccgtgatcctgtccgtgtctcctggcgagagagtgtccttcagctgtcgggccagccagagcatcggcaccaacatccactggtatcagcagcggaccaacggcagccccagactgctgattaagtacgccagcgagtccatcagcggcatccccagcagattttccggcagcggctccggcaccgacttcaccctgagcatcaacagcgtggaaagcgaggacattgccgactactactgccagcagaacaacaactggcccaccaccttcggagccggcaccaagctggaactgaagggcggaggcggaagtggaggcggaggatctggcggcggaggctctcaggtgcagctgaagcagagcggacctggcctggtgcagcctagccagagcctgtccatcacctgtaccgtgtccggcttcagcctgaccaactacggcgtgcactgggtgcgccagagccctggaaaaggactggaatggctgggagtgatttggagcggcggcaacaccgactacaacacccccttcaccagcagactgtctatcaacaaggacaacagcaagagccaggtgttcttcaagatgaacagcctccagagcaacgacaccgccatctactactgtgctagagccctgacctactatgactacgagttcgcctactggggccagggcacactcgtgacagtgtctgctacgcgtggaatgaggactgaggatcttcccaaagctgtcgtctttctcgaaccccaatggtatcgggtgctcgaaaaagactctgtgacactgaaatgccaaggggcctactctcccgaggacaactccacacagtggtttcataatgagtccctcatcagctctcaggccagctcttatttcattgatgccgctacagtggacgactccggcgagtatcggtgtcagaccaatctgtctacactgtctgaccccgtgcagcttgaggtccacattggatggttgctcttgcaagccccacgctgggttttcaaagaggaagatccaatccatctgcggtgccacagctggaaaaacaccgctctccacaaagtcacatacctgcaaaatggcaaaggacgcaaatacttccatcacaattccgatttttacattccgaaggctaccctgaaagacagcggcagctatttctgccggggactcgtcggctccaagaatgtgtcctccgaaaccgtgaatatcacgattacccaaggactggctgtgcctacaatctctagcttctttccgcctggataccaagtctccttctgtcttgtgatggtcctcctgtttgctgtggacacaggactgtacttttccgtgaaa

SEQ ID NO: 1153 - DNA, 1434 bp, synthetic construct
  source 1..1434: mol_type = other DNA
atggccttaccagtgaccgccttgctcctgccgctggccttgctgctccacgccgccaggccggagatccagctggtgcagagcggagccgaagtgaagaagcctggcgagagcctgcggatcagctgcaagggcagcggcttcaacatcgaggactactacatccactgggtgcgccagatgcccggcaagggcctggaatggatgggcagaatcgaccccgagaacgacgagactaagtacggccccatcttccagggccacgtgaccatcagcgccgacaccagcatcaacaccgtgtacctccagtggtccagcctgaaggccagcgacaccgccatgtactactgcgcctttagaggcggcgtgtactggggccagggcaccacagtgacagtgtctagcggcggaggcggaagtggaggcggaggatctggcggcggaggctctgatgtcgtgatgacccagagccccgacagcctggctgtgtctctgggagagagagccaccatcaactgcaagtccagccagtccctgctggacagcgacggcaagacctacctgaactggctccagcagaagcccggccagccccccaagagactgatctccctggtgtccaagctggactccggcgtgcccgatagattttccggctctggcagcggcaccgacttcaccctgacaatcagctcccttcaggccgaggacgtggccgtgtactattgctggcagggcacacacttccccggcacctttggcggaggcaccaaggtggaaatcaagacgcgtggaatgaggactgaggatcttcccaaagctgtcgtctttctcgaaccccaatggtatcgggtgctcgaaaaagactctgtgacactgaaatgccaaggggcctactctcccgaggacaactccacacagtggtttcataatgagtccctcatcagctctcaggccagctcttatttcattgatgccgctacagtggacgactccggcgagtatcggtgtcagaccaatctgtctacactgtctgaccccgtgcagcttgaggtccacattggatggttgctcttgcaagccccacgctgggttttcaaagaggaagatccaatccatctgcggtgccacagctggaaaaacaccgctctccacaaagtcacatacctgcaaaatggcaaaggacgcaaatacttccatcacaattccgatttttacattccgaaggctaccctgaaagacagcggcagctatttctgccggggactcgtcggctccaagaatgtgtcctccgaaaccgtgaatatcacgattacccaaggactggctgtgcctacaatctctagcttctttccgcctggataccaagtctccttctgtcttgtgatggtcctcctgtttgctgtggacacaggactgtacttttccgtgaaa

SEQ ID NO: 1154 - DNA, 1458 bp, synthetic construct
  source 1..1458: mol_type = other DNA
atggccttaccagtgaccgccttgctcctgccgctggccttgctgctccacgccgccaggccggagctgcagatgacccagagccctagcagcctgtctgccagcgtgggcgacagagtgaccatcacctgtagagccagccagagcatcagcagctacctgaactggtatcagcagaagcccggccagccccccaaactgctgatctactgggccagcaccagagaaagcggcgtgcccgatagattcagcggcagcgagagcggcaccaactacaccctgaccatcagctccctgcagcccgaggacttcgccacctacttttgccagcagagcgacagcctgcccatcacctttggacagggcacccggctggacattcagggcggaggcggaagtggaggcggaggatctggcggcggaggctctgaggtgcaactgctggaatctgggggcggagtggtgcagcctggcagaagcctgagactgagctgtgccgccagcggcttcaccttcagctcctacggaatgcactgggtgcgccaggcccctggcaaaggactggaatgggtggccgtgatctcctacgacggcagcaacaagtactacgccgacagcgtgaagggccggttcaccatcagccgggacaacagcaagaacaccctgtacctgcagatgaacagcctgcgggccgaggacaccgccgtgtactactgcgccaaggatatgggctggggcagcggctggcggccttactactactacggcatggacgtgtggggccagggcaccaccgtgacagtgtcatctacgcgtggaatgaggactgaggatcttcccaaagctgtcgtctttctcgaaccccaatggtatcgggtgctcgaaaaagactctgtgacactgaaatgccaaggggcctactctcccgaggacaactccacacagtggtttcataatgagtccctcatcagctctcaggccagctcttatttcattgatgccgctacagtggacgactccggcgagtatcggtgtcagaccaatctgtctacactgtctgaccccgtgcagcttgaggtccacattggatggttgctcttgcaagccccacgctgggttttcaaagaggaagatccaatccatctgcggtgccacagctggaaaaacaccgctctccacaaagtcacatacctgcaaaatggcaaaggacgcaaatacttccatcacaattccgatttttacattccgaaggctaccctgaaagacagcggcagctatttctgccggggactcgtcggctccaagaatgtgtcctccgaaaccgtgaatatcacgattacccaaggactggctgtgcctacaatctctagcttctttccgcctggataccaagtctccttctgtcttgtgatggtcctcctgtttgctgtggacacaggactgtacttttccgtgaaa

SEQ ID NO: 1155 - DNA, 1455 bp, synthetic construct
  source 1..1455: mol_type = other DNA
atggccttaccagtgaccgccttgctcctgccgctggccttgctgctccacgccgccaggccggagcttgtgatgacccagagccccagcagcctgacagtgacagccggcgagaaagtgaccatgagctgcaagagcagccagagcctgctgaacagcggcaaccagaagaactacctgacctggtatcagcagaagcccggccagccccccaagctgctgatctactgggccagcaccagagaaagcggcgtgcccgatagattcaccggctctggcagcggcaccgacttcaccctgacaatcagcagcgtgcaggccgaggacctggccgtgtactactgccagaacgactacagctaccccctgaccttcggagccggcaccaagctggaaatcaagggcggaggcggaagtggaggcggaggatctggcggcggaggctctgaagtgcagctgctggaacagtctggcgccgaacttgtgcggcctggcaccagcgtgaagatcagctgtaaagccagcggctacgccttcaccaactactggctgggctgggtcaagcagaggcctggacacggcctggaatggatcggcgacatctttcccggctccggcaacatccactacaacgagaagttcaagggcaaggccaccctgaccgccgacaagtctagcagcaccgcctacatgcagctgtccagcctgacctttgaggacagcgccgtgtatttctgtgcccggctgcggaactgggacgagcccatggattattggggccagggcaccaccgtgaccgtgtctagtacgcgtggaatgaggactgaggatcttcccaaagctgtcgtctttctcgaaccccaatggtatcgggtgctcgaaaaagactctgtgacactgaaatgccaaggggcctactctcccgaggacaactccacacagtggtttcataatgagtccctcatcagctctcaggccagctcttatttcattgatgccgctacagtggacgactccggcgagtatcggtgtcagaccaatctgtctacactgtctgaccccgtgcagcttgaggtccacattggatggttgctcttgcaagccccacgctgggttttcaaagaggaagatccaatccatctgcggtgccacagctggaaaaacaccgctctccacaaagtcacatacctgcaaaatggcaaaggacgcaaatacttccatcacaattccgatttttacattccgaaggctaccctgaaagacagcggcagctatttctgccggggactcgtcggctccaagaatgtgtcctccgaaaccgtgaatatcacgattacccaaggactggctgtgcctacaatctctagcttctttccgcctggataccaagtctccttctgtcttgtgatggtcctcctgtttgctgtggacacaggactgtacttttccgtgaaa

SEQ ID NO: 1156 - DNA, 1449 bp, synthetic construct
  source 1..1449: mol_type = other DNA
atggccttaccagtgaccgccttgctcctgccgctggccttgctgctccacgccgccaggccggacatccaaatgacacagagtccttctagtttgagtgcgagcgtgggggacagggtgaccattacctgcagggccagccagagcataagctcataccttaattggtaccagcaaaaaccaggtaaggcccctaagctcctgatctacgcggcctcttcacttcaatctggggtcccttcccgcttcagtggctccggcagcggcaccgacttcacgctcactatatcaagtctgcagcctgaggatctcgccacctattactgtcaacaaagttattccacccctttcacctttggaccgggcacgaaagtggatattaagggcggaggcggaagtggaggcggaggatctggcggcggaggctctgtgcacgaggtccagcttgtgcagtccggggcagaggtcaagaagcctggttctagcgtaaaagtgagttgcaaagcctcaggtgggacattttcatcctacgcgatcagttgggttagacaggctcctggtcaagggctggaatggatgggcggaattattccaatcttcggaacagcgaattacgcgcagaagttccagggtagagtaaccatcactgctgacaagtccacctccaccgcatacatggaattgtctagtctccggagcgaggatacggcggtgtattattgtgctacgttcgccctgtttggcttccgcgaacaggctttcgacatctgggggcagggcacgacagtcacggttagtagtacgcgtggaatgaggactgaggatcttcccaaagctgtcgtctttctcgaaccccaatggtatcgggtgctcgaaaaagactctgtgacactgaaatgccaaggggcctactctcccgaggacaactccacacagtggtttcataatgagtccctcatcagctctcaggccagctcttatttcattgatgccgctacagtggacgactccggcgagtatcggtgtcagaccaatctgtctacactgtctgaccccgtgcagcttgaggtccacattggatggttgctcttgcaagccccacgctgggttttcaaagaggaagatccaatccatctgcggtgccacagctggaaaaacaccgctctccacaaagtcacatacctgcaaaatggcaaaggacgcaaatacttccatcacaattccgatttttacattccgaaggctaccctgaaagacagcggcagctatttctgccggggactcgtcggctccaagaatgtgtcctccgaaaccgtgaatatcacgattacccaaggactggctgtgcctacaatctctagcttctttccgcctggataccaagtctccttctgtcttgtgatggtcctcctgtttgctgtggacacaggactgtacttttccgtgaaa

SEQ ID NO: 1157 - DNA, 1431 bp, synthetic construct
  source 1..1431: mol_type = other DNA
atggccttaccagtgaccgccttgctcctgccgctggccttgctgctccacgccgccaggccgtacatccacgtgacacagagccctagcagcctgtccgtgtccatcggcgatagagtgaccatcaactgccagacctctcaaggcgtgggcagcgacctgcactggtatcagcacaaacctggcagagcccctaagctgctgatccaccatgccagctctgtggaagatggcgtgcccagcagattttccggcaccggatttcacaccagcttcaacctgacaatcaacgacctccaggccgacgacatcggcacctactactgtcaagtgctccagagcttcggcagaggcagcagactggatacaaaaggcggaggcggaagtggaggcggaggatctggcggcggaggctctagggcacacctggtgcagtctggcaccgccatgaagaaacctggcgcttccgtcagagtgtcctgtcagacaagcggctacaccttcacagcccacatcctgttctggttcagacaggccccaggcagaggactggaatgggtcggatggatcaagccccagtacggggccgtgaatttcggcggaggcttcagagacagagtgaccctgaccagggacgtgtaccgggaaatcgcctacatggacatccggggcctgaagcctgatgacaccgccgtgtactactgcgccagggatagaagctacggcgacagctcttgggctctcgatgcttggggacagggcacaacagtggtggtgtctgctacgcgtggaatgaggactgaggatcttcccaaagctgtcgtctttctcgaaccccaatggtatcgggtgctcgaaaaagactctgtgacactgaaatgccaaggggcctactctcccgaggacaactccacacagtggtttcataatgagtccctcatcagctctcaggccagctcttatttcattgatgccgctacagtggacgactccggcgagtatcggtgtcagaccaatctgtctacactgtctgaccccgtgcagcttgaggtccacattggatggttgctcttgcaagccccacgctgggttttcaaagaggaagatccaatccatctgcggtgccacagctggaaaaacaccgctctccacaaagtcacatacctgcaaaatggcaaaggacgcaaatacttccatcacaattccgatttttacattccgaaggctaccctgaaagacagcggcagctatttctgccggggactcgtcggctccaagaatgtgtcctccgaaaccgtgaatatcacgattacccaaggactggctgtgcctacaatctctagcttctttccgcctggataccaagtctccttctgtcttgtgatggtcctcctgtttgctgtggacacaggactgtacttttccgtgaaa

SEQ ID NO: 1158 - DNA, 1446 bp, synthetic construct
  source 1..1446: mol_type = other DNA
atggccttaccagtgaccgccttgctcctgccgctggccttgctgctccacgccgccaggccggacatcgtgctgacccagagccctctgagcctggccgtgtctctgggacagcctgccatcatcagctgcaaggccagccagagcgtgtcctttgccggcacctctctgatgcactggtatcaccagaagcccggccagcagcccagactgctgatctacagagccagcaacctggaagccggcgtgcccgatagattttccggcagcggcagcaagaccgacttcaccctgaccatcagccccgtggaagccgaagatgccgccacctactactgccagcagagcagagagtacccctacaccttcggcggaggcaccaagctggaaatcaagaggggcggaggcggaagtggaggcggaggatctggcggcggaggctctcaggtccaactggtgcagagcggagccgaggtcgtgaagcctggcgcttccgtgaagattagctgcaaagccagcggctacacctttaccggctactttatgaactgggtcaagcagagccctggccagagcctggaatggatcggcagaatccacccctacgacggcgacaccttctacaaccagaagttccagggcaaggccaccctgacagtggacaagagcagcaacaccgcccacatggaactgctgagcctgaccagcgaggacttcgccgtgtactactgcaccagatacgacggcagccgggctatggactattggggccagggcaccaccgtgaccgtgtctagtacgcgtggaatgaggactgaggatcttcccaaagctgtcgtctttctcgaaccccaatggtatcgggtgctcgaaaaagactctgtgacactgaaatgccaaggggcctactctcccgaggacaactccacacagtggtttcataatgagtccctcatcagctctcaggccagctcttatttcattgatgccgctacagtggacgactccggcgagtatcggtgtcagaccaatctgtctacactgtctgaccccgtgcagcttgaggtccacattggatggttgctcttgcaagccccacgctgggttttcaaagaggaagatccaatccatctgcggtgccacagctggaaaaacaccgctctccacaaagtcacatacctgcaaaatggcaaaggacgcaaatacttccatcacaattccgatttttacattccgaaggctaccctgaaagacagcggcagctatttctgccggggactcgtcggctccaagaatgtgtcctccgaaaccgtgaatatcacgattacccaaggactggctgtgcctacaatctctagcttctttccgcctggataccaagtctccttctgtcttgtgatggtcctcctgtttgctgtggacacaggactgtacttttccgtgaaa

SEQ ID NO: 1159 - DNA, 1434 bp, synthetic construct
  source 1..1434: mol_type = other DNA
atggccttaccagtgaccgccttgctcctgccgctggccttgctgctccacgccgccaggccggacgttgtgatgacccagacccccctgagcctgcctgtgacacctggcgaacctgccagcatcagctgtcggagcagccagagcctggtgcacagaaacggcaacacctacctgcactggtatctccagaagcccggccagagccccaagctgctgatccacaaggtgtccaacagattcagcggcgtgcccgacagattctccggcagcggctctggcaccgacttcaccctgaagatcagccgggtggaagccgaggacctgggcgtgtacttctgtagccagagcacccatgtgccccccctgacatttggagccggcaccaagctggaactgaagggcggaggcggaagtggaggcggaggatctggcggcggaggctctgaagtgcagctggtgcagtctggcgctgaggtggaaaagcctggggccagcgtgaagattagctgcaaggccagcggcagcagcttcaccggctacaacatgaactgggtgcgccagaacatcggcaagagcctggaatggatcggagccatcgacccctactacggcggcaccagctacaaccagaagttcaagggcagagccaccctgaccgtggacaagagcaccagcaccgcctacatgcacctgaagtccctgcggagcgaggacaccgccgtgtactactgtgtgtccggcatggaatattggggccagggcaccagcgtgaccgtgtctagtacgcgtggaatgaggactgaggatcttcccaaagctgtcgtctttctcgaaccccaatggtatcgggtgctcgaaaaagactctgtgacactgaaatgccaaggggcctactctcccgaggacaactccacacagtggtttcataatgagtccctcatcagctctcaggccagctcttatttcattgatgccgctacagtggacgactccggcgagtatcggtgtcagaccaatctgtctacactgtctgaccccgtgcagcttgaggtccacattggatggttgctcttgcaagccccacgctgggttttcaaagaggaagatccaatccatctgcggtgccacagctggaaaaacaccgctctccacaaagtcacatacctgcaaaatggcaaaggacgcaaatacttccatcacaattccgatttttacattccgaaggctaccctgaaagacagcggcagctatttctgccggggactcgtcggctccaagaatgtgtcctccgaaaccgtgaatatcacgattacccaaggactggctgtgcctacaatctctagcttctttccgcctggataccaagtctccttctgtcttgtgatggtcctcctgtttgctgtggacacaggactgtacttttccgtgaaa

SEQ ID NO: 1160 - DNA, 1428 bp, synthetic construct
  source 1..1428: mol_type = other DNA
atggccttaccagtgaccgccttgctcctgccgctggccttgctgctccacgccgccaggccggagatcgtgatgacccagacccctgccaccctgtctgtgtctgccggcgagagagtgaccattacctgcaaggccagccagagcgtgtccaacgacgtgacctggtatcagcagaagcccggccaggcccccagactgctgatctacagcgccagcaacagatacagcggcgtgcccgccagattttccggcagcggctacggcaccgagttcaccttcaccatcagcagcgtgcagagcgaggacttcgccgtgtacttctgtcagcaagactacagcagcttcggccagggcaccaagctggaaatcaagaggggcggaggcggaagtggaggcggaggatctggcggcggaggctctcaggtgcagctggtggaatctggacctggcgtggtgcagcctggcagaagcctgagaatcagctgtgccgtgtccggcttcagcgtgaccaactacggcgtgcactgggtgcgccagccacctggaaaaggactggaatggctgggcgtgatctgggctggcggcatcaccaactacaacagcgccttcatgtcccggctgaccatctccaaggacaacagcaagaacaccgtgtacctccagatgaacagcctgcgggccgaggacaccgccatgtactactgtgcttccagaggcggccactacggctacgccctggattattggggccagggaaccctcgtgaccgtgtcctctacgcgtggaatgaggactgaggatcttcccaaagctgtcgtctttctcgaaccccaatggtatcgggtgctcgaaaaagactctgtgacactgaaatgccaaggggcctactctcccgaggacaactccacacagtggtttcataatgagtccctcatcagctctcaggccagctcttatttcattgatgccgctacagtggacgactccggcgagtatcggtgtcagaccaatctgtctacactgtctgaccccgtgcagcttgaggtccacattggatggttgctcttgcaagccccacgctgggttttcaaagaggaagatccaatccatctgcggtgccacagctggaaaaacaccgctctccacaaagtcacatacctgcaaaatggcaaaggacgcaaatacttccatcacaattccgatttttacattccgaaggctaccctgaaagacagcggcagctatttctgccggggactcgtcggctccaagaatgtgtcctccgaaaccgtgaatatcacgattacccaaggactggctgtgcctacaatctctagcttctttccgcctggataccaagtctccttctgtcttgtgatggtcctcctgtttgctgtggacacaggactgtacttttccgtgaaa

SEQ ID NO: 1161 - DNA, 1437 bp, synthetic construct
  source 1..1437: mol_type = other DNA
atggccttaccagtgaccgccttgctcctgccgctggccttgctgctccacgccgccaggccggacatccagatgacccagaccgccagcagcctgcctgcctctctgggcgacagagtgaccatctcctgtagcgccagccaggacatcagcaactacctgaactggtatcagcagaaacccgacggcaccgtgaagctgctgatcttctacagcagcaacctgcacagcggcgtgcccagcagattttctggcggcggaagcggcaccgactacagcctgaccatcagcaatctggaacccgaggacattgccacctacttttgccaccagtacagcaagctgccctggacctttggcggaggcaccaagctggaaatcaagagaggcggaggcggaagtggaggcggaggatctggcggcggaggctctgaagtgaccctggtggaaagcggcggagacttcgtgaagcctggcggctctctgaaggtgtcctgtgccgccagcggcttcgcctttagccactacgccatgagctgggtgcgccagacccctgccaagagactggaatgggtggcctacatcagcagcggcggctccggcacctactactccgatagcgtgaagggccggttcaccatcagccgggacaacgccaagaacaccctgtacctccagatgcggagcctgcggagcgaggacagcgccatgtatttctgcaccagagtgaagctgggcacctattacttcgactcttggggccagggcaccaccctgaccgtgtcatctacgcgtggaatgaggactgaggatcttcccaaagctgtcgtctttctcgaaccccaatggtatcgggtgctcgaaaaagactctgtgacactgaaatgccaaggggcctactctcccgaggacaactccacacagtggtttcataatgagtccctcatcagctctcaggccagctcttatttcattgatgccgctacagtggacgactccggcgagtatcggtgtcagaccaatctgtctacactgtctgaccccgtgcagcttgaggtccacattggatggttgctcttgcaagccccacgctgggttttcaaagaggaagatccaatccatctgcggtgccacagctggaaaaacaccgctctccacaaagtcacatacctgcaaaatggcaaaggacgcaaatacttccatcacaattccgatttttacattccgaaggctaccctgaaagacagcggcagctatttctgccggggactcgtcggctccaagaatgtgtcctccgaaaccgtgaatatcacgattacccaaggactggctgtgcctacaatctctagcttctttccgcctggataccaagtctccttctgtcttgtgatggtcctcctgtttgctgtggacacaggactgtacttttccgtgaaa

SEQ ID NO: 1162 - DNA, 1443 bp, synthetic construct
  source 1..1443: mol_type = other DNA
atggccttaccagtgaccgccttgctcctgccgctggccttgctgctccacgccgccaggccgcagttcgtgctgacccagagcccttctgcctctgctgccctgggagcctctgccaagctgacctgtacactgagcagcgcccacaagacctacaccatcgactggtatcagcagcagaagggaaaggcccccagatacctgatccaagtgaagtccgacggcacctacacaaaggccaccggcgtgcccgatagattcagcggcagtagcagcggagccgatagatacctgattatccccagcgtgcaggccgacgacgaggccgattactactgcggcaccgattacaccggcggctacgtgttcggcggaggcacacaactgaccgtgacaggcggaggcggaagtggaggcggaggatctggcggcggaggctctgagcaactgaaagagtctggcggcggactgttcaagcccaccgataccctgaccctgacctgcaccgtgtccggcttcagcctgagctactacggcgtgaactgggtgcgccaggcccctggcaatggcctggaatggatcggcacaatcggcggcagcggcgacacctactatgcctcttgggccaagtccagaagcaccatcatcagaaacaccaacgagaacaccgtgaccctgaagatgaccagcctgacagccgccgacaccgccacctacttttgcgtcagatacgccaacatcggctacgagtatttcaacgtgtggggacccggcaccctcgtgaccgtgtcatctacgcgtggaatgaggactgaggatcttcccaaagctgtcgtctttctcgaaccccaatggtatcgggtgctcgaaaaagactctgtgacactgaaatgccaaggggcctactctcccgaggacaactccacacagtggtttcataatgagtccctcatcagctctcaggccagctcttatttcattgatgccgctacagtggacgactccggcgagtatcggtgtcagaccaatctgtctacactgtctgaccccgtgcagcttgaggtccacattggatggttgctcttgcaagccccacgctgggttttcaaagaggaagatccaatccatctgcggtgccacagctggaaaaacaccgctctccacaaagtcacatacctgcaaaatggcaaaggacgcaaatacttccatcacaattccgatttttacattccgaaggctaccctgaaagacagcggcagctatttctgccggggactcgtcggctccaagaatgtgtcctccgaaaccgtgaatatcacgattacccaaggactggctgtgcctacaatctctagcttctttccgcctggataccaagtctccttctgtcttgtgatggtcctcctgtttgctgtggacacaggactgtacttttccgtgaaa

SEQ ID NO: 1163 - DNA, 1440 bp, synthetic construct
  source 1..1440: mol_type = other DNA
atggccttaccagtgaccgccttgctcctgccgctggccttgctgctccacgccgccaggccggacatccagatgacccagagccccagcagcctgtctgccagcgtgggcgacagagtgaccatcacctgtagagccagccagggcatcagctcttggctggcctggtatcagcagaagcccgagaaggcccccaagagcctgatctacgccgcctctagtctccagagcggcgtgcccagcagattttctggcagcggctccggcaccgacttcaccctgacaatcagctccctccagcccgaggacttcgccacctactactgccagcagtacaacagctacccccccacctttggcggaggcaccaaggtggaaatcaagggcggaggcggaagtggaggcggaggatctggcggcggaggctctgaagtgcaactggtggaatcaggcggcggactggtgcagcctggcgagtctctgagactgagctgtgtggcctccggcttcaccttcagccggtacaagatgaactgggtgcgccaggcccctggcaagggactggaatgggtgtcctacatcagccgcagcggcagagacatctactacgccgacagcgtgaagggccggttcaccatcagcagagacaacgccaagaacagcctgtacctccagatgaactccctgcgggacgaggacaccgccgtgtactactgtgccggaaccgtgaccacctattactacttcggcatggacgtgtggggccacggcaccaccgtgacagtgtcatctacgcgtggaatgaggactgaggatcttcccaaagctgtcgtctttctcgaaccccaatggtatcgggtgctcgaaaaagactctgtgacactgaaatgccaaggggcctactctcccgaggacaactccacacagtggtttcataatgagtccctcatcagctctcaggccagctcttatttcattgatgccgctacagtggacgactccggcgagtatcggtgtcagaccaatctgtctacactgtctgaccccgtgcagcttgaggtccacattggatggttgctcttgcaagccccacgctgggttttcaaagaggaagatccaatccatctgcggtgccacagctggaaaaacaccgctctccacaaagtcacatacctgcaaaatggcaaaggacgcaaatacttccatcacaattccgatttttacattccgaaggctaccctgaaagacagcggcagctatttctgccggggactcgtcggctccaagaatgtgtcctccgaaaccgtgaatatcacgattacccaaggactggctgtgcctacaatctctagcttctttccgcctggataccaagtctccttctgtcttgtgatggtcctcctgtttgctgtggacacaggactgtacttttccgtgaaa

SEQ ID NO: 1164 - DNA, 1437 bp, synthetic construct
  source 1..1437: mol_type = other DNA
atggccttaccagtgaccgccttgctcctgccgctggccttgctgctccacgccgccaggccgcagtctgtggtcacacagccacctagcatgtctgccgctccaggccagcaagtgaccatctcttgtagcggcggcaacagcaacatcgagcggaactacgtgtcctggtatctgcaactgcctggcacagcccctaagctggtcatcttcgacaacgacagacggcccagcggcatccccgatagattttctggcagcaagagcggcaccagcgccacactgggaattaccggacttcagacaggcgacgaggccgactactactgtggcacatgggactctagcctgagaggctgggttttcggcggaggcacaaagctgacagtgcttggtggcggaggcggaagtggaggcggaggatctggcggcggaggctctgaagtgcagctcgttgagtctggcggcggactgattcaacctggcggaagcctgagactgagctgtgccgcttccggcttcaccttcagcaactacgccatgaactgggttcgacaggcccctggcaaaggactggaatgggtgtccaccatcaacggcagaggcagcagcaccatctacgccgattctgtgaagggcagattcaccatcagccgggacaacagcaagaacaccctgtacctccagatgaactccctgagagccgaggacaccgccacctattactgtgcccggtacatcagcagaggactgggcgattcttggggccagggcacactggttacagtgacgcgtggaatgaggactgaggatcttcccaaagctgtcgtctttctcgaaccccaatggtatcgggtgctcgaaaaagactctgtgacactgaaatgccaaggggcctactctcccgaggacaactccacacagtggtttcataatgagtccctcatcagctctcaggccagctcttatttcattgatgccgctacagtggacgactccggcgagtatcggtgtcagaccaatctgtctacactgtctgaccccgtgcagcttgaggtccacattggatggttgctcttgcaagccccacgctgggttttcaaagaggaagatccaatccatctgcggtgccacagctggaaaaacaccgctctccacaaagtcacatacctgcaaaatggcaaaggacgcaaatacttccatcacaattccgatttttacattccgaaggctaccctgaaagacagcggcagctatttctgccggggactcgtcggctccaagaatgtgtcctccgaaaccgtgaatatcacgattacccaaggactggctgtgcctacaatctctagcttctttccgcctggataccaagtctccttctgtcttgtgatggtcctcctgtttgctgtggacacaggactgtacttttccgtgaaa

SEQ ID NO: 1165 - DNA, 1440 bp, synthetic construct
  source 1..1440: mol_type = other DNA
atggccttaccagtgaccgccttgctcctgccgctggccttgctgctccacgccgccaggccgcagtctgtgctgacacagcctccatctgcctctggcacacctggacagagagtgaccatcagctgtagcggcagcagaagcaacgtcggcggcaactacgtgttctggtatcagcaggtcccaggcgctacccctaagctgctgatctacagaagcaatcagcggcctagcggcgtgcccgatagatttgccggaagcaagagcggcagctctgccagccttgccatctctggactgagaagcgaggacgaggccgactactactgtgccacctgggatgatagcctgagcggcttcgtgtttggcaccggcaccaaagtgacagtgcttggtggcggaggcggaagtggaggcggaggatctggcggcggaggctctgaagttcagctggttgaatctggcggcggactggttaagcctggcggatctctgagactgtcttgtgccgccagcggcttcaccttcagcgattactacatgagctggatcagacaggcccctggcaaaggactggaatgggtgtcctacatcagcagcagcggctccaccatctactacgccgatagcgtgaagggcagattcaccatcagccgggacaacgccaagaacagcctgtacctccagatgaactccctgagagccgaggacaccgccgtgtactattgcgccagaggctacggcaaagcctacgatcaatggggccagggcacactggtcaccgtttcttctacgcgtggaatgaggactgaggatcttcccaaagctgtcgtctttctcgaaccccaatggtatcgggtgctcgaaaaagactctgtgacactgaaatgccaaggggcctactctcccgaggacaactccacacagtggtttcataatgagtccctcatcagctctcaggccagctcttatttcattgatgccgctacagtggacgactccggcgagtatcggtgtcagaccaatctgtctacactgtctgaccccgtgcagcttgaggtccacattggatggttgctcttgcaagccccacgctgggttttcaaagaggaagatccaatccatctgcggtgccacagctggaaaaacaccgctctccacaaagtcacatacctgcaaaatggcaaaggacgcaaatacttccatcacaattccgatttttacattccgaaggctaccctgaaagacagcggcagctatttctgccggggactcgtcggctccaagaatgtgtcctccgaaaccgtgaatatcacgattacccaaggactggctgtgcctacaatctctagcttctttccgcctggataccaagtctccttctgtcttgtgatggtcctcctgtttgctgtggacacaggactgtacttttccgtgaaa

SEQ ID NO: 1166 - DNA, 1437 bp, synthetic construct
  source 1..1437: mol_type = other DNA
atggccttaccagtgaccgccttgctcctgccgctggccttgctgctccacgccgccaggccggacatccagatgacccagagccccagcagcctgtctgccagcgtgggcgacagagtgaccatcacctgtagagccagccaggacgtgaacaccgccgtggcctggtatcagcagaagcctggcaaggcccccaagctgctgatctacagcgccagcttcctggaaagcggcgtgcccagcagattcagcggaagcagaagcggcaccgacttcaccctgaccatcagctccctccagcccgaggacttcgccacctactactgccagcagcactacaccacccctcccaccttcggccagaccaaggtggaaatcaagagaggcggaggcggaagtggaggcggaggatctggcggcggaggctctgaagtgcaactggtggaatctggcggcggactggtgcagcctggcggatctctgagactgagctgtgccgccagcggcttcaacatcaaggacacctacatccactgggtgcgccaggcccctggaaagggactggaatgggtggcccggatctaccccaccaacggctacaccagatacgccgacagcgtgaagggccggttcaccatcagcgccgacaccagcaagaataccgcctacctccagatgaacagcctgcgggccgaggataccgccgtgtactactgctcaagatggggaggcgacggcttctacgctatggacgtgtggggccagggcacccttgtgaccgtgtcatctacgcgtggaatgaggactgaggatcttcccaaagctgtcgtctttctcgaaccccaatggtatcgggtgctcgaaaaagactctgtgacactgaaatgccaaggggcctactctcccgaggacaactccacacagtggtttcataatgagtccctcatcagctctcaggccagctcttatttcattgatgccgctacagtggacgactccggcgagtatcggtgtcagaccaatctgtctacactgtctgaccccgtgcagcttgaggtccacattggatggttgctcttgcaagccccacgctgggttttcaaagaggaagatccaatccatctgcggtgccacagctggaaaaacaccgctctccacaaagtcacatacctgcaaaatggcaaaggacgcaaatacttccatcacaattccgatttttacattccgaaggctaccctgaaagacagcggcagctatttctgccggggactcgtcggctccaagaatgtgtcctccgaaaccgtgaatatcacgattacccaaggactggctgtgcctacaatctctagcttctttccgcctggataccaagtctccttctgtcttgtgatggtcctcctgtttgctgtggacacaggactgtacttttccgtgaaa

SEQ ID NO: 1167 - DNA, 1476 bp, synthetic construct
  source 1..1476: mol_type = other DNA
atggccttaccagtgaccgccttgctcctgccgctggccttgctgctccacgccgccaggccgcagtctgccctgacacagcctcctagcgcctctggctctcccggccagagcatcaccatcagctgtaccggcaccagcaacaacttcgtgtcctggtatcagcagcacgccggcaaggcccccaagctcgtgatctacgacgtgaacaagcggcccagcggcgtgcccgatagattcagcggcagcaagagcggcaacaccgccagcctgacagtgtctggcctccagaccgatgacgaggccgtgtactactgcggcagcctcgtgggcaactgggacgtgatctttggcggaggcaccaagctgaccgtgctgggcggaggcggaagtggaggcggaggatctggcggcggaggctctcagccccagctccaggaatctggccccacactggtggaagccagcgagacactgagcctgacctgtgccgtgtccggcgattctaccgccgcctgcaatagcttctggggctgggtgcgccagcctcctggaaagggactggaatgggtgggaagcctgagccactgcgccagctattggaaccggggctggacctaccacaaccccagcctgaagtccagactgaccctggccctggacacccccaagaacctggtgttcctgaagctgaacagcgtgacagccgccgacaccgccacctactactgtgccagatttggcggcgaggtgctgcggtacaccgactggcctaaacctgcctgggtggacctgtggggcagaggaacactcgtgaccgtgtccagcacgcgtggaatgaggactgaggatcttcccaaagctgtcgtctttctcgaaccccaatggtatcgggtgctcgaaaaagactctgtgacactgaaatgccaaggggcctactctcccgaggacaactccacacagtggtttcataatgagtccctcatcagctctcaggccagctcttatttcattgatgccgctacagtggacgactccggcgagtatcggtgtcagaccaatctgtctacactgtctgaccccgtgcagcttgaggtccacattggatggttgctcttgcaagccccacgctgggttttcaaagaggaagatccaatccatctgcggtgccacagctggaaaaacaccgctctccacaaagtcacatacctgcaaaatggcaaaggacgcaaatacttccatcacaattccgatttttacattccgaaggctaccctgaaagacagcggcagctatttctgccggggactcgtcggctccaagaatgtgtcctccgaaaccgtgaatatcacgattacccaaggactggctgtgcctacaatctctagcttctttccgcctggataccaagtctccttctgtcttgtgatggtcctcctgtttgctgtggacacaggactgtacttttccgtgaaa

SEQ ID NO: 1168 - DNA, 1461 bp, synthetic construct
  source 1..1461: mol_type = other DNA
atggccttaccagtgaccgccttgctcctgccgctggccttgctgctccacgccgccaggccggagctggtgctgacacagagccctggcaccctgtctctgtctgccggcgaaagagccaccctgagctgtagagccagccagagcgtgtcctctggcagcctggcttggtatcagcagaagccaggccaggcccccagactgctgatctacggcgcttctaccagagccaccggcatccccgatagattcagcggctctggctccggcaccgacttcaccctgacaatcggcagactggaacccgaggacctggccgtgtactactgccagcagtacggcaccagcccctacacattcggccagggcaccaagctggaaatcggcggaggcggaagtggaggcggaggatctggcggcggaggctctctggaacagagcggagccgaagtgaagaaacccggcagcagcgtgcaggtgtcctgcaaagcaagcggcggcaccttctctatgtacggcttcaactgggtgcgccaggctcctggacacggcctggaatggatgggcggcatcatccccatcttcggcacctccaactacgcccagaaattccggggcagagtgaccttcaccgccgaccaggccacaagcaccgcctacatggaactgaccaacctgcggagcgacgacaccgccgtgtattattgcgccagagacttcggccccgactgggaggatggcgacagctacgatggcagcggcagaggcttcttcgacttctggggccagggaacccttgtgaccgtgtcctcaacgcgtggaatgaggactgaggatcttcccaaagctgtcgtctttctcgaaccccaatggtatcgggtgctcgaaaaagactctgtgacactgaaatgccaaggggcctactctcccgaggacaactccacacagtggtttcataatgagtccctcatcagctctcaggccagctcttatttcattgatgccgctacagtggacgactccggcgagtatcggtgtcagaccaatctgtctacactgtctgaccccgtgcagcttgaggtccacattggatggttgctcttgcaagccccacgctgggttttcaaagaggaagatccaatccatctgcggtgccacagctggaaaaacaccgctctccacaaagtcacatacctgcaaaatggcaaaggacgcaaatacttccatcacaattccgatttttacattccgaaggctaccctgaaagacagcggcagctatttctgccggggactcgtcggctccaagaatgtgtcctccgaaaccgtgaatatcacgattacccaaggactggctgtgcctacaatctctagcttctttccgcctggataccaagtctccttctgtcttgtgatggtcctcctgtttgctgtggacacaggactgtacttttccgtgaaa

SEQ ID NO: 1169 - DNA, 1401 bp, synthetic construct
  source 1..1401: mol_type = other DNA
atggccttaccagtgaccgccttgctcctgccgctggccttgctgctccacgccgccaggccggacatccagatgacccagagccccagcagcctgtctgccagcgtgggcgacagagtgaccatcacctgtcaggccagccaggacatcaacaactacctgaactggtatcagcagaagcccggcaaggcccccaagctgctgatctacgacgccagcaatctgcagaccggcgtgcccagcagattttccggctctggcagcggcaccgacttcaccttcaccatcgaggacattgccacctactactgccagcagtacaccttcggccctggcaccaaggtggacatcaaaggcggaggcggaagtggaggcggaggatctggcggcggaggctctgaagtgcaactgctggaatctggcggcggactggtgcagcctggcggatctctgagactgagctgtgccgccagcggcttcacctttagctggtacagcatgacctgggtgcgccaggcccctggcaaaggactggaatgggtgtccagcatcgtgccctggggcgatttcacccagtacgccgatagcgtgaagggccggttcaccatcagccgggacaacagcaagaacaccctgtacctgcagatgaacagcctgcgggccgaggacaccgccgtgtactattgtgccaagggacctggctggggcagcttcgatctgtggggcagaggaacccttgtgaccgtgtccagcacgcgtggaatgaggactgaggatcttcccaaagctgtcgtctttctcgaaccccaatggtatcgggtgctcgaaaaagactctgtgacactgaaatgccaaggggcctactctcccgaggacaactccacacagtggtttcataatgagtccctcatcagctctcaggccagctcttatttcattgatgccgctacagtggacgactccggcgagtatcggtgtcagaccaatctgtctacactgtctgaccccgtgcagcttgaggtccacattggatggttgctcttgcaagccccacgctgggttttcaaagaggaagatccaatccatctgcggtgccacagctggaaaaacaccgctctccacaaagtcacatacctgcaaaatggcaaaggacgcaaatacttccatcacaattccgatttttacattccgaaggctaccctgaaagacagcggcagctatttctgccggggactcgtcggctccaagaatgtgtcctccgaaaccgtgaatatcacgattacccaaggactggctgtgcctacaatctctagcttctttccgcctggataccaagtctccttctgtcttgtgatggtcctcctgtttgctgtggacacaggactgtacttttccgtgaaa

SEQ ID NO: 1170 - DNA, 1431 bp, synthetic construct
  source 1..1431: mol_type = other DNA
atggccttaccagtgaccgccttgctcctgccgctggccttgctgctccacgccgccaggccggacatccagatgacccagagccccagcagcctgtctgccagcgtgggcgacagagtgaccatcacctgtaccgccagcctgagcgtgtccagcacctacctgcactggtatcagcagaagcccggcagcagccccaagctgtggatctacagcaccagcaacctggcctccggcgtgcccagcagattttctggcagcggctctggcaccagctacaccctgaccatcagctccctccagcccgaggacttcgccacctactactgccaccagtaccacagaagccccctgacctttggcggaggcaccaaggtggaaatcaagagaggcggaggcggaagtggaggcggaggatctggcggcggaggctctgaagtgcaactggtggaatctggcggcggactggtgcagcctggcggatctctgagactgagctgtgccgccagcggcttcagcctgaccaaatacggcgtgcactgggtgcgccaggcccctggaaaaggactggaatgggtgggagtgaagtgggctggcggctccaccgactacaacagcgccctgatgagccggttcaccatcagcaaggacaacgccaagaacagcctgtacctccagatgaactccctgcgggccgaggacaccgccgtgtactactgtgccagagatcaccgggacgctatggactactggggccagggaacactcgtgaccgtgtcctctacgcgtggaatgaggactgaggatcttcccaaagctgtcgtctttctcgaaccccaatggtatcgggtgctcgaaaaagactctgtgacactgaaatgccaaggggcctactctcccgaggacaactccacacagtggtttcataatgagtccctcatcagctctcaggccagctcttatttcattgatgccgctacagtggacgactccggcgagtatcggtgtcagaccaatctgtctacactgtctgaccccgtgcagcttgaggtccacattggatggttgctcttgcaagccccacgctgggttttcaaagaggaagatccaatccatctgcggtgccacagctggaaaaacaccgctctccacaaagtcacatacctgcaaaatggcaaaggacgcaaatacttccatcacaattccgatttttacattccgaaggctaccctgaaagacagcggcagctatttctgccggggactcgtcggctccaagaatgtgtcctccgaaaccgtgaatatcacgattacccaaggactggctgtgcctacaatctctagcttctttccgcctggataccaagtctccttctgtcttgtgatggtcctcctgtttgctgtggacacaggactgtacttttccgtgaaa

SEQ ID NO: 1171 - DNA, 1443 bp, synthetic construct
  source 1..1443: mol_type = other DNA
atggccttaccagtgaccgccttgctcctgccgctggccttgctgctccacgccgccaggccggacatccagatgacccagagccccagcagcctgtctgccagcgtgggcgacagagtgaccatcacatgcaaggccagccaggacgtgggaacagccgtggcctggtatcagcagaagcctggcaaggcccccaagctgctgatctacagcgccagctacagatccaccggcgtgcccagcagattttccggctctggcagcggcaccgacttcaccctgaccatctctagcctccagcccgaggacttcgccacctactactgccagcaccactactccgccccctggacatttggcggaggcaccaaggtggaaatcaagggcggaggcggaagtggaggcggaggatctggcggcggaggctctgaagtgcaactggtggaatcaggcggcggactggtgcagcctggcggatctctgagactgagctgtgccgccagcggcttcaccttcagcagaaacggcatgagctgggtgcgccaggcccctggaaaaggactggaatgggtggcaaccgtgtccagcggcggcagctacatctactacgccgacagcgtgaagggccggttcaccatctccagagacaacgccaagaacagcctgtacctccagatgaactccctgcgggccgaggacaccgccgtgtactattgtgccagacagggcaccaccgccctggctaccagattcttcgatgtgtggggccagggcaccctcgtgaccgtgtcatctacgcgtggaatgaggactgaggatcttcccaaagctgtcgtctttctcgaaccccaatggtatcgggtgctcgaaaaagactctgtgacactgaaatgccaaggggcctactctcccgaggacaactccacacagtggtttcataatgagtccctcatcagctctcaggccagctcttatttcattgatgccgctacagtggacgactccggcgagtatcggtgtcagaccaatctgtctacactgtctgaccccgtgcagcttgaggtccacattggatggttgctcttgcaagccccacgctgggttttcaaagaggaagatccaatccatctgcggtgccacagctggaaaaacaccgctctccacaaagtcacatacctgcaaaatggcaaaggacgcaaatacttccatcacaattccgatttttacattccgaaggctaccctgaaagacagcggcagctatttctgccggggactcgtcggctccaagaatgtgtcctccgaaaccgtgaatatcacgattacccaaggactggctgtgcctacaatctctagcttctttccgcctggataccaagtctccttctgtcttgtgatggtcctcctgtttgctgtggacacaggactgtacttttccgtgaaa

SEQ ID NO: 1172 - DNA, 1431 bp, synthetic construct
  source 1..1431: mol_type = other DNA
atggccttaccagtgaccgccttgctcctgccgctggccttgctgctccacgccgccaggccggacatccagatgacccagagcttcagcagcctgagcgccagcgtgggcgacagagtgaccatcacctgtagagccagccaggacatcagcaactacctgaactggtatcagcagaagcccggcaaggcccccaagctgctgatctactacaccagcagactgcacagcggcgtgcccagcagattttctggcagcggctccggcaccgactacaccctgacaatcagctccctgcagcccgaggacttcgctacctacttctgtcagcaaggcaacaccctgccctggacctttggcggaggcaccaagctggaaatcaagagaggcggaggcggaagtggaggcggaggatctggcggcggaggctctgaagtgcaactggtgcagtccggcggagggctggtgcagagcggaggatctctgagactgagctgcagagccagcggctacaccttcacccggtactggatgctgtgggtgcgccagaggccaggcaagggactggaatgggtggccgagatcaacccccggaacgaccggaccaactacaacgagaagttcaagacccggttcaccatcagcgtggacagaagcaagaacaccctgtacctgcagatggacagcctgcgggccgaggataccgccgtgtacttttgtgctctgggaggcggctacgctatggactactggggccagggaacccttgtgaccgtgtcctctacgcgtggaatgaggactgaggatcttcccaaagctgtcgtctttctcgaaccccaatggtatcgggtgctcgaaaaagactctgtgacactgaaatgccaaggggcctactctcccgaggacaactccacacagtggtttcataatgagtccctcatcagctctcaggccagctcttatttcattgatgccgctacagtggacgactccggcgagtatcggtgtcagaccaatctgtctacactgtctgaccccgtgcagcttgaggtccacattggatggttgctcttgcaagccccacgctgggttttcaaagaggaagatccaatccatctgcggtgccacagctggaaaaacaccgctctccacaaagtcacatacctgcaaaatggcaaaggacgcaaatacttccatcacaattccgatttttacattccgaaggctaccctgaaagacagcggcagctatttctgccggggactcgtcggctccaagaatgtgtcctccgaaaccgtgaatatcacgattacccaaggactggctgtgcctacaatctctagcttctttccgcctggataccaagtctccttctgtcttgtgatggtcctcctgtttgctgtggacacaggactgtacttttccgtgaaa

SEQ ID NO: 1173 - DNA, 1431 bp, synthetic construct
  source 1..1431: mol_type = other DNA
atggccttaccagtgaccgccttgctcctgccgctggccttgctgctccacgccgccaggccggacatccagatgacccagagcccccctagcctgtctgcctctgtgggcggcaaagtgaccatcacatgcaaggccagccaggacatcgaccgctacatggcctggtatcaggacaagcccggcaagggacccaagctgctgatccacgataccagcaccctccagcccggcatccccagcagattttctggcagcggctccggcagagactacagcttcagcatcagcaacctggaacccgaggacattgccacctactactgcctccagtacgacaacctgtggaccttcggcggaggcaccaagctggaaatcaagagaggcggaggcggaagtggaggcggaggatctggcggcggaggctctcaggtgcaactggtgcagagcggagccgagcttgtgaagcctggcgcttccgtgaagatgagctgcaaagccagcggctacatcttcaccaactacaacatccactgggtcaagaagtccccaggccagggcctggaatggatcggagccatctaccccggaaacggcgacgccccttacagccagaagttccaggacagagccaccctgaccgccgacaccagcagcagcaccacctacatggaactgagcagcctgaccagcgaggacagcgccgtgtactattgcgtgcgggccaactgggatgtggccttcgcctattggggccagggcacactggtgtccgtgtcctctacgcgtggaatgaggactgaggatcttcccaaagctgtcgtctttctcgaaccccaatggtatcgggtgctcgaaaaagactctgtgacactgaaatgccaaggggcctactctcccgaggacaactccacacagtggtttcataatgagtccctcatcagctctcaggccagctcttatttcattgatgccgctacagtggacgactccggcgagtatcggtgtcagaccaatctgtctacactgtctgaccccgtgcagcttgaggtccacattggatggttgctcttgcaagccccacgctgggttttcaaagaggaagatccaatccatctgcggtgccacagctggaaaaacaccgctctccacaaagtcacatacctgcaaaatggcaaaggacgcaaatacttccatcacaattccgatttttacattccgaaggctaccctgaaagacagcggcagctatttctgccggggactcgtcggctccaagaatgtgtcctccgaaaccgtgaatatcacgattacccaaggactggctgtgcctacaatctctagcttctttccgcctggataccaagtctccttctgtcttgtgatggtcctcctgtttgctgtggacacaggactgtacttttccgtgaaa

SEQ ID NO: 1174 - DNA, 1434 bp, synthetic construct
  source 1..1434: mol_type = other DNA
atggccttaccagtgaccgccttgctcctgccgctggccttgctgctccacgccgccaggccggacatccagatgacccagagccctgccagcctgtctgcctctgtgggcgagacagtgaccatcacctgtcgggtgtccggcaacatccacaactacctggcctggtatcagcagaagcagggcaagagcccccaactgctggtgtacaacgccaagaccctggccgatggcgtgcccagcagattttctggctctggcagcggcacccagtacagcctgaagatcaacagcctccagcccgaggacttcggcagctactactgccagcacttctggtccaacccctacaccttcggcggaggcaccaagctggaaatcaagggcggaggcggaagtggaggcggaggatctggcggcggaggctctcaggtgcaactccagcagtctggcgcttccgtgaaggtgtcctgcaaggccagcgaactcgtgcggcctggcacaggctacgccttcaccaattacctgatcgagtgggtcaagcagaggcccggacagggcctggaatggatcggagtgattaacccaggcagcggcggcaccaactacaacgagaagttcaagggcaaggccaccctgaccgccgacaagagcagcagcacagcctacatgcaactgagcagcctgaccagcgacgacagcgccgtgtacttctgcgcccggtacagaagctacgactggtacttcgacgtgtggggagccggcaccaccgtgacagtgtcatctacgcgtggaatgaggactgaggatcttcccaaagctgtcgtctttctcgaaccccaatggtatcgggtgctcgaaaaagactctgtgacactgaaatgccaaggggcctactctcccgaggacaactccacacagtggtttcataatgagtccctcatcagctctcaggccagctcttatttcattgatgccgctacagtggacgactccggcgagtatcggtgtcagaccaatctgtctacactgtctgaccccgtgcagcttgaggtccacattggatggttgctcttgcaagccccacgctgggttttcaaagaggaagatccaatccatctgcggtgccacagctggaaaaacaccgctctccacaaagtcacatacctgcaaaatggcaaaggacgcaaatacttccatcacaattccgatttttacattccgaaggctaccctgaaagacagcggcagctatttctgccggggactcgtcggctccaagaatgtgtcctccgaaaccgtgaatatcacgattacccaaggactggctgtgcctacaatctctagcttctttccgcctggataccaagtctccttctgtcttgtgatggtcctcctgtttgctgtggacacaggactgtacttttccgtgaaa

SEQ ID NO: 1175 - DNA, 1434 bp, synthetic construct
  source 1..1434: mol_type = other DNA
atggccttaccagtgaccgccttgctcctgccgctggccttgctgctccacgccgccaggccggacatccagatgacacagtctccggcgtcactgtccgcctccgtgggggagactgtgactattatttgtagggcatcagttaacatctactcttatttggcctggtaccagcagaagcaaggcaagagtcctcagctgctggtgtataatgcgaagatcctggcagagggcgtgccgagccggttctccggcagcggctcaggtacccaattttccctcaagatcaattcactgcagccagaggactttggcagttactattgtcaacaccactacggcacattcactttcgggtccggtacaaaattggagattaagcgaggcggaggcggaagtggaggcggaggatctggcggcggaggctctcaggtacagttgaaagaaagcgggcctggactggtagcgccttcccaatctctctccatcacgtgcaccatctctggcttctccctgacttcctatggagttcactgggtgaggcagccccccggcaagggactggaatggctggtcgtcatctggtccgacgggtccacaacctacaactccgctctgaaaagtcggctctctatttctaaagataatagcaagagccaggtgtttctgaaaatgaactctctgcagaccgatgatacggccatttactactgcgcttcacactatggctcaaccttggcattcgcttcctggggccacggaacactggtgaccgtttccgcagccacgcgtggaatgaggactgaggatcttcccaaagctgtcgtctttctcgaaccccaatggtatcgggtgctcgaaaaagactctgtgacactgaaatgccaaggggcctactctcccgaggacaactccacacagtggtttcataatgagtccctcatcagctctcaggccagctcttatttcattgatgccgctacagtggacgactccggcgagtatcggtgtcagaccaatctgtctacactgtctgaccccgtgcagcttgaggtccacattggatggttgctcttgcaagccccacgctgggttttcaaagaggaagatccaatccatctgcggtgccacagctggaaaaacaccgctctccacaaagtcacatacctgcaaaatggcaaaggacgcaaatacttccatcacaattccgatttttacattccgaaggctaccctgaaagacagcggcagctatttctgccggggactcgtcggctccaagaatgtgtcctccgaaaccgtgaatatcacgattacccaaggactggctgtgcctacaatctctagcttctttccgcctggataccaagtctccttctgtcttgtgatggtcctcctgtttgctgtggacacaggactgtacttttccgtgaaa

SEQ ID NO: 1176 - DNA, 1458 bp, synthetic construct
  source 1..1458: mol_type = other DNA
atggccttaccagtgaccgccttgctcctgccgctggccttgctgctccacgccgccaggccggacattgtgatgacccagtctcacaaattcatgtccacatcagtaggagacagggtcagcgtcacctgcaaggccagtcagaatgtgggtaataatgtagcctggtatcaacagaaaccagggcaatctcctaaagtactgatttactcggcatcctaccggtacagtggagtccctgatcgcttcacaggcagtggatctgggacagatttcactctcaccatcagtaatgtgcagtctgaagacttggcagagtatttctgtcagcaatataacacctatccattcacgttcggctcggggacaaagttggaaataaaaggcggaggcggaagtggaggcggaggatctggcggcggaggctctgaggtacagctggaggaaagcggtggaggactggtgcaacctggagggtctatgaagctctcttgcgtagcttctgggttcacgttctccaattactggatgaactgggtgcggcagtcccccgagaaaggcctggaatgggtagcagaaattcggttcaagtcccataactatgctacacactttgccgagtctgtcaaaggccggttcactattagtcgagacgacagcaagtcttcagtctacctgcagatgaataacttgcgggcagaggacacaggtatctactactgcaccaggagaatcggcaactccgactatgactggtggtactttgacgtctggggagcaggcaccagcgtgacggtgagttcagcctcaacgcgtggaatgaggactgaggatcttcccaaagctgtcgtctttctcgaaccccaatggtatcgggtgctcgaaaaagactctgtgacactgaaatgccaaggggcctactctcccgaggacaactccacacagtggtttcataatgagtccctcatcagctctcaggccagctcttatttcattgatgccgctacagtggacgactccggcgagtatcggtgtcagaccaatctgtctacactgtctgaccccgtgcagcttgaggtccacattggatggttgctcttgcaagccccacgctgggttttcaaagaggaagatccaatccatctgcggtgccacagctggaaaaacaccgctctccacaaagtcacatacctgcaaaatggcaaaggacgcaaatacttccatcacaattccgatttttacattccgaaggctaccctgaaagacagcggcagctatttctgccggggactcgtcggctccaagaatgtgtcctccgaaaccgtgaatatcacgattacccaaggactggctgtgcctacaatctctagcttctttccgcctggataccaagtctccttctgtcttgtgatggtcctcctgtttgctgtggacacaggactgtacttttccgtgaaa

SEQ ID NO: 1177 - DNA, 1434 bp, synthetic construct
  source 1..1434: mol_type = other DNA
atggccttaccagtgaccgccttgctcctgccgctggccttgctgctccacgccgccaggccggacatccagatgacccagagcagcagcagcttcagcgtgtccctgggcgacagagtgaccatcacatgcaaggccagcgaggacatctacatccggctggcctggtatcagcagaagcccggcaacgcccccagactgctgattagcgccgccacctctctggaaaccggcatccccagcagattctccggctctggcagcggcgaggactacaccctgacaatcaccagcctccagaccgaggacgtggcaacctactactgccagcagtattggaccaccccctggacctttggcggaggcaccaagctggaaatcaagagaggcggaggcggaagtggaggcggaggatctggcggcggaggctctgatgtgcagctccaggaatctggccccggactcgtgaagcctagccagagcctgagcctgacatgcaccgtgaccggctacagcatcaccatcgactacacctggaactggatcagacagttccccggcaacaaactggaatggatgggctacatcacctacagcggcagcaccgactacaaccccagcctgaagtccagaagctccatcaccagagacacctctatgaaccagttcttcttgcagctgaacagcgtgaccaccgaggacaccgccacctactattgcgccagactgggcagaagatacgccctggactattggggccagggcaccagcgtgacagtgtcctctacgcgtggaatgaggactgaggatcttcccaaagctgtcgtctttctcgaaccccaatggtatcgggtgctcgaaaaagactctgtgacactgaaatgccaaggggcctactctcccgaggacaactccacacagtggtttcataatgagtccctcatcagctctcaggccagctcttatttcattgatgccgctacagtggacgactccggcgagtatcggtgtcagaccaatctgtctacactgtctgaccccgtgcagcttgaggtccacattggatggttgctcttgcaagccccacgctgggttttcaaagaggaagatccaatccatctgcggtgccacagctggaaaaacaccgctctccacaaagtcacatacctgcaaaatggcaaaggacgcaaatacttccatcacaattccgatttttacattccgaaggctaccctgaaagacagcggcagctatttctgccggggactcgtcggctccaagaatgtgtcctccgaaaccgtgaatatcacgattacccaaggactggctgtgcctacaatctctagcttctttccgcctggataccaagtctccttctgtcttgtgatggtcctcctgtttgctgtggacacaggactgtacttttccgtgaaa

SEQ ID NO: 1178 - DNA, 1431 bp, synthetic construct
  source 1..1431: mol_type = other DNA
atggccttaccagtgaccgccttgctcctgccgctggccttgctgctccacgccgccaggccggatgtgcagctccaggaaagcggccctggcctcgtgaagcctagccagagcctgagcctgacatgcaccgtgaccggctacagcatcaccagcgactacacctggaactggatcagacagttccccggcaacaagctggaatggatgggctacatcacctacagcggcagcaccagctacaaccccagcctgaagtcccggaactccatcaccagagacaccagcaagaaccagttcttcttgcagctgaacagcgtgaccaccgaggacaccgccacctactactgcgccagactgggcagacggtacaccatggactattggggccagggcacctccgtgaccgtgtctagcggaggcggaggaagtggcggcggaggatctgggggaggcggaagcgatatccagatgacccagtccagcagcagcttcagcgtgtccctgggcgacagagtgaccatcacctgtatggcctccgaggacatctacatccggctggcctggtatcagcagaagcccggcaacgcccccagactgctgattagcgccgccacctctctggaaaccggcgtgccaagcagattcagcggctctggcagcggcaaggactacaccctgagcatcacctccttgcagaccgaggacgtgggcacctactattgccagcagtattggagcagcccctggacctttggcggaggcacaaagctggaaatcaacacgcgtggaatgaggactgaggatcttcccaaagctgtcgtctttctcgaaccccaatggtatcgggtgctcgaaaaagactctgtgacactgaaatgccaaggggcctactctcccgaggacaactccacacagtggtttcataatgagtccctcatcagctctcaggccagctcttatttcattgatgccgctacagtggacgactccggcgagtatcggtgtcagaccaatctgtctacactgtctgaccccgtgcagcttgaggtccacattggatggttgctcttgcaagccccacgctgggttttcaaagaggaagatccaatccatctgcggtgccacagctggaaaaacaccgctctccacaaagtcacatacctgcaaaatggcaaaggacgcaaatacttccatcacaattccgatttttacattccgaaggctaccctgaaagacagcggcagctatttctgccggggactcgtcggctccaagaatgtgtcctccgaaaccgtgaatatcacgattacccaaggactggctgtgcctacaatctctagcttctttccgcctggataccaagtctccttctgtcttgtgatggtcctcctgtttgctgtggacacaggactgtacttttccgtgaaa

SEQ ID NO: 1179 - DNA, 1431 bp, synthetic construct
  source 1..1431: mol_type = other DNA
atggccttaccagtgaccgccttgctcctgccgctggccttgctgctccacgccgccaggccggacatccagatgacccagagcagcagcagcttcagcgtgagcctgggcgacagagtgaccatcacctgcatggccagcgaggacatctacatcagactggcctggtaccagcagaagcccggcaacgcccccagactgctgatcagcgccgccaccagcctggagaccggcgtgcccagcagattcagcggcagcggcagcggcaaggactacaccctgagcatcaccagcctgcagaccgaggacgtgggcacctactactgccagcagtactggagcagcccctggaccttcggcggcggcaccaagctggagatcaacggcggaggcggaagtggaggcggaggatctggcggcggaggctctgacgtgcagctgcaggagagcggccccggcctggtgaagcccagccagagcctgagcctgacctgcaccgtgaccggctacagcatcaccagcgactacacctggaactggatcagacagttccccggcaacaagctggagtggatgggctacatcacctacagcggcagcaccagctacaaccccagcctgaagagcagaaacagcatcaccagagacaccagcaagaaccagttcttcctgcagctgaacagcgtgaccaccgaggacaccgccacctactactgcgccagactgggcagaagatacacaatggactactggggccagggcaccagcgtgaccgtgagcagcacgcgtggaatgaggactgaggatcttcccaaagctgtcgtctttctcgaaccccaatggtatcgggtgctcgaaaaagactctgtgacactgaaatgccaaggggcctactctcccgaggacaactccacacagtggtttcataatgagtccctcatcagctctcaggccagctcttatttcattgatgccgctacagtggacgactccggcgagtatcggtgtcagaccaatctgtctacactgtctgaccccgtgcagcttgaggtccacattggatggttgctcttgcaagccccacgctgggttttcaaagaggaagatccaatccatctgcggtgccacagctggaaaaacaccgctctccacaaagtcacatacctgcaaaatggcaaaggacgcaaatacttccatcacaattccgatttttacattccgaaggctaccctgaaagacagcggcagctatttctgccggggactcgtcggctccaagaatgtgtcctccgaaaccgtgaatatcacgattacccaaggactggctgtgcctacaatctctagcttctttccgcctggataccaagtctccttctgtcttgtgatggtcctcctgtttgctgtggacacaggactgtacttttccgtgaaa

SEQ ID NO: 1180 - DNA, 1437 bp, synthetic construct
  source 1..1437: mol_type = other DNA
atggccttaccagtgaccgccttgctcctgccgctggccttgctgctccacgccgccaggccggaccagatcgtgctgacccagtcccccgctattatgtccgcatcaccgggcgaaaaagtgacgatctcctgtagcgcttcatctagcgtctcctacatgtattggtatcaacagaaacctgggtctagcccaaagccgtggatctacagaaccagtaaccttgccagtggggtgccagcccgcttcagcggtagtggcagtggaacttcctatagcctcacaataagcaacatggaggctgaagatgccgctgcctattactgccagcagtaccacagttacccaaccacgttcggcgggggaactaagctcgaagtaaaaggcggaggcggaagtggaggcggaggatctggcggcggaggctctgaggtgcagctggtggaatctgggggcggcctggtccaacctaagggatcactcaagctctcttgtgcggccagcggattctctttcaatacctatgctatgaattgggtgagacaggcgcccggaaagggcctcgaatggatagcccatatccggtcaaaatcaaacaatttcgcaacctactatgcggactccgtgaaggaccgattttccatctcccgagatgcctccgagaatattctgttcctgcagatgaataacctcaagacagaggacaccgccatgtactactgtgtgcgccagggcggtgactttcccatggattactgggggcaggggaccagcgtgaccgtgagctctacgcgtggaatgaggactgaggatcttcccaaagctgtcgtctttctcgaaccccaatggtatcgggtgctcgaaaaagactctgtgacactgaaatgccaaggggcctactctcccgaggacaactccacacagtggtttcataatgagtccctcatcagctctcaggccagctcttatttcattgatgccgctacagtggacgactccggcgagtatcggtgtcagaccaatctgtctacactgtctgaccccgtgcagcttgaggtccacattggatggttgctcttgcaagccccacgctgggttttcaaagaggaagatccaatccatctgcggtgccacagctggaaaaacaccgctctccacaaagtcacatacctgcaaaatggcaaaggacgcaaatacttccatcacaattccgatttttacattccgaaggctaccctgaaagacagcggcagctatttctgccggggactcgtcggctccaagaatgtgtcctccgaaaccgtgaatatcacgattacccaaggactggctgtgcctacaatctctagcttctttccgcctggataccaagtctccttctgtcttgtgatggtcctcctgtttgctgtggacacaggactgtacttttccgtgaaa

SEQ ID NO: 1181 - DNA, 1440 bp, synthetic construct
  source 1..1440: mol_type = other DNA
atggccttaccagtgaccgccttgctcctgccgctggccttgctgctccacgccgccaggccggacatccagatgacccagagccccagcagcctgtctgccagcgtgggcgacagagtgaccatcacctgtagagccagccagagcatcagcagctacctgaactggtatcagcagaagcccggcaaggcccccaaactgctgatctacgacgccagcaacctggaaaccggcgtgcccagcagattttccggcagcggctctggcaccgacttcaccttcaccatcagctccctccagcccgaggacattgccacctactactgccagcagtacgacaacctgcccctgacctttggcggaggcaccaaggtggacatcaagagaggcggaggcggaagtggaggcggaggatctggcggcggaggctctcaggtgcaactggtggaatctggcggcggagtggtgcagcctggcagaagcctgagactgagctgtgccgccagcggcttcacctttagcagctacgccatgcactgggtgcgccaggcccctggaaaaggcctggaatgggtggccgtgatctcctacgacggctccaacaagtattacgccgacagcgtgaagggccggttcaccatctccagagacaacagcaagaacaccctgtacctccagatgaacagcctgcgggccgaggacaccgccgtgtactattgtgccagggctcacaacagcagctcttggagcttcgactactggggccagggcaccctcgtgaccgtgtcatctacgcgtggaatgaggactgaggatcttcccaaagctgtcgtctttctcgaaccccaatggtatcgggtgctcgaaaaagactctgtgacactgaaatgccaaggggcctactctcccgaggacaactccacacagtggtttcataatgagtccctcatcagctctcaggccagctcttatttcattgatgccgctacagtggacgactccggcgagtatcggtgtcagaccaatctgtctacactgtctgaccccgtgcagcttgaggtccacattggatggttgctcttgcaagccccacgctgggttttcaaagaggaagatccaatccatctgcggtgccacagctggaaaaacaccgctctccacaaagtcacatacctgcaaaatggcaaaggacgcaaatacttccatcacaattccgatttttacattccgaaggctaccctgaaagacagcggcagctatttctgccggggactcgtcggctccaagaatgtgtcctccgaaaccgtgaatatcacgattacccaaggactggctgtgcctacaatctctagcttctttccgcctggataccaagtctccttctgtcttgtgatggtcctcctgtttgctgtggacacaggactgtacttttccgtgaaa

SEQ ID NO: 1182 - DNA, 1467 bp, synthetic construct
  source 1..1467: mol_type = other DNA
atggccttaccagtgaccgccttgctcctgccgctggccttgctgctccacgccgccaggccggacgtcgtgatgacccagagccctctgagcctgcctgtgtccctgggcgatcaggccagcatctcctgcagatccagccagagactggtgcacagcaacggcaacacctacctgcactggtatctgcagaagcccggccagagccccaagctgctgatctaccgggtgtccaacagattccccggcgtgcccgatagattcagcggctctggcagcggcaccgacttcaccctgaagatcagccgggtggaagccgaggacctgggcatctatttctgcagccagagcacccacgtgccctacacctttggcggaggcaccaagctggaaatcaagcggggcggaggcggaagtggaggcggaggatctggcggcggaggctctgaagtgcggctgcagcagtctggccccgacctgattaagcctggggccagcgtgaagatgagctgcaaggccagcggctacaccttcaccggctacgtgatgcactgggtcaagcagaggccaggccagggcctggaatggatcggcttcatcaacccctacaacgacgacatccagagcaacgagcggttccggggcaaggccaccctgaccagcgataagagcagcaccaccgcctacatggaactgagcagcctgacctccgaggacagcgccgtgtactactgtgctaggggagccggctacaacttcgacggggcctacagattcttcgacttttggggccagggcaccacactgaccgtgtcctctacgcgtggaatgaggactgaggatcttcccaaagctgtcgtctttctcgaaccccaatggtatcgggtgctcgaaaaagactctgtgacactgaaatgccaaggggcctactctcccgaggacaactccacacagtggtttcataatgagtccctcatcagctctcaggccagctcttatttcattgatgccgctacagtggacgactccggcgagtatcggtgtcagaccaatctgtctacactgtctgaccccgtgcagcttgaggtccacattggatggttgctcttgcaagccccacgctgggttttcaaagaggaagatccaatccatctgcggtgccacagctggaaaaacaccgctctccacaaagtcacatacctgcaaaatggcaaaggacgcaaatacttccatcacaattccgatttttacattccgaaggctaccctgaaagacagcggcagctatttctgccggggactcgtcggctccaagaatgtgtcctccgaaaccgtgaatatcacgattacccaaggactggctgtgcctacaatctctagcttctttccgcctggataccaagtctccttctgtcttgtgatggtcctcctgtttgctgtggacacaggactgtacttttccgtgaaa

SEQ ID NO: 1183 - DNA, 1440 bp, synthetic construct
  source 1..1440: mol_type = other DNA
atggccttaccagtgaccgccttgctcctgccgctggccttgctgctccacgccgccaggccgagctacgagctgacccagcctcctagcgtgtccgtgtctcctggacagaccgccaccatctcttgcagcggcgatcaactgggcgggaagtacggccactggtatcagaagaagcccggccagagccccgtgctggtgctgtaccaggacagaaaacggcctgccggcatccccgagagattcagcggaagcagcagcggcaacaccatcaccctgaccatcagcggcacccaggccgtggatgaggccgactactactgccaggcttgggacaccaatctgggcggcgtgttcggcggaggcaccaaagtgacagtgctgggacagggcggaggcggaagtggaggcggaggatctggcggcggaggctctcaggtgcaactggtggaaagcggagccgaagtgaagaaacctggggccagcgtgaaggtgtcctgcaaggccagcggctacacctttaccggctactacatgcactgggtgcgccaggctccaggccagggactggaatggatgggccggatcaaccccaatagcggcggcaccaactacgcccagaaattccagggcagagtgaccatgaccagagacaccagcatcagcaccgcctacatggaactgagccggctgagaagcgacgacaccgccgtgtactactgcgccagccctagaggcagaggcagcgccttcgatatttggggccagggcacactcgtgaccgtgtcctctacgcgtggaatgaggactgaggatcttcccaaagctgtcgtctttctcgaaccccaatggtatcgggtgctcgaaaaagactctgtgacactgaaatgccaaggggcctactctcccgaggacaactccacacagtggtttcataatgagtccctcatcagctctcaggccagctcttatttcattgatgccgctacagtggacgactccggcgagtatcggtgtcagaccaatctgtctacactgtctgaccccgtgcagcttgaggtccacattggatggttgctcttgcaagccccacgctgggttttcaaagaggaagatccaatccatctgcggtgccacagctggaaaaacaccgctctccacaaagtcacatacctgcaaaatggcaaaggacgcaaatacttccatcacaattccgatttttacattccgaaggctaccctgaaagacagcggcagctatttctgccggggactcgtcggctccaagaatgtgtcctccgaaaccgtgaatatcacgattacccaaggactggctgtgcctacaatctctagcttctttccgcctggataccaagtctccttctgtcttgtgatggtcctcctgtttgctgtggacacaggactgtacttttccgtgaaa

SEQ ID NO: 1184 - DNA, 1449 bp, synthetic construct
  source 1..1449: mol_type = other DNA
atggccttaccagtgaccgccttgctcctgccgctggccttgctgctccacgccgccaggccgaacttcatgctgacccagccccacagcgtgtccgagagccctggcaagaccgtgaccatctcctgcaccagaagcagcggctctatcgccagcaaatacgtgcagtggtatcagcagaggcccggcagcagccctaccaccgtgatctacgaggacaaccagaggcctagcggcgtgcccgatagattcagcggcagcatcgacaccagcagcaacagcgccagcctgaccatcagcggcctgagaacagaggacgaggccgactactactgccacagctacgacagcaacaaccactccgtgttcggcggaggcaccaaagtgacagtgctgggacagggcggaggcggaagtggaggcggaggatctggcggcggaggctctgaagtgcaactggtggaaagcgggggaggcgtggtgcagccaggcggatctctgagactgagctgtgccgccagcggcttcaccttcagcagctacgccatgagctgggtgcgccaggcccctggaaaaggcctggaatgggtgtccgccatctctggctctggcggcagcacctactacgccgatagcgtgaagggccggttcagcatcagccgggacaacagcaagaacaccctgtacctccagatgaacagcctgcgggccgaggacaccgccgtgtactactgtgccagaaccagaagctccggggccttcgacatctggggccagggaacactcgtgaccgtgtcctctacgcgtggaatgaggactgaggatcttcccaaagctgtcgtctttctcgaaccccaatggtatcgggtgctcgaaaaagactctgtgacactgaaatgccaaggggcctactctcccgaggacaactccacacagtggtttcataatgagtccctcatcagctctcaggccagctcttatttcattgatgccgctacagtggacgactccggcgagtatcggtgtcagaccaatctgtctacactgtctgaccccgtgcagcttgaggtccacattggatggttgctcttgcaagccccacgctgggttttcaaagaggaagatccaatccatctgcggtgccacagctggaaaaacaccgctctccacaaagtcacatacctgcaaaatggcaaaggacgcaaatacttccatcacaattccgatttttacattccgaaggctaccctgaaagacagcggcagctatttctgccggggactcgtcggctccaagaatgtgtcctccgaaaccgtgaatatcacgattacccaaggactggctgtgcctacaatctctagcttctttccgcctggataccaagtctccttctgtcttgtgatggtcctcctgtttgctgtggacacaggactgtacttttccgtgaaa

SEQ ID NO: 1185 - DNA, 1437 bp, synthetic construct
  source 1..1437: mol_type = other DNA
atggccttaccagtgaccgccttgctcctgccgctggccttgctgctccacgccgccaggccggacatccagatgaaccagagccccagcagcctgagcgccagcctgggcgataccatcaccatcacctgtcacgccagccagaacatcaacgtgtggctgagctggtatcagcagaagcccggcaacatccccaagctgctgatctacaaggccagcaacctgcacaccggcgtgcccagcagattttctggcagcggctctggcaccggcttcaccattaccatcagctccctccagcccgaggacattgccacctactactgccagcagggccagagctacccctggacatttggcggaggcaccaagctggaaatcaagagaggcggaggcggaagtggaggcggaggatctggcggcggaggctctgaagtgcaactccagcagagcggcccagagcttgtgaagcctggcgcttccgtgaagattagctgcaaagccagcggctacagcttcaccggctacttcatgaactgggtcaagcagagccacggcaagagcctggagtacatcggcagattcaacccctacaacggcgagacactgtacaaccagaagttcaagggcaaggccaccctgaccgtggacaagagcagcagcaccgtgcacatggaactgctgagcgtgaccagcgaggacagcgccgtgtactactgtggcagaagcggcaacgacgacgctatggactattggggccagggcaccagcgtgaccgtgtctagtgctacgcgtggaatgaggactgaggatcttcccaaagctgtcgtctttctcgaaccccaatggtatcgggtgctcgaaaaagactctgtgacactgaaatgccaaggggcctactctcccgaggacaactccacacagtggtttcataatgagtccctcatcagctctcaggccagctcttatttcattgatgccgctacagtggacgactccggcgagtatcggtgtcagaccaatctgtctacactgtctgaccccgtgcagcttgaggtccacattggatggttgctcttgcaagccccacgctgggttttcaaagaggaagatccaatccatctgcggtgccacagctggaaaaacaccgctctccacaaagtcacatacctgcaaaatggcaaaggacgcaaatacttccatcacaattccgatttttacattccgaaggctaccctgaaagacagcggcagctatttctgccggggactcgtcggctccaagaatgtgtcctccgaaaccgtgaatatcacgattacccaaggactggctgtgcctacaatctctagcttctttccgcctggataccaagtctccttctgtcttgtgatggtcctcctgtttgctgtggacacaggactgtacttttccgtgaaa

SEQ ID NO: 1186 - DNA, 1428 bp, synthetic construct
  source 1..1428: mol_type = other DNA
atggccttaccagtgaccgccttgctcctgccgctggccttgctgctccacgccgccaggccggacatcctgctgacacagagccccgccatcctgtccgtgtctccaggcgagagagtgtcctttagctgccgggccagccagaacatcggcaccagcatccactggtatcagcagcggaccaacggcagccccagactgctgattaagtacgccagcgagtccgtgtccggcatccccagcagattttctggcagcggctccggcaccgacttcaccctgagcatcaacagcgtggaaagcgaggacattgccgactactactgccagcacaccaatagctggcccaccacctttggcggaggcaccaagctggaaatcaagagaggcggaggcggaagtggaggcggaggatctggcggcggaggctctcaggtgcaactccagcagtccgacgccgagcttgtgaagcctggcgcttccgtgaagattagctgcaaggccagcggctacaccttcaccgaccacgccattcactgggtcaagcagaagcccgagcagggcctggaatggatcggctacttcagccccggcaacggcgacatcaagtacaacgagaagttcaagggcaaggccaccctgaccgccgacaagagcagcagcacagcctacatgcaactgaacagcctgaccagcgaggactccgccgtgtacttctgcaagcggagctacggcaactacgactactggggccagggcaccacactgaccgtgtctagtacgcgtggaatgaggactgaggatcttcccaaagctgtcgtctttctcgaaccccaatggtatcgggtgctcgaaaaagactctgtgacactgaaatgccaaggggcctactctcccgaggacaactccacacagtggtttcataatgagtccctcatcagctctcaggccagctcttatttcattgatgccgctacagtggacgactccggcgagtatcggtgtcagaccaatctgtctacactgtctgaccccgtgcagcttgaggtccacattggatggttgctcttgcaagccccacgctgggttttcaaagaggaagatccaatccatctgcggtgccacagctggaaaaacaccgctctccacaaagtcacatacctgcaaaatggcaaaggacgcaaatacttccatcacaattccgatttttacattccgaaggctaccctgaaagacagcggcagctatttctgccggggactcgtcggctccaagaatgtgtcctccgaaaccgtgaatatcacgattacccaaggactggctgtgcctacaatctctagcttctttccgcctggataccaagtctccttctgtcttgtgatggtcctcctgtttgctgtggacacaggactgtacttttccgtgaaa

SEQ ID NO: 1187 - DNA, 1443 bp, synthetic construct
  source 1..1443: mol_type = other DNA
atggccttaccagtgaccgccttgctcctgccgctggccttgctgctccacgccgccaggccggacatcgtgatgacccagagccccgatagcctggccgtgtctctgggagagagagccaccatcaactgcaagagcagccagagcctgctgaacagcggcgaccagaagaactacctgacctggtatcagcagaagcccggccagccccccaagctgctgatctactgggccagcaccagagaaagcggcgtgcccgatagattcagcggcagcggaagtggcaccgacttcaccctgaccatcagttctcttcaggccgaggacgtggccgtgtactactgccagaacgactacagctaccccctgaccttcggccagggcaccaaggtggaaatcaagggcggaggcggaagtggaggcggaggatctggcggcggaggctctcaggtgcagctggtgcagtctggggccgaagtgaagaaaaccggcagcagcgtgaaggtgtcctgcaaggccagcggctacacctttaccgaccacgccattcacgtgtggcggcaggctccaggacaggccctggaatggatgggccacttcagccccggcaacaccgacatcaagtacaacgacaagttcaagggcagagtgaccctgaccgtggaccgcagcatgagcaccgcctacatggaactgagcagcctgcggagcgaggacaccgccatgtactattgcaagaccagcaccttctttttcgactactggggccagggaacaatggtcaccgtgtccagcacgcgtggaatgaggactgaggatcttcccaaagctgtcgtctttctcgaaccccaatggtatcgggtgctcgaaaaagactctgtgacactgaaatgccaaggggcctactctcccgaggacaactccacacagtggtttcataatgagtccctcatcagctctcaggccagctcttatttcattgatgccgctacagtggacgactccggcgagtatcggtgtcagaccaatctgtctacactgtctgaccccgtgcagcttgaggtccacattggatggttgctcttgcaagccccacgctgggttttcaaagaggaagatccaatccatctgcggtgccacagctggaaaaacaccgctctccacaaagtcacatacctgcaaaatggcaaaggacgcaaatacttccatcacaattccgatttttacattccgaaggctaccctgaaagacagcggcagctatttctgccggggactcgtcggctccaagaatgtgtcctccgaaaccgtgaatatcacgattacccaaggactggctgtgcctacaatctctagcttctttccgcctggataccaagtctccttctgtcttgtgatggtcctcctgtttgctgtggacacaggactgtacttttccgtgaaa

SEQ ID NO: 1188 - DNA, 1440 bp, synthetic construct
  source 1..1440: mol_type = other DNA
atggccttaccagtgaccgccttgctcctgccgctggccttgctgctccacgccgccaggccggacatccagatgacccagagccccagcagcctgtctgccagcgtgggcgacagagtgaccatcacatgcaaggccagccaggacgtgtccattgccgtggcctggtatcagcagaagcccggcaaggcccccaaggtgctgatctacagcgccagctacagatacaccggcgtgcccgacagattcagcggctctggcagcggcaccgacttcaccttcaccatcagctccctccagcccgaggatattgccgtgtactactgccagcagcactacatcacccccctgacctttggcggaggcaccaaggtggaaatcaagggcggaggcggaagtggaggcggaggatctggcggcggaggctctcagatccaactggtgcagagcggccacgaagtgaagaaacctggggccagcgtgaaggtgtcctgcaaagccagcggctacacctttaccaactacggcatgaactgggtgcgccaggcccctggacagggcctggaatggatgggctggatcaacaccaagaccggcgagcccacctacgccgaagagttcaagggcagattcgtgttcagcctggaaaccagcgcctccaccgcctacctccagatcagctctctgaaggccgaggacaccgccatgtacttttgcggcagaggcggctacggcagcagctactggtacttcgatgtgtggggccagggcaccaccgtgaccgtgtcatctacgcgtggaatgaggactgaggatcttcccaaagctgtcgtctttctcgaaccccaatggtatcgggtgctcgaaaaagactctgtgacactgaaatgccaaggggcctactctcccgaggacaactccacacagtggtttcataatgagtccctcatcagctctcaggccagctcttatttcattgatgccgctacagtggacgactccggcgagtatcggtgtcagaccaatctgtctacactgtctgaccccgtgcagcttgaggtccacattggatggttgctcttgcaagccccacgctgggttttcaaagaggaagatccaatccatctgcggtgccacagctggaaaaacaccgctctccacaaagtcacatacctgcaaaatggcaaaggacgcaaatacttccatcacaattccgatttttacattccgaaggctaccctgaaagacagcggcagctatttctgccggggactcgtcggctccaagaatgtgtcctccgaaaccgtgaatatcacgattacccaaggactggctgtgcctacaatctctagcttctttccgcctggataccaagtctccttctgtcttgtgatggtcctcctgtttgctgtggacacaggactgtacttttccgtgaaa

SEQ ID NO: 1189 - DNA, 1449 bp, synthetic construct
  source 1..1449: mol_type = other DNA
atggccttaccagtgaccgccttgctcctgccgctggccttgctgctccacgccgccaggccgcaggctgtcgtgacacagcctcctagcgcctctggcacaccaggccagagagtgaccatctcctgtagcggcagcagcagcaacatcggcagcaacaccgtgaactggtatcagcaggtgcccggcaccgctcccaagctgctgatctacagcaacaaccagcggcccagcggcgtgcccgatagattttctggcagcaagagcggcaccagcgccagcctggctatctctggactccagtccgaggacgaggccgactactattgcgccgcctgggacgatagcctgaacggctgggtgttcggcggaggcaccaagctgacagtgctgggcggaggcggaagtggaggcggaggatctggcggcggaggctctcagatgcaactggtgcagagcggagccgaagtgaaagagcctggcgagagcctgcggatctcctgcaagggcagcggctacagcttcaccaatttctggatctcttgggtgcgccagatgcccggcaagggcctggaatggatgggcagagtggaccccggctactcctacagcacctacagccctagcttccagggccacgtgaccatcagcgccgacaagagcaccagcaccgcctacctccagtggaacagcctgaaggccagcgacaccgccatgtactactgcgccagagtgcagtacagcggctattacgattggttcgacccctggggccagggcacactcgtgacagtgtcaagcacgcgtggaatgaggactgaggatcttcccaaagctgtcgtctttctcgaaccccaatggtatcgggtgctcgaaaaagactctgtgacactgaaatgccaaggggcctactctcccgaggacaactccacacagtggtttcataatgagtccctcatcagctctcaggccagctcttatttcattgatgccgctacagtggacgactccggcgagtatcggtgtcagaccaatctgtctacactgtctgaccccgtgcagcttgaggtccacattggatggttgctcttgcaagccccacgctgggttttcaaagaggaagatccaatccatctgcggtgccacagctggaaaaacaccgctctccacaaagtcacatacctgcaaaatggcaaaggacgcaaatacttccatcacaattccgatttttacattccgaaggctaccctgaaagacagcggcagctatttctgccggggactcgtcggctccaagaatgtgtcctccgaaaccgtgaatatcacgattacccaaggactggctgtgcctacaatctctagcttctttccgcctggataccaagtctccttctgtcttgtgatggtcctcctgtttgctgtggacacaggactgtacttttccgtgaaa

SEQ ID NO: 1190 - DNA, 1431 bp, synthetic construct
  source 1..1431: mol_type = other DNA
atggccttaccagtgaccgccttgctcctgccgctggccttgctgctccacgccgccaggccggacatccagatgacccagagccccagcacactgagcgccagcgtgggcgacagagtgaccatcacctgtcgggccagccagaacatcaacaagtggctggcctggtatcagcagaggcccggaaaagccccccagctgctgatctacaaggccagcagcctggaaagcggcgtgcccagcagattttctggcagcggctctggcaccgagtacaccctgaccatcagctccctccagcccgacgacttcgccacctactactgccagcagtacaacagctacgccaccttcggccagggcaccaaggtggaaatcaagagaggcggaggcggaagtggaggcggaggatctggcggcggaggctctcaggtgcagctggtgcagtctggggccgaagtgaagaagcctggcgagagcctgaagatcagctgcaagggctccggctacaacttctctaacaagtggatcggctgggtgcgccagctgcctggcagaggactggaatggatcgccatcatctaccccggctacagcgacatcacctacagccccagcttccagggccgcgtgacaatcagcgccgacaccagcatcaacaccgcctacctgcactggcacagcctgaaggccagcgacaccgccatgtactactgcgtgcggcatacagccctggctggcttcgattattggggcctgggcaccctcgtgaccgtgtctagtacgcgtggaatgaggactgaggatcttcccaaagctgtcgtctttctcgaaccccaatggtatcgggtgctcgaaaaagactctgtgacactgaaatgccaaggggcctactctcccgaggacaactccacacagtggtttcataatgagtccctcatcagctctcaggccagctcttatttcattgatgccgctacagtggacgactccggcgagtatcggtgtcagaccaatctgtctacactgtctgaccccgtgcagcttgaggtccacattggatggttgctcttgcaagccccacgctgggttttcaaagaggaagatccaatccatctgcggtgccacagctggaaaaacaccgctctccacaaagtcacatacctgcaaaatggcaaaggacgcaaatacttccatcacaattccgatttttacattccgaaggctaccctgaaagacagcggcagctatttctgccggggactcgtcggctccaagaatgtgtcctccgaaaccgtgaatatcacgattacccaaggactggctgtgcctacaatctctagcttctttccgcctggataccaagtctccttctgtcttgtgatggtcctcctgtttgctgtggacacaggactgtacttttccgtgaaa

SEQ ID NO: 1191 - DNA, 1446 bp, synthetic construct
  source 1..1446: mol_type = other DNA
atggccttaccagtgaccgccttgctcctgccgctggccttgctgctccacgccgccaggccgcagagcgtcgtgacacagcctcctagcgtgtcagtggcccctggcaagaccgccagaatcacctgtggccggaacaacatcggcagcaagagcgtgcactggtatcagcagaagcccggccaggctcctgtgctggtggtgtacgacgacagcgacagacccagcggcatccccgagagattcagcggcagcaactccggcaataccgccaccctgaccatcagcagagtggaagccggcgacgaggccgactactactgccaagtgtgggacagcagcagcgatcacgtggtgtttggcggaggcaccaagctgacagtgctgggtggcggaggcggaagtggaggcggaggatctggcggcggaggctctgaagtgcaactggtgcagtctggcggaggggtcgtgcggcctggcggatctctgagactgtcttgtgccgccagcggcttcaccttcgacgactacggcatgagctgggtgcgccaggcccctggaaaaggcctggaatgggtgtccggcatcaactggaatggcggcagcaccggctacgccgattctgtgcggggcagattcaccatcagccgggacaacgccaagaacagcctgtacctgcagatgaactccctgcgggccgaggacaccgccctgtactattgcgccagagagcggggctacggctaccacgaccctcacgattattggggccagggcacccttgtcaccgtgtcctctacgcgtggaatgaggactgaggatcttcccaaagctgtcgtctttctcgaaccccaatggtatcgggtgctcgaaaaagactctgtgacactgaaatgccaaggggcctactctcccgaggacaactccacacagtggtttcataatgagtccctcatcagctctcaggccagctcttatttcattgatgccgctacagtggacgactccggcgagtatcggtgtcagaccaatctgtctacactgtctgaccccgtgcagcttgaggtccacattggatggttgctcttgcaagccccacgctgggttttcaaagaggaagatccaatccatctgcggtgccacagctggaaaaacaccgctctccacaaagtcacatacctgcaaaatggcaaaggacgcaaatacttccatcacaattccgatttttacattccgaaggctaccctgaaagacagcggcagctatttctgccggggactcgtcggctccaagaatgtgtcctccgaaaccgtgaatatcacgattacccaaggactggctgtgcctacaatctctagcttctttccgcctggataccaagtctccttctgtcttgtgatggtcctcctgtttgctgtggacacaggactgtacttttccgtgaaa

SEQ ID NO: 1192 - DNA, 1443 bp, synthetic construct
  source 1..1443: mol_type = other DNA
atggccttaccagtgaccgccttgctcctgccgctggccttgctgctccacgccgccaggccggacatcgtgctgacacagagccctgcttctctggccgtgtctctgggacagagagccaccatcagctgtagagccagcgagagcgtggacaactacggcaacaccttcatgcactggtatcagcagaagcccggccagcctcctaagctgctgatctacagagccagcaacctggaaagcggcatccccgccagattttctggcagcggcagcagaaccgacttcaccctgaccatcaatcccgtggaagccgacgacgtggcaacctactactgccagcagagcaacgaggaccctcctacatttggagccggcaccaagctggaactgaaaggcggaggcggaagtggaggcggaggatctggcggcggaggctctcagattcagctggtgcagtctggccccgagctgaagaaacctggcgagacagtgaagatcagctgcaaggccagcggctacatcttcaccaattacggcatgaactgggtcaagcaggcccctggcaagagcttcaagtggatgggctggatcaacacctacaccggcgagagcacatacagcgccgacttcaagggcagattcgccttcagcctggaaaccagcgccagcacagcctacctgcacatcaacgacctgaagaacgaggacaccgccacctacttttgcgccagaagcggcggctacgaccctatggattattggggccagggcaccagcgtgaccgtttcttctacgcgtggaatgaggactgaggatcttcccaaagctgtcgtctttctcgaaccccaatggtatcgggtgctcgaaaaagactctgtgacactgaaatgccaaggggcctactctcccgaggacaactccacacagtggtttcataatgagtccctcatcagctctcaggccagctcttatttcattgatgccgctacagtggacgactccggcgagtatcggtgtcagaccaatctgtctacactgtctgaccccgtgcagcttgaggtccacattggatggttgctcttgcaagccccacgctgggttttcaaagaggaagatccaatccatctgcggtgccacagctggaaaaacaccgctctccacaaagtcacatacctgcaaaatggcaaaggacgcaaatacttccatcacaattccgatttttacattccgaaggctaccctgaaagacagcggcagctatttctgccggggactcgtcggctccaagaatgtgtcctccgaaaccgtgaatatcacgattacccaaggactggctgtgcctacaatctctagcttctttccgcctggataccaagtctccttctgtcttgtgatggtcctcctgtttgctgtggacacaggactgtacttttccgtgaaa

SEQ ID NO: 1193 - DNA, 1437 bp, synthetic construct
  source 1..1437: mol_type = other DNA
atggccttaccagtgaccgccttgctcctgccgctggccttgctgctccacgccgccaggccggagatcgtgctgacacagagccctggcaccctgagcctgtctccaggcgaaagagccacactgagctgtcgggccagccagagcgtgtccaatacctacctggcctggtatcaccagaggcccggacaggctccccggctgctgatctatggcgcttctagcagagccaccggcatccccgatagattcagcggctctggcagcggcaccgacttcgccctgacaatcagctccctggaacccgaggacttcgccgtgtactactgccagcagtacagcaactcctggaccttcggccagggcaccaaggtggaaatcaagagaggcggaggcggaagtggaggcggaggatctggcggcggaggctctcaggtgcaactggtggaatctggcgggggagtggtgcagcctggcagaagcctgagactgtcttgtgccgccagcggcttcaccttcagcagctacgacatgcactgggtgcgccaggcccctggcaaaggactggaatgggtggccgtgatctcctacgacggcaccaacgagtattacgccgacagcgtgaagggccggttcaccatctccagagacaccagcaagaacaccctgtacctccagatgaacagcctgcgggccgaggacacagccgtgtattattgcgccagagagcggtacttcgactggtccttcgactactggggccagggaaccctggtgtccgtgtctagtacgcgtggaatgaggactgaggatcttcccaaagctgtcgtctttctcgaaccccaatggtatcgggtgctcgaaaaagactctgtgacactgaaatgccaaggggcctactctcccgaggacaactccacacagtggtttcataatgagtccctcatcagctctcaggccagctcttatttcattgatgccgctacagtggacgactccggcgagtatcggtgtcagaccaatctgtctacactgtctgaccccgtgcagcttgaggtccacattggatggttgctcttgcaagccccacgctgggttttcaaagaggaagatccaatccatctgcggtgccacagctggaaaaacaccgctctccacaaagtcacatacctgcaaaatggcaaaggacgcaaatacttccatcacaattccgatttttacattccgaaggctaccctgaaagacagcggcagctatttctgccggggactcgtcggctccaagaatgtgtcctccgaaaccgtgaatatcacgattacccaaggactggctgtgcctacaatctctagcttctttccgcctggataccaagtctccttctgtcttgtgatggtcctcctgtttgctgtggacacaggactgtacttttccgtgaaa

SEQ ID NO: 1194 - DNA, 1434 bp, synthetic construct
  source 1..1434: mol_type = other DNA
atggccttaccagtgaccgccttgctcctgccgctggccttgctgctccacgccgccaggccggagctgacacaggaccctgctgtgtctgttgccctgggccagacagtgcggattacctgtcaaggcgacagcctgagaagcaactacgccaactggtatcagcagaagcccggacaggctcccgtgctggttatctacggccagaacaacagacccagcggcatccccgatagattcagcggctctagctctggcaataccgccagcctgacaatcactggcgctcaggctgccgatgaggccgactactactgcgatagcagagtgtccaccggcaatcacgtggtgtttggcggcggaacaaagctgacagtgctcggacaaggcggaggcggaagtggaggcggaggatctggcggcggaggctctgaagttcagctggtgcagagcggagccgaagtgaagaaacctggggcctctgtgaaggtgtcctgcaaggcttccggctacacctttaccagctacgccatgcactgggtccgacaggcacctggacaacggcttgaatggatgggctggatcaacgccggcaacggcaacaccaagtacagccagaaattccagggccgcgtgaccatcaccagagatacaagcgccagcaccgcctacatggaactgtctagcctgagatccgaggacaccgccgtgtactactgtgccagagacatcagctacggcagcttcgactattggggccagggcacactggtcaccgttagctctacgcgtggaatgaggactgaggatcttcccaaagctgtcgtctttctcgaaccccaatggtatcgggtgctcgaaaaagactctgtgacactgaaatgccaaggggcctactctcccgaggacaactccacacagtggtttcataatgagtccctcatcagctctcaggccagctcttatttcattgatgccgctacagtggacgactccggcgagtatcggtgtcagaccaatctgtctacactgtctgaccccgtgcagcttgaggtccacattggatggttgctcttgcaagccccacgctgggttttcaaagaggaagatccaatccatctgcggtgccacagctggaaaaacaccgctctccacaaagtcacatacctgcaaaatggcaaaggacgcaaatacttccatcacaattccgatttttacattccgaaggctaccctgaaagacagcggcagctatttctgccggggactcgtcggctccaagaatgtgtcctccgaaaccgtgaatatcacgattacccaaggactggctgtgcctacaatctctagcttctttccgcctggataccaagtctccttctgtcttgtgatggtcctcctgtttgctgtggacacaggactgtacttttccgtgaaa

SEQ ID NO: 1195 - DNA, 1422 bp, synthetic construct
  source 1..1422: mol_type = other DNA
atggccttaccagtgaccgccttgctcctgccgctggccttgctgctccacgccgccaggccggacatccagatgacacagagccctagcagcctgtctgccagcgtgggagacagagtgaccatcacctgtagcgccaccagcagcatcagctacatgcactggtatcagcagaagcccggcaaggcccctaaaggctggatctacgataccagcaaactggcccacggcgtgcccagcagattttctggttctggcagcggcaccgacttcaccctgacaatatctagcctccagcctgaggacttcgccacctactactgccaccagagaagaagctaccccttcaccttcggccagggcaccaaggtggaaatcaaaggcggaggcggaagtggaggcggaggatctggcggcggaggctctgaagtgcaactggttcagagcggagccgaagtgaagaaacctggggcctctgtgaaggtgtcctgcaaggcttccggctacacctttaccaatttctggattcactgggtccgacaggctccaggccaaggactggaatggatcggagagatcgaccccagcgacagctacaccaactacaaccagaaattcaaaggccgggtcaccatcaccagagacaccagcacaagcaccgcctacctggaactgagcagcctgagaagcgaggacaccgccgtgtactactgcgccagggaaatcaccaccgtggattattggggccagggaaccctggtcaccgtgtcatctacgcgtggaatgaggactgaggatcttcccaaagctgtcgtctttctcgaaccccaatggtatcgggtgctcgaaaaagactctgtgacactgaaatgccaaggggcctactctcccgaggacaactccacacagtggtttcataatgagtccctcatcagctctcaggccagctcttatttcattgatgccgctacagtggacgactccggcgagtatcggtgtcagaccaatctgtctacactgtctgaccccgtgcagcttgaggtccacattggatggttgctcttgcaagccccacgctgggttttcaaagaggaagatccaatccatctgcggtgccacagctggaaaaacaccgctctccacaaagtcacatacctgcaaaatggcaaaggacgcaaatacttccatcacaattccgatttttacattccgaaggctaccctgaaagacagcggcagctatttctgccggggactcgtcggctccaagaatgtgtcctccgaaaccgtgaatatcacgattacccaaggactggctgtgcctacaatctctagcttctttccgcctggataccaagtctccttctgtcttgtgatggtcctcctgtttgctgtggacacaggactgtacttttccgtgaaa

SEQ ID NO: 1196 - DNA, 1443 bp, synthetic construct
  source 1..1443: mol_type = other DNA
atggccttaccagtgaccgccttgctcctgccgctggccttgctgctccacgccgccaggccggacatccagatgacacagagccctagcagcctgtctgccagcgtgggagacagagtgaccatcacatgcaaggccagccagggcttcaacaaatacgtggcctggtatcagcagaagcccggcaaggctcctaagctgctgatctactacaccagcacactccagcctggcgtgcccagcagattttctggctctggcagcggcagagactacaccctgacaatatccagcctccagccagaggacttcgccacctactactgtctccagtacggcaacctgctgtacgcctttggacagggcaccaaggtggaaatcaagagaggcggaggcggaagtggaggcggaggatctggcggcggaggctctgaagttcagcttgtgcagagcggagccgaagtgaagaaacctggggcctctgtgaaggtgtcctgcaaagccagcggctacacctttaccagctactggatcggctgggtccgacaggctcctggacaaggactggaatggatcggcgacatctatcccggcggaggctacaccaactacaacgagaagttcaagggccgcgtgacaatcaccagagacacctctacaagcaccgcctacctggaactgagcagcctgagaagcgaggacaccgccgtgtactactgcgccagactggatggcagcagctacagaggcgctatggattcttggggccagggcacactggtcaccgtttcttctacgcgtggaatgaggactgaggatcttcccaaagctgtcgtctttctcgaaccccaatggtatcgggtgctcgaaaaagactctgtgacactgaaatgccaaggggcctactctcccgaggacaactccacacagtggtttcataatgagtccctcatcagctctcaggccagctcttatttcattgatgccgctacagtggacgactccggcgagtatcggtgtcagaccaatctgtctacactgtctgaccccgtgcagcttgaggtccacattggatggttgctcttgcaagccccacgctgggttttcaaagaggaagatccaatccatctgcggtgccacagctggaaaaacaccgctctccacaaagtcacatacctgcaaaatggcaaaggacgcaaatacttccatcacaattccgatttttacattccgaaggctaccctgaaagacagcggcagctatttctgccggggactcgtcggctccaagaatgtgtcctccgaaaccgtgaatatcacgattacccaaggactggctgtgcctacaatctctagcttctttccgcctggataccaagtctccttctgtcttgtgatggtcctcctgtttgctgtggacacaggactgtacttttccgtgaaa

SEQ ID NO: 1197 - DNA, 1431 bp, synthetic construct
  source 1..1431: mol_type = other DNA
atggccttaccagtgaccgccttgctcctgccgctggccttgctgctccacgccgccaggccggacatccagatgacacagagccctagcagcctgtctgccagcgtgggagacagagtgaccatcacctgtagagccagccaggacatccggtactacctgaactggtatcagcagaagcccggcaaggcccctaagctgctgatctatgtggcctccagcctccagagcggagtgccttctagattttctggcagcggctccggcaccgagtttaccctgacagtgtctagcttgcagcccgaggacttcgccacctactactgcctgcaagtgtacagcacccctcggacctttggacagggcaccaaggtggaaatcaaaggcggaggcggaagtggaggcggaggatctggcggcggaggctctgaagtgcagcttgttgaatctggcggcggactggctaagcctggcggatctctgagactgtcttgtgccgccagcggcttccggttcaccttcaacaactactacatggactgggtccgacaggcccctggacaaggacttgaatgggtgtccagaatcagcagcagcggcgaccctacttggtacgccgattctgtgaagggcagattcaccatcagcagagagaacgccaagaacaccctgttcctccagatgaactccctgagagccgaggacaccgccgtgtactattgtgcctctctgaccaccggcagcgattcttggggacagggcgtgctggttaccgtgtcatctacgcgtggaatgaggactgaggatcttcccaaagctgtcgtctttctcgaaccccaatggtatcgggtgctcgaaaaagactctgtgacactgaaatgccaaggggcctactctcccgaggacaactccacacagtggtttcataatgagtccctcatcagctctcaggccagctcttatttcattgatgccgctacagtggacgactccggcgagtatcggtgtcagaccaatctgtctacactgtctgaccccgtgcagcttgaggtccacattggatggttgctcttgcaagccccacgctgggttttcaaagaggaagatccaatccatctgcggtgccacagctggaaaaacaccgctctccacaaagtcacatacctgcaaaatggcaaaggacgcaaatacttccatcacaattccgatttttacattccgaaggctaccctgaaagacagcggcagctatttctgccggggactcgtcggctccaagaatgtgtcctccgaaaccgtgaatatcacgattacccaaggactggctgtgcctacaatctctagcttctttccgcctggataccaagtctccttctgtcttgtgatggtcctcctgtttgctgtggacacaggactgtacttttccgtgaaa

SEQ ID NO: 1198 - DNA, 1434 bp, synthetic construct
  source 1..1434: mol_type = other DNA
atggccttaccagtgaccgccttgctcctgccgctggccttgctgctccacgccgccaggccggagatcgtgatgacacagagccccgccacactgagtgtgtctccaggcgaaagagccacactgtcctgtagagccagccagagcgtgtccagaaacctggcctggtatcagcagaagcctggacaggctccccggctgttgatctacggcgcttctacaagagccaccggcattcccgccagattttctggctctggcagcggcaccgagttcaccctgacaatcggaagcctccagagcgaggacttcgccgtgtactactgccagcagtacaagacctggcctcggacctttggacagggcaccaacgtggaaatcaaaggcggaggcggaagtggaggcggaggatctggcggcggaggctctcaagttcagctgcaacaatggggagccggcctgctgaagcctagcgaaacactgtctctgacctgcgccgtgttcggcggctctttcagcggctactactggtcctggatcagacagcctcctggcaaaggactggaatggatcggcgagatcaaccaccggggcaacaccaacgacaaccccagcctgaaaagcagagtgaccatcagcgtggacaccagcaagaaccagttcgccctgaagctgagcagcgtgacagccgctgataccgccgtgtattattgcgccagagagcggggctacacctacggcaatttcgatcactggggccagggcaccctggtcacagtttcttctacgcgtggaatgaggactgaggatcttcccaaagctgtcgtctttctcgaaccccaatggtatcgggtgctcgaaaaagactctgtgacactgaaatgccaaggggcctactctcccgaggacaactccacacagtggtttcataatgagtccctcatcagctctcaggccagctcttatttcattgatgccgctacagtggacgactccggcgagtatcggtgtcagaccaatctgtctacactgtctgaccccgtgcagcttgaggtccacattggatggttgctcttgcaagccccacgctgggttttcaaagaggaagatccaatccatctgcggtgccacagctggaaaaacaccgctctccacaaagtcacatacctgcaaaatggcaaaggacgcaaatacttccatcacaattccgatttttacattccgaaggctaccctgaaagacagcggcagctatttctgccggggactcgtcggctccaagaatgtgtcctccgaaaccgtgaatatcacgattacccaaggactggctgtgcctacaatctctagcttctttccgcctggataccaagtctccttctgtcttgtgatggtcctcctgtttgctgtggacacaggactgtacttttccgtgaaa

SEQ ID NO: 1199 - DNA, 1452 bp, synthetic construct
  source 1..1452: mol_type = other DNA
atggccttaccagtgaccgccttgctcctgccgctggccttgctgctccacgccgccaggccggacatccagatgacccagagccccagcagcctgtctgccagcgtgggcgacagagtgaccatcacatgcaaggccagcaagaacatcagaagctacctggcctggtatcagcagaagcccggcaaggcccccaagctgctgatctacagcggcagcacactgcacagcggcgtgcccagcagattttccggctctggcagcggcaccgacttcaccctgaccatctctagcctccagcccgaggacttcgccacctactactgccagcagcaccacgagtaccccctgacattcggccagggcaccaaggtggaaatcaagagaggcggaggcggaagtggaggcggaggatctggcggcggaggctctcaggtgcaactccaggaatctggccccggactcgtgaagcccagcgagacactgagcctgacctgtaccgtgtccggctacaccatcaccagcggctacgactggtcctggatcagacagcctcctggcaagggcctggaatggatcggctacatcaactacggcggctccaccaactacaagcccagcctgggaagccgcgtgacaatcagcgtggacacctccaagaaccagttcagcctgaagctgagcagcgtgacagccgccgataccgccgtgtactactgcgcccggtacaacgagtacaagagctacatctacgattggtacttcgacttctggggccagggaaccctcgtgaccgtgtctagtacgcgtggaatgaggactgaggatcttcccaaagctgtcgtctttctcgaaccccaatggtatcgggtgctcgaaaaagactctgtgacactgaaatgccaaggggcctactctcccgaggacaactccacacagtggtttcataatgagtccctcatcagctctcaggccagctcttatttcattgatgccgctacagtggacgactccggcgagtatcggtgtcagaccaatctgtctacactgtctgaccccgtgcagcttgaggtccacattggatggttgctcttgcaagccccacgctgggttttcaaagaggaagatccaatccatctgcggtgccacagctggaaaaacaccgctctccacaaagtcacatacctgcaaaatggcaaaggacgcaaatacttccatcacaattccgatttttacattccgaaggctaccctgaaagacagcggcagctatttctgccggggactcgtcggctccaagaatgtgtcctccgaaaccgtgaatatcacgattacccaaggactggctgtgcctacaatctctagcttctttccgcctggataccaagtctccttctgtcttgtgatggtcctcctgtttgctgtggacacaggactgtacttttccgtgaaa

SEQ ID NO: 1200 - DNA, 1458 bp, synthetic construct
  source 1..1458: mol_type = other DNA
atggccttaccagtgaccgccttgctcctgccgctggccttgctgctccacgccgccaggccgcagtctgtggtcacacagcctccatccgtgtctgctgcccctggacagaaagtgaccatctcctgtagcggcagcagcagcaacatcggcaacaactacgtgtcctggtatcagcagctccccggcacagctcccaaactgctgatctacgacaacaacaagcggcccagcggcatccccgatagattttctggcagcaagagcggcaccagcgccacactgggaattaccggacttcagacaggcgacgaggccgactactactgtggcacatgggatggcagcctgtacaccatgcttttcggcggaggcaccaagctgacagtgcttggcggaggcggaagtggaggcggaggatctggcggcggaggctctgaagtgcaactggtggaatctggcggcggactggttaagcctggcggatctctgagactgtcttgtgccgccagcggcttcaccttcagcaatgcctggatgagctgggttcgacaggcccctggaaaaggactggaatgggtcggattcatccggtccaaagcctacggcggcaccacagaatatgccgcctctgtgaagggcagattcaccatcagccgggacgacagcaagtctatcgcctacctccagatgaacaacctgaaaaccgaggacaccgccgtgtactactgcgccagagatggcctgtacagcagctcttggtacgacagcgattactggggccagggcacactggtcacagtgtcatctacgcgtggaatgaggactgaggatcttcccaaagctgtcgtctttctcgaaccccaatggtatcgggtgctcgaaaaagactctgtgacactgaaatgccaaggggcctactctcccgaggacaactccacacagtggtttcataatgagtccctcatcagctctcaggccagctcttatttcattgatgccgctacagtggacgactccggcgagtatcggtgtcagaccaatctgtctacactgtctgaccccgtgcagcttgaggtccacattggatggttgctcttgcaagccccacgctgggttttcaaagaggaagatccaatccatctgcggtgccacagctggaaaaacaccgctctccacaaagtcacatacctgcaaaatggcaaaggacgcaaatacttccatcacaattccgatttttacattccgaaggctaccctgaaagacagcggcagctatttctgccggggactcgtcggctccaagaatgtgtcctccgaaaccgtgaatatcacgattacccaaggactggctgtgcctacaatctctagcttctttccgcctggataccaagtctccttctgtcttgtgatggtcctcctgtttgctgtggacacaggactgtacttttccgtgaaa

SEQ ID NO: 1201 - DNA, 1473 bp, synthetic construct
  source 1..1473: mol_type = other DNA
atggccttaccagtgaccgccttgctcctgccgctggccttgctgctccacgccgccaggccgcagtctgtgctgacacagcctcctagtgtgtctggcgctcctggacagagagtgaccatctcttgtaccggcagcagcagcaatatcggagccggctatgacgtgcactggtatcagcagctccctggcacagcccctaaactgctgatcttcggcaacagcaacagacccagcggcgtgcccgatagattcagcggctttaagagcggcacaagcgccagcctggctatcactggactgcaagccgaggacgaggccgactacttctgccagagctacgatagcagcctgagcggcagcggagtgtttggcacaggcaccaaagtgacagtgcttggcggcggaggcggaagtggaggcggaggatctggcggcggaggctctcaaatgcaactggttcaaagcggcggtggcctggtgcaacctggaagaagtctgagactgagctgtgccgccagcggcttcaccttcgatgattacgccatgcactgggtccgacaggcccctggaaaaggactggaatgggtgtccggcatctcctggaatagcggctctatcggctacgccgacagcgtgaagggcagattcaccatcagccgggacaacgccaagaacagcctgtacctccagatgaactccctgagagccgaggatacagccctgtactactgcgccaaggacatccacagcggcagctactacggcctgctgtactacgctatggacgtgtggggccagggcacaaccgtgacagtttcttctacgcgtggaatgaggactgaggatcttcccaaagctgtcgtctttctcgaaccccaatggtatcgggtgctcgaaaaagactctgtgacactgaaatgccaaggggcctactctcccgaggacaactccacacagtggtttcataatgagtccctcatcagctctcaggccagctcttatttcattgatgccgctacagtggacgactccggcgagtatcggtgtcagaccaatctgtctacactgtctgaccccgtgcagcttgaggtccacattggatggttgctcttgcaagccccacgctgggttttcaaagaggaagatccaatccatctgcggtgccacagctggaaaaacaccgctctccacaaagtcacatacctgcaaaatggcaaaggacgcaaatacttccatcacaattccgatttttacattccgaaggctaccctgaaagacagcggcagctatttctgccggggactcgtcggctccaagaatgtgtcctccgaaaccgtgaatatcacgattacccaaggactggctgtgcctacaatctctagcttctttccgcctggataccaagtctccttctgtcttgtgatggtcctcctgtttgctgtggacacaggactgtacttttccgtgaaa

SEQ ID NO: 1202 - DNA, 1473 bp, synthetic construct
  source 1..1473: mol_type = other DNA
atggccttaccagtgaccgccttgctcctgccgctggccttgctgctccacgccgccaggccgctgcctgttctgacacagcctccatctgcctctggcacacctggacagagagtgaccatcagctgtagcggcagaagcagcaacatcggcagcaacagcgtgaactggtacagacagcttcctggcgctgcccctaagctgctgatctacagcaacaaccagcggcctcctggcgtgccagtcagattttctggcagcaagagcggcacaagcgccagcctggctatttctggactccagtctgaggacgaggccacctactactgtgccacctgggacgacaacctgaacgtgcactacgtgttcggcaccggcaccaaagtgacagtgcttggaagtagaggcggaggcggaagtggaggcggaggatctggcggcggaggctctcttgaaatggctcaggtgcagctggtgcagagcggagccgaagtgaagaaacctggcagcagcgtgaaggtgtcctgcaaagcttctggcggcaccttcagcagctacgccatctcttgggttcgacaggcccctggacaaggactggaatggatgggcagaatcatccccatcctgggaatcgccaactacgcccagaaattccagggcagagtgacaatcaccgccgacaagagcaccagcaccgcctacatggaactgagcagcctgagaagcgaggacaccgccgtgtactattgtgcaagaggcggctactacagccacgacatgtggagcgaagattggggccagggcacactggtcacagtgtcatctacgcgtggaatgaggactgaggatcttcccaaagctgtcgtctttctcgaaccccaatggtatcgggtgctcgaaaaagactctgtgacactgaaatgccaaggggcctactctcccgaggacaactccacacagtggtttcataatgagtccctcatcagctctcaggccagctcttatttcattgatgccgctacagtggacgactccggcgagtatcggtgtcagaccaatctgtctacactgtctgaccccgtgcagcttgaggtccacattggatggttgctcttgcaagccccacgctgggttttcaaagaggaagatccaatccatctgcggtgccacagctggaaaaacaccgctctccacaaagtcacatacctgcaaaatggcaaaggacgcaaatacttccatcacaattccgatttttacattccgaaggctaccctgaaagacagcggcagctatttctgccggggactcgtcggctccaagaatgtgtcctccgaaaccgtgaatatcacgattacccaaggactggctgtgcctacaatctctagcttctttccgcctggataccaagtctccttctgtcttgtgatggtcctcctgtttgctgtggacacaggactgtacttttccgtgaaa

SEQ ID NO: 1203 - DNA, 1440 bp, synthetic construct
  source 1..1440: mol_type = other DNA
atggccttaccagtgaccgccttgctcctgccgctggccttgctgctccacgccgccaggccggacatcgtgctgacacagagccctgcttctctggccgtgtctctgggagagagagccaccatcaactgtagagccagcgagagcgtgtccgtgattggagcccacctgatccactggtatcagcagaagcctggacagcctcctaagctgctgatctacctggcctccaacctggaaacaggcgtgccagccagattttctggcagcggctctggcaccgatttcaccctgacaatcagcagcctccaggccgaagatgccgccatctactactgcctccagagccggatcttccccagaacctttggacagggcaccaagctggaaatcaaaggcggaggcggaagtggaggcggaggatctggcggcggaggctctcaagttcagctggtgcagtctggctccgagctgaagaaacctggcgagtccgtgaagatcagctgcaaggccagcggctacaccttcaccgactacagcatcaactgggtcaagcaggcccctggacagggactgaaatggatgggctggatcaacaccgagacaagagagcccgcctacgcctacgacttcagaggcagattcgtgttctccctggacaccagcgccagcacagcctatctccagatcagctctctgaaggccgaggataccgccgtgtacttctgcgccctggactacagctacgctatggactattggggccagggcaccctggtcacagtctcttctacgcgtggaatgaggactgaggatcttcccaaagctgtcgtctttctcgaaccccaatggtatcgggtgctcgaaaaagactctgtgacactgaaatgccaaggggcctactctcccgaggacaactccacacagtggtttcataatgagtccctcatcagctctcaggccagctcttatttcattgatgccgctacagtggacgactccggcgagtatcggtgtcagaccaatctgtctacactgtctgaccccgtgcagcttgaggtccacattggatggttgctcttgcaagccccacgctgggttttcaaagaggaagatccaatccatctgcggtgccacagctggaaaaacaccgctctccacaaagtcacatacctgcaaaatggcaaaggacgcaaatacttccatcacaattccgatttttacattccgaaggctaccctgaaagacagcggcagctatttctgccggggactcgtcggctccaagaatgtgtcctccgaaaccgtgaatatcacgattacccaaggactggctgtgcctacaatctctagcttctttccgcctggataccaagtctccttctgtcttgtgatggtcctcctgtttgctgtggacacaggactgtacttttccgtgaaa

SEQ ID NO: 1204 - DNA, 1443 bp, synthetic construct
  source 1..1443: mol_type = other DNA
atggccttaccagtgaccgccttgctcctgccgctggccttgctgctccacgccgccaggccggacatcgtgctgacacagtctcccgccacactgtcactgagccctggcgatagagccacactgagctgtagagccagcgagagcgtgacaatcctgggcagccacctgatctactggtatcagcagaagcccggacaggcccctagactgctgattcagctcgccagcaatgtgcagacaggcatccctgccagattttccggcagcggcagcagaaccgatttcaccctgaccataagcagcctggaacctgaggacttcgccgtgtactactgcctccagagccggacaatccccagaacctttggacagggcaccaagctggaaatcaagagaggcggaggcggaagtggaggcggaggatctggcggcggaggctctcaagttcaactggtgcagagcggctccgagctgaagaaacctggcgagtccgtgaagattagctgcaaggccagcggctacaccttcacacactacagcatgaactgggtccgacaggctccaggccaaggactggaatggatgggcagaatcaacaccgagacaggcgagcccctgtacgccgacgatttcaagggcagattcgtgttcagcctggacaccagcgccagcacagcctatctccagatcagctctctgaaggccgaggacaccgccgtgtattattgcagcaacgactacctgtactccctggactattggggccagggcacactggtcacagtgtctagtacgcgtggaatgaggactgaggatcttcccaaagctgtcgtctttctcgaaccccaatggtatcgggtgctcgaaaaagactctgtgacactgaaatgccaaggggcctactctcccgaggacaactccacacagtggtttcataatgagtccctcatcagctctcaggccagctcttatttcattgatgccgctacagtggacgactccggcgagtatcggtgtcagaccaatctgtctacactgtctgaccccgtgcagcttgaggtccacattggatggttgctcttgcaagccccacgctgggttttcaaagaggaagatccaatccatctgcggtgccacagctggaaaaacaccgctctccacaaagtcacatacctgcaaaatggcaaaggacgcaaatacttccatcacaattccgatttttacattccgaaggctaccctgaaagacagcggcagctatttctgccggggactcgtcggctccaagaatgtgtcctccgaaaccgtgaatatcacgattacccaaggactggctgtgcctacaatctctagcttctttccgcctggataccaagtctccttctgtcttgtgatggtcctcctgtttgctgtggacacaggactgtacttttccgtgaaa

SEQ ID NO: 1205 - DNA, 1455 bp, synthetic construct
  source 1..1455: mol_type = other DNA
atggccttaccagtgaccgccttgctcctgccgctggccttgctgctccacgccgccaggccggacttcgtgatgacacagagccctgatagcctggccgtgtctctcggcgagcgagtgaccatgagctgcaagtctagccagagcctgctgaacagcggcaaccagaagaactacctgacctggtatcagcagaagcccggccagcctcctaagctgctgatctactgggccagcaccagagaaagcggcgtgcccgatagattttctggctctggcagcggcaccgacttcaccctgacaatttctagcctgcaagccgaggacgtggccgtgtactactgccagaacgactacagctacccctacaccttcggccagggcaccaagctggaaatcaaaggcggaggcggaagtggaggcggaggatctggcggcggaggctctgaagtgcaactggttcagagcggagccgagctgaagaaacctggggccagcgtgaaggtgtcctgtaaagccagcggctacacctttaccgactactacatgaaatgggtccgacaggccccaggccagggactcgaatggatcggcgatattatccccagcaacggggccaccttctacaaccagaaattcaagggccgcgtgaccatcaccgtggacaagagcacaagcaccgcctacatggaactgagcagcctgagaagcgaggacaccgccgtgtattattgcgccagaagccatctgctgcgggccagttggttcgcctattggggacagggaaccctggtcaccgttagctctacgcgtggaatgaggactgaggatcttcccaaagctgtcgtctttctcgaaccccaatggtatcgggtgctcgaaaaagactctgtgacactgaaatgccaaggggcctactctcccgaggacaactccacacagtggtttcataatgagtccctcatcagctctcaggccagctcttatttcattgatgccgctacagtggacgactccggcgagtatcggtgtcagaccaatctgtctacactgtctgaccccgtgcagcttgaggtccacattggatggttgctcttgcaagccccacgctgggttttcaaagaggaagatccaatccatctgcggtgccacagctggaaaaacaccgctctccacaaagtcacatacctgcaaaatggcaaaggacgcaaatacttccatcacaattccgatttttacattccgaaggctaccctgaaagacagcggcagctatttctgccggggactcgtcggctccaagaatgtgtcctccgaaaccgtgaatatcacgattacccaaggactggctgtgcctacaatctctagcttctttccgcctggataccaagtctccttctgtcttgtgatggtcctcctgtttgctgtggacacaggactgtacttttccgtgaaa

SEQ ID NO: 1206 - DNA, 1455 bp, synthetic construct
  source 1..1455: mol_type = other DNA
atggccttaccagtgaccgccttgctcctgccgctggccttgctgctccacgccgccaggccggacttcgtgatgacacagagccctgatagcctggccgtgtctctcggcgagcgagtgaccatgagctgcaagtctagccagagcctgctgaacagcggcaaccagaagaactacctgacctggtatcagcagaagcccggccagcctcctaagctgctgatctactgggccagcaccagagaaagcggcgtgcccgatagattttctggctctggcagcggcaccgacttcaccctgacaatttctagcctgcaagccgaggacgtggccgtgtactactgccagaacgactacagctacccctacaccttcggccagggcaccaagctggaaatcaaaggcggaggcggaagtggaggcggaggatctggcggcggaggctctcaagtgcaactggttcagagcggagccgagctgaagaaacctggggccagcgtgaaggtgtcctgtaaagccagcggctacacctttaccgactactacatgaaatgggtccgacaggccccaggccagggactcgaatggatcggcgatattatccccagcaacggggccaccttctacaaccagaaattcaagggccgcgtgaccatcaccgtggacaagagcacaagcaccgcctacatggaactgagcagcctgagaagcgaggacaccgccgtgtattattgcgccagaagccatctgctgcgggccagttggttcgcctattggggacagggaaccctggtcaccgttagctctacgcgtggaatgaggactgaggatcttcccaaagctgtcgtctttctcgaaccccaatggtatcgggtgctcgaaaaagactctgtgacactgaaatgccaaggggcctactctcccgaggacaactccacacagtggtttcataatgagtccctcatcagctctcaggccagctcttatttcattgatgccgctacagtggacgactccggcgagtatcggtgtcagaccaatctgtctacactgtctgaccccgtgcagcttgaggtccacattggatggttgctcttgcaagccccacgctgggttttcaaagaggaagatccaatccatctgcggtgccacagctggaaaaacaccgctctccacaaagtcacatacctgcaaaatggcaaaggacgcaaatacttccatcacaattccgatttttacattccgaaggctaccctgaaagacagcggcagctatttctgccggggactcgtcggctccaagaatgtgtcctccgaaaccgtgaatatcacgattacccaaggactggctgtgcctacaatctctagcttctttccgcctggataccaagtctccttctgtcttgtgatggtcctcctgtttgctgtggacacaggactgtacttttccgtgaaa

SEQ ID NO: 1207 - DNA, 1425 bp, synthetic construct
  source 1..1425: mol_type = other DNA
atggccttaccagtgaccgccttgctcctgccgctggccttgctgctccacgccgccaggccggacgtgcagatcacacagagccctagctacctggctgcctctcctggcgagacaatcaccatcaactgtcgggccagcaagagcatcagcaaggacctggcctggtatcaagagaagcccggcaagaccaacaagctgctgatctacagcggcagcacactccagtctggcatccccagcagattttccggctctggcagcggcaccgatttcaccctgaccataagcagcctggaacctgaggacttcgccatgtactactgccagcagcacaacaagtacccctacacctttggcggaggcaccaagctggaaatcaagagaggcggaggcggaagtggaggcggaggatctggcggcggaggctctcaagttcaactgcaacagcctggggccgagcttgttagacctggcgcttctgtgaagctgagctgcaaggccagcggctacaccttcaccagctactggatgaactgggtcaagcagcggcctgaccagggcctcgaatggatcggcagaatcgacccctacgacagcgagacacactacaaccagaagttcaaggacaaggccatcctgaccgtggacaagagcagctccaccgcctacatgcaactgagcagcctgacctctgaggatagcgccgtgtactattgcgccagaggcaactgggacgactattggggccagggcacaaccctgacagtgtctagtacgcgtggaatgaggactgaggatcttcccaaagctgtcgtctttctcgaaccccaatggtatcgggtgctcgaaaaagactctgtgacactgaaatgccaaggggcctactctcccgaggacaactccacacagtggtttcataatgagtccctcatcagctctcaggccagctcttatttcattgatgccgctacagtggacgactccggcgagtatcggtgtcagaccaatctgtctacactgtctgaccccgtgcagcttgaggtccacattggatggttgctcttgcaagccccacgctgggttttcaaagaggaagatccaatccatctgcggtgccacagctggaaaaacaccgctctccacaaagtcacatacctgcaaaatggcaaaggacgcaaatacttccatcacaattccgatttttacattccgaaggctaccctgaaagacagcggcagctatttctgccggggactcgtcggctccaagaatgtgtcctccgaaaccgtgaatatcacgattacccaaggactggctgtgcctacaatctctagcttctttccgcctggataccaagtctccttctgtcttgtgatggtcctcctgtttgctgtggacacaggactgtacttttccgtgaaa

SEQ ID NO: 1208 - DNA, 1431 bp, synthetic construct
  source 1..1431: mol_type = other DNA
atggccttaccagtgaccgccttgctcctgccgctggccttgctgctccacgccgccaggccggagatcgtgctgacacagagccctaccagcatgacagcctctccaggcgagcaagtgaccatcacctgtagagccagcagcagcatcaactacatgcactggtatcagcagaagcctggcgcaagccccagaccttggatctacgagacaagcaagctggcctccggcgtgcccgatagattttctggatctgccagcggcaccagctacagcctgaccatcaacaacatggaagccgaggacgccgccacctactactgccagcagtggaattacccctcctggacctttggcggaggcaccaagctggaacttaaaggcggaggcggaagtggaggcggaggatctggcggcggaggctctgaagtgcagctcgttgagtctggtggcggactggttcagcctggaagaagcctgaagctgagctgtgccgccagcggcttcaccttcagcgactacaatatggcctgggtccgacaggcccctaagaaaggactggaatgggtcgccaccatcctgtacgatggcggcagaacctactaccggggcagcgtgaagggcagattcaccatcagcagagacaacgccaagagcaccctgtacctgcggatggactctctgagaagcgaggataccgccacatattactgtgccacacacagccggggcaccgactactttgattattggggccagggcgtgatggttaccgtgtctagtacgcgtggaatgaggactgaggatcttcccaaagctgtcgtctttctcgaaccccaatggtatcgggtgctcgaaaaagactctgtgacactgaaatgccaaggggcctactctcccgaggacaactccacacagtggtttcataatgagtccctcatcagctctcaggccagctcttatttcattgatgccgctacagtggacgactccggcgagtatcggtgtcagaccaatctgtctacactgtctgaccccgtgcagcttgaggtccacattggatggttgctcttgcaagccccacgctgggttttcaaagaggaagatccaatccatctgcggtgccacagctggaaaaacaccgctctccacaaagtcacatacctgcaaaatggcaaaggacgcaaatacttccatcacaattccgatttttacattccgaaggctaccctgaaagacagcggcagctatttctgccggggactcgtcggctccaagaatgtgtcctccgaaaccgtgaatatcacgattacccaaggactggctgtgcctacaatctctagcttctttccgcctggataccaagtctccttctgtcttgtgatggtcctcctgtttgctgtggacacaggactgtacttttccgtgaaa

SEQ ID NO: 1209 - DNA, 1458 bp, synthetic construct
  source 1..1458: mol_type = other DNA
atggccttaccagtgaccgccttgctcctgccgctggccttgctgctccacgccgccaggccggacatcgtgatgacacagagcccttctagcctggccgtgtctgagggcgagacagtgaccatcaactgcaagagcagccagagcttcctgtctagcggcgacggcaagaattacgtggcctggtatcagtacaagcccggacagagccccaagctgctgatctactgggccagcacaagacagagcggcgtgcccgatagattcatcggctctggcagcggcaccgacttcaccctgacaatctctacagtgcaggccgaggacctggctatctactactgccagcagtattacgacacccctctgacctttggctccggcaccaagctggaaatcaaaggcggaggcggaagtggaggcggaggatctggcggcggaggctctgaagtgaagctgcaagagtctggccccagcctggtgcagagtagccaaacactgagcctgacctgtaccgtgtccggctttagcctgaccagctaccacatccactgggtccgacagacccctggcaaaggactggaatggatgggcgtgatgtggagcgacggcgacaccagctataacagcgccctgaagtcccggctgagcatcagcagagatacaagccagagccaggtgttcctgaagatgaacagcctccagaccgaggacaccgccacctactattgtgccagaggctactacagcagctacctgtacctttggttcgcctattggggccagggcaccctggttacagtcagctctacgcgtggaatgaggactgaggatcttcccaaagctgtcgtctttctcgaaccccaatggtatcgggtgctcgaaaaagactctgtgacactgaaatgccaaggggcctactctcccgaggacaactccacacagtggtttcataatgagtccctcatcagctctcaggccagctcttatttcattgatgccgctacagtggacgactccggcgagtatcggtgtcagaccaatctgtctacactgtctgaccccgtgcagcttgaggtccacattggatggttgctcttgcaagccccacgctgggttttcaaagaggaagatccaatccatctgcggtgccacagctggaaaaacaccgctctccacaaagtcacatacctgcaaaatggcaaaggacgcaaatacttccatcacaattccgatttttacattccgaaggctaccctgaaagacagcggcagctatttctgccggggactcgtcggctccaagaatgtgtcctccgaaaccgtgaatatcacgattacccaaggactggctgtgcctacaatctctagcttctttccgcctggataccaagtctccttctgtcttgtgatggtcctcctgtttgctgtggacacaggactgtacttttccgtgaaa

SEQ ID NO: 1210 - DNA, 1470 bp, synthetic construct
  source 1..1470: mol_type = other DNA
atggccttaccagtgaccgccttgctcctgccgctggccttgctgctccacgccgccaggccggacgtgctgatgacccagacacctgtgtctctgccagtgtctctcggaggccaggtgtccatctcctgtagaagcagccagagcctggtgcactccgacggcgatacctacctgcactggtatctccagaagcctggacagagccctcagctcctgatctaccgggtgtccaacagattcagcggcgtgcccgatagattttccggcagcggctctggcaccgacttcaccctgaagatcagcagagtggaacccgaggacctgggcctgtactactgtctccagaccacacacttcccaccttggacctttggcggaggcaccaagctggaaatgaaaggcggaggcggaagtggaggcggaggatctggcggcggaggctctcaggttcagctccagcagtctggacccgagcttagaaggccaggatctagcgtcagactgagctgcaaggccagcggctaccggatcaaggacttcctgatccactggattaagaacagacccgagcacggcctggaatggatcggatggattgaccctgaggacggcgagactaagtacgcccagaagttccagaccaaggccacactgaccgccgacacctctagcaacaccgcctacatgcaactgagcagcctgaccagcgaggacaccgccacctacttttgtgctagatggggcgacgtgtactacggcctgatgagaggccatgtgatggatgcctggggccagggaacaagcgtgacagtctcttctacgcgtggaatgaggactgaggatcttcccaaagctgtcgtctttctcgaaccccaatggtatcgggtgctcgaaaaagactctgtgacactgaaatgccaaggggcctactctcccgaggacaactccacacagtggtttcataatgagtccctcatcagctctcaggccagctcttatttcattgatgccgctacagtggacgactccggcgagtatcggtgtcagaccaatctgtctacactgtctgaccccgtgcagcttgaggtccacattggatggttgctcttgcaagccccacgctgggttttcaaagaggaagatccaatccatctgcggtgccacagctggaaaaacaccgctctccacaaagtcacatacctgcaaaatggcaaaggacgcaaatacttccatcacaattccgatttttacattccgaaggctaccctgaaagacagcggcagctatttctgccggggactcgtcggctccaagaatgtgtcctccgaaaccgtgaatatcacgattacccaaggactggctgtgcctacaatctctagcttctttccgcctggataccaagtctccttctgtcttgtgatggtcctcctgtttgctgtggacacaggactgtacttttccgtgaaa

SEQ ID NO: 1211 - DNA, 1458 bp, synthetic construct
  source 1..1458: mol_type = other DNA
atggccttaccagtgaccgccttgctcctgccgctggccttgctgctccacgccgccaggccggacatcgtgatgacccaggccgctcccagcatccctgtgacacctggcgagagcgtgtccatctcctgccggtctagcaagagcctgctgaacagcaacggcaatacctacctgtactggttcctccagcggccaggccagtctccccaactgctgatctaccggatgagcaacctggcctccggcgtgcccgatagattttctggcagcggctccggcaccgccttcaccctgagaatcagcagagtggaagccgaggacgtgggcgtgtactactgtatgcagcacctggaataccccttcaccttcggagccggcaccaagctggaactgaagagaggcggaggcggaagtggaggcggaggatctggcggcggaggctctgaagtgcaactccagcagagcggccctgagctgattaagcctggggccagcgtgaagatgagctgcaaggccagcggctacaccttcaccagctacgtgatgcactgggtcaagcagaagcccggccagggcctggaatggatcggctacatcaacccctacaacgatggcaccaagtacaacgagaagttcaagggcaaggccaccctgaccagcgacaagagcagcagcaccgcctacatggaactgagcagcctgacaagcgaggacagcgccgtgtactattgcgccagaggcacctactactacggcagccgggtgttcgactattggggccagggcaccacactgaccgtgtcctctacgcgtggaatgaggactgaggatcttcccaaagctgtcgtctttctcgaaccccaatggtatcgggtgctcgaaaaagactctgtgacactgaaatgccaaggggcctactctcccgaggacaactccacacagtggtttcataatgagtccctcatcagctctcaggccagctcttatttcattgatgccgctacagtggacgactccggcgagtatcggtgtcagaccaatctgtctacactgtctgaccccgtgcagcttgaggtccacattggatggttgctcttgcaagccccacgctgggttttcaaagaggaagatccaatccatctgcggtgccacagctggaaaaacaccgctctccacaaagtcacatacctgcaaaatggcaaaggacgcaaatacttccatcacaattccgatttttacattccgaaggctaccctgaaagacagcggcagctatttctgccggggactcgtcggctccaagaatgtgtcctccgaaaccgtgaatatcacgattacccaaggactggctgtgcctacaatctctagcttctttccgcctggataccaagtctccttctgtcttgtgatggtcctcctgtttgctgtggacacaggactgtacttttccgtgaaa

SEQ ID NO: 1212 - DNA, 1458 bp, synthetic construct; identical to SEQ ID NO: 1211
  source 1..1458: mol_type = other DNA

SEQ ID NO: 1213 - DNA, 1512 bp, synthetic construct
  source 1..1512: mol_type = other DNA
atggccttaccagtgaccgccttgctcctgccgctggccttgctgctccacgccgccaggccgatcaacatctacaacgccgagcctgccaatcctagcgagaagaacagccccgaattcgacatcgtgatgacacagagccccgccacactgtcactgtctccaggcgaaagagccacactgagctgtcggagcagcaagagcctccagaacgtgaacggcaacacctacctgtactggttccagcagaagcccggccagtctcctcagctcctgatctacagaatgagcaacctgaacagcggcgtgcccgacagattttctggcagcggaagcggcaccgagttcaccctgaccataagcagcctggaacctgaggacttcgccgtgtactactgtatgcagcacctggaataccccatcaccttcggagccggcaccaagctggaaatcaaaggcggaggcggaagtggaggcggaggatctggcggcggaggctctgaagtgcaactggttgaatctggcggcggactggttaagcctggcggatctctgaagctgagctgtgccgccagcggctacacctttaccagctacgtgatgcactgggtccgacaggcccctggcaaaggacttgagtggatcggctacatcaacccctacaacgatggcaccaagtacaacgagaagttccagggcagagtgaccatcagctccgacaagagcatcagcaccgcctacatggaactgagcagcctgagaagcgaggataccgccatgtactattgcgccagaggcacctactactacggcaccagagtgttcgactactggggccagggaaccctggtcacagtctcttctacgcgtggaatgaggactgaggatcttcccaaagctgtcgtctttctcgaaccccaatggtatcgggtgctcgaaaaagactctgtgacactgaaatgccaaggggcctactctcccgaggacaactccacacagtggtttcataatgagtccctcatcagctctcaggccagctcttatttcattgatgccgctacagtggacgactccggcgagtatcggtgtcagaccaatctgtctacactgtctgaccccgtgcagcttgaggtccacattggatggttgctcttgcaagccccacgctgggttttcaaagaggaagatccaatccatctgcggtgccacagctggaaaaacaccgctctccacaaagtcacatacctgcaaaatggcaaaggacgcaaatacttccatcacaattccgatttttacattccgaaggctaccctgaaagacagcggcagctatttctgccggggactcgtcggctccaagaatgtgtcctccgaaaccgtgaatatcacgattacccaaggactggctgtgcctacaatctctagcttctttccgcctggataccaagtctccttctgtcttgtgatggtcctcctgtttgctgtggacacaggactgtacttttccgtgaaa

SEQ ID NO: 1214 - DNA, 1443 bp, synthetic construct
  source 1..1443: mol_type = other DNA
atggccttaccagtgaccgccttgctcctgccgctggccttgctgctccacgccgccaggccggacatccagatgacacagagccctagcagcctgtctgccagcgtgggagacagagtgaccatcacatgcaaggccagcgaccacatcaacaactggctggcctggtatcagcagaagcctggacaggcccctaagctgctgatctacggcgctaccacactggaaacaggcgtgcccagcagattttctggcagcggctctggcaccgactacaccctgacaatatccagcctccagcctgaggacttcgccacctactactgtcagcagagctggaacaccccttggacattcggccagggcaccaagctggaaatcaagagaggcggaggcggaagtggaggcggaggatctggcggcggaggctctcaagttcagcttcaacagcctggcgctgagctggtcaaacctggcgcttctgtgaagatgagctgcaaagccagcggctacgccttcagcagctactggatcaactggatgaagcagaaacccggccagggactcgaatggatcggccaaatctatcccggcgacggcgacaccaactacaacggcaagttcaagggcagagccacactgaccgccgatacctctagcagcacagcctacatgcagctgagcagcctgaccagcgaagatagcgccgtgtacttctgtgcccggtccatcacaacagtcgtgggctgcgctatggactattggggccagggaacaagcgtgaccgtgtctagtacgcgtggaatgaggactgaggatcttcccaaagctgtcgtctttctcgaaccccaatggtatcgggtgctcgaaaaagactctgtgacactgaaatgccaaggggcctactctcccgaggacaactccacacagtggtttcataatgagtccctcatcagctctcaggccagctcttatttcattgatgccgctacagtggacgactccggcgagtatcggtgtcagaccaatctgtctacactgtctgaccccgtgcagcttgaggtccacattggatggttgctcttgcaagccccacgctgggttttcaaagaggaagatccaatccatctgcggtgccacagctggaaaaacaccgctctccacaaagtcacatacctgcaaaatggcaaaggacgcaaatacttccatcacaattccgatttttacattccgaaggctaccctgaaagacagcggcagctatttctgccggggactcgtcggctccaagaatgtgtcctccgaaaccgtgaatatcacgattacccaaggactggctgtgcctacaatctctagcttctttccgcctggataccaagtctccttctgtcttgtgatggtcctcctgtttgctgtggacacaggactgtacttttccgtgaaa

SEQ ID NO: 1215 - DNA, 1449 bp, synthetic construct
  source 1..1449: mol_type = other DNA
atggccttaccagtgaccgccttgctcctgccgctggccttgctgctccacgccgccaggccgcagatcgtgctgtctcagtctcctgccatcctgagcgcttccccaggcgagaaagtgaccatgacctgtagagccagcagcagcgtgtcctacatgcactggtatcagcagaagcccggcagcagccctaagccttggatctacgccaccagcaatctggcctctggcgtgccagccagattttctggctctggcagcggcaccagctacagcttcacaatcagcagagtggaagccgaggacgccgccacctactattgtcagcagtggaccttcaatcctcctaccttcggcggaggcacccggctggaaatcaaaagaacagtggctgctggcggaggcggaagtggaggcggaggatctggcggcggaggctctcaggcttatctgcaacagagcggagccgaactcgtcagacctggcgcttctgtgaagatgagctgcaaggccagcggctacaccttcaccagctataatatgcactgggtcaagcagacccctcggcagggactcgaatggatcggcggaatctatcccggcaacggcgacacctcctacaaccagaagttcaagggcaaagccacactgaccgtgggcaagagcagcagcaccgcctatatgcagctcagcagcctgaccagcgaggacagcgccgtgtacttctgcgccagatacgactacaactacgctatggactactggggccagggcaccagcgtgacagttagctctgccagcacgcgtggaatgaggactgaggatcttcccaaagctgtcgtctttctcgaaccccaatggtatcgggtgctcgaaaaagactctgtgacactgaaatgccaaggggcctactctcccgaggacaactccacacagtggtttcataatgagtccctcatcagctctcaggccagctcttatttcattgatgccgctacagtggacgactccggcgagtatcggtgtcagaccaatctgtctacactgtctgaccccgtgcagcttgaggtccacattggatggttgctcttgcaagccccacgctgggttttcaaagaggaagatccaatccatctgcggtgccacagctggaaaaacaccgctctccacaaagtcacatacctgcaaaatggcaaaggacgcaaatacttccatcacaattccgatttttacattccgaaggctaccctgaaagacagcggcagctatttctgccggggactcgtcggctccaagaatgtgtcctccgaaaccgtgaatatcacgattacccaaggactggctgtgcctacaatctctagcttctttccgcctggataccaagtctccttctgtcttgtgatggtcctcctgtttgctgtggacacaggactgtacttttccgtgaaa

SEQ ID NO: 1216 - DNA, 1446 bp, synthetic construct
  source 1..1446: mol_type = other DNA
atggccttaccagtgaccgccttgctcctgccgctggccttgctgctccacgccgccaggccggacgagatcgtgctgacacagagccctgccaccctgtctctgagccctggcgaaagagccaccctgagctgtagagccagccagagcgtgtccagctacctggcctggtatcagcagaagcccggccaggctccccggctgctgatctacgatgccagcaatagagccaccggcatccccgccagattttccggctctggcagcggcaccgacttcaccctgaccatcagctccctggaacccgaggacttcgccgtgtactactgccagcagcggagcaactggcccatcacattcggccagggcacccggctggaaatcaaaggcggaggcggaagtggaggcggaggatctggcggcggaggctctgaggtgcagcttgttgagtctggcggaggactggtgcagcccgatagaagcctgagactgtcttgtgccgccagcggcttcaccttccacgattatgccatgcactgggtccgacaggcccctggcaaaggacttgaatgggtgtccaccatctcttggaacagcggcacaatcggctacgccgactctgtgaagggcagattcaccatcagccgggacaacgccaagaacagcctgtacctccagatgaactccctgagagccgaggacacagccctgtactactgcgccaaggacatccagtacggcaactactactacggcatggacgtgtggggccagggcacaacagtgacagtctcttctacgcgtggaatgaggactgaggatcttcccaaagctgtcgtctttctcgaaccccaatggtatcgggtgctcgaaaaagactctgtgacactgaaatgccaaggggcctactctcccgaggacaactccacacagtggtttcataatgagtccctcatcagctctcaggccagctcttatttcattgatgccgctacagtggacgactccggcgagtatcggtgtcagaccaatctgtctacactgtctgaccccgtgcagcttgaggtccacattggatggttgctcttgcaagccccacgctgggttttcaaagaggaagatccaatccatctgcggtgccacagctggaaaaacaccgctctccacaaagtcacatacctgcaaaatggcaaaggacgcaaatacttccatcacaattccgatttttacattccgaaggctaccctgaaagacagcggcagctatttctgccggggactcgtcggctccaagaatgtgtcctccgaaaccgtgaatatcacgattacccaaggactggctgtgcctacaatctctagcttctttccgcctggataccaagtctccttctgtcttgtgatggtcctcctgtttgctgtggacacaggactgtacttttccgtgaaa

SEQ ID NO: 1217 - DNA, 1428 bp, synthetic construct
  source 1..1428: mol_type = other DNA
atggccttaccagtgaccgccttgctcctgccgctggccttgctgctccacgccgccaggccggacatccagatgacacagagccctagcagcctgtctgccagcgtgggagatagagtgaccatcaactgcaaggccagccaggacatcaacagctacctgagctggttccagcagaagcctggcaaggcccctaagacactgatctaccgggccaacagactggtggatggcgtgccaagcagattttctggcagcggcagcggccaggattacaccctgacaatatccagcctccagcctgaggacttcgccacctactactgcctccagtacgacgagttccctctgacctttggcggaggcaccaaggtggaaatcaaaggcggaggcggaagtggaggcggaggatctggcggcggaggctctcaggtgcaactggtgcagtctggggccgaagtgaagaaacctggggcctctgtgaaggtgtcctgcaaagccagcggctacacctttaccaactacgacatcaactgggtccgacaggctccaggccaaggactggaatggatcggctggatctatcctggcgacggcagcaccaagtacaacgagaagttcaaggccaaggccacactgaccgccgataccagcacaagcaccgcctacatggaactgcggagcctgagaagcgacgacaccgccgtgtactattgtgcctccggctacgaggacgctatggactattggggccagggcaccaccgtgacagtgtctagtacgcgtggaatgaggactgaggatcttcccaaagctgtcgtctttctcgaaccccaatggtatcgggtgctcgaaaaagactctgtgacactgaaatgccaaggggcctactctcccgaggacaactccacacagtggtttcataatgagtccctcatcagctctcaggccagctcttatttcattgatgccgctacagtggacgactccggcgagtatcggtgtcagaccaatctgtctacactgtctgaccccgtgcagcttgaggtccacattggatggttgctcttgcaagccccacgctgggttttcaaagaggaagatccaatccatctgcggtgccacagctggaaaaacaccgctctccacaaagtcacatacctgcaaaatggcaaaggacgcaaatacttccatcacaattccgatttttacattccgaaggctaccctgaaagacagcggcagctatttctgccggggactcgtcggctccaagaatgtgtcctccgaaaccgtgaatatcacgattacccaaggactggctgtgcctacaatctctagcttctttccgcctggataccaagtctccttctgtcttgtgatggtcctcctgtttgctgtggacacaggactgtacttttccgtgaaa

SEQ ID NO: 1218 - DNA, 1434 bp, synthetic construct
  source 1..1434: mol_type = other DNA
atggccttaccagtgaccgccttgctcctgccgctggccttgctgctccacgccgccaggccggacatcgtgatgacccagacacctctgagcctgagcgtgacacctggacagcctgccagcattagctgcaagagcagccagtctctgctggacggcgacggcaagacctacctgaattggctgctccagaagcctggacagagccctcagcggctgatctacctggtgtccaagctggatagcggcgtgcccgatagattttctggcagcggctctggcaccgacttcaccctgaagatcagcagagtggaagccgaggacgtgggcgtgtactactgttggcagggcacacacttccccagaacattcggccagggcacaaagctggaaatcaaaggcggaggcggaagtggaggcggaggatctggcggcggaggctctcaagtgcaactggttcagagcggagccgaagtgaagaaacctggggcctctgtgaaggtgtcctgcaaggccagcggctacaccttcaaggacacctacatccactgggtccgacaggcccctggacaaggacttgagtggatgggcagaatcgaccccgccaacggcaacaccaaatacgaccccaagttccagggcagagtgaccatgaccagagacaccagcatcagcaccgcctacatggaactgagccggctgagatccgatgacaccgccgtgtactattgcgctagaagaggcggagtggattggggccagggaacactggttaccgtgtctagtacgcgtggaatgaggactgaggatcttcccaaagctgtcgtctttctcgaaccccaatggtatcgggtgctcgaaaaagactctgtgacactgaaatgccaaggggcctactctcccgaggacaactccacacagtggtttcataatgagtccctcatcagctctcaggccagctcttatttcattgatgccgctacagtggacgactccggcgagtatcggtgtcagaccaatctgtctacactgtctgaccccgtgcagcttgaggtccacattggatggttgctcttgcaagccccacgctgggttttcaaagaggaagatccaatccatctgcggtgccacagctggaaaaacaccgctctccacaaagtcacatacctgcaaaatggcaaaggacgcaaatacttccatcacaattccgatttttacattccgaaggctaccctgaaagacagcggcagctatttctgccggggactcgtcggctccaagaatgtgtcctccgaaaccgtgaatatcacgattacccaaggactggctgtgcctacaatctctagcttctttccgcctggataccaagtctccttctgtcttgtgatggtcctcctgtttgctgtggacacaggactgtacttttccgtgaaa

SEQ ID NO: 1219 - DNA, 1437 bp, synthetic construct
  source 1..1437: mol_type = other DNA
atggccttaccagtgaccgccttgctcctgccgctggccttgctgctccacgccgccaggccggacatccagatgacacagagccctagcagcctgtctgccagcgtgggagacagagtgaccatcacatgcaaggccagccaggatgtgtctacagccgtggcctggttccagcagaagcctggaaaagcccctaagctgctgatctacagccccagctacagatacaccggcgtgcccagcagattttctggcagcggctctggcaccgacttcaccctgacaatatccagcctccagcctgaggacttcacctactactgccagcagctctacagcaccccttacacattcggccagggcaccaaggtggaaatcaaaggcggaggcggaagtggaggcggaggatctggcggcggaggctctgaagtgcaactggttcagagcggagccgaagtgaagaaacctggggcctctgtgaaggtgtcctgcaaagccagcggctacacctttaccgactactacctggacgtggtcgtgcggcaagctcctggacaaggactggaatggatcggcagagtgaacccctacaacggcggcaccatctacaaccagaaattcaagggaagagtgaccctgaccagagacaccagcacctccacagcctacctggaactgagcagcctgagaagcgaagataccgccgtgtactactgcgccagggaccactacagatatgaccctctgctggactactggggccagggaaccctggttacagtgtctagtacgcgtggaatgaggactgaggatcttcccaaagctgtcgtctttctcgaaccccaatggtatcgggtgctcgaaaaagactctgtgacactgaaatgccaaggggcctactctcccgaggacaactccacacagtggtttcataatgagtccctcatcagctctcaggccagctcttatttcattgatgccgctacagtggacgactccggcgagtatcggtgtcagaccaatctgtctacactgtctgaccccgtgcagcttgaggtccacattggatggttgctcttgcaagccccacgctgggttttcaaagaggaagatccaatccatctgcggtgccacagctggaaaaacaccgctctccacaaagtcacatacctgcaaaatggcaaaggacgcaaatacttccatcacaattccgatttttacattccgaaggctaccctgaaagacagcggcagctatttctgccggggactcgtcggctccaagaatgtgtcctccgaaaccgtgaatatcacgattacccaaggactggctgtgcctacaatctctagcttctttccgcctggataccaagtctccttctgtcttgtgatggtcctcctgtttgctgtggacacaggactgtacttttccgtgaaa

SEQ ID NO: 1220 - DNA, 1455 bp, synthetic construct
  source 1..1455: mol_type = other DNA
atggccttaccagtgaccgccttgctcctgccgctggccttgctgctccacgccgccaggccggacatccagatgacacagagccctagcagcctgtctgccagcgtgggagacagagtgaccatcacctgtagagccagccagagcgtgtccaccagcagctacaactacatgcactggtatcagcagaagcccggcaagcctcctaagctgctgattaagtacgccagcaacctggaaagcggcgtgcccagcagattttctggcagcggctctggcaccgacttcaccctgacaatatccagcctccagcctgaggacttcgccacctactactgtcagcactcctgggagatccctctgacattcggccagggcaccaaggtggaaatcaaaggcggaggcggaagtggaggcggaggatctggcggcggaggctctgaagtgcaactggttcagagcggagccgaagtgaagaaacctggggcctctgtgaaggtgtcctgcaaggccagcggctacagcttcaccgactattatatgcactgggtccgacaggctccaggccagggacttgagtggatcggcagaatcaacccctacaacggcgctgccttctacagccagaacttcaaggatagagtgaccctgaccgtggacaccagcaccagcacagcctacctggaactgagcagcctgagaagcgaggacaccgccgtgtactactgcgccattgagagaggcgctgacctggaaggctacgctatggattattggggccagggaaccctggtcaccgtgtcatctacgcgtggaatgaggactgaggatcttcccaaagctgtcgtctttctcgaaccccaatggtatcgggtgctcgaaaaagactctgtgacactgaaatgccaaggggcctactctcccgaggacaactccacacagtggtttcataatgagtccctcatcagctctcaggccagctcttatttcattgatgccgctacagtggacgactccggcgagtatcggtgtcagaccaatctgtctacactgtctgaccccgtgcagcttgaggtccacattggatggttgctcttgcaagccccacgctgggttttcaaagaggaagatccaatccatctgcggtgccacagctggaaaaacaccgctctccacaaagtcacatacctgcaaaatggcaaaggacgcaaatacttccatcacaattccgatttttacattccgaaggctaccctgaaagacagcggcagctatttctgccggggactcgtcggctccaagaatgtgtcctccgaaaccgtgaatatcacgattacccaaggactggctgtgcctacaatctctagcttctttccgcctggataccaagtctccttctgtcttgtgatggtcctcctgtttgctgtggacacaggactgtacttttccgtgaaa

SEQ ID NO: 1221 - DNA, 1449 bp, synthetic construct
  source 1..1449: mol_type = other DNA
atggccttaccagtgaccgccttgctcctgccgctggccttgctgctccacgccgccaggccggagatcgtgctgacacagtctccagccacactgagcgcttctccaggcgagagagtgaccctgacctgtagagccagcagcaacgtgatctccagctacgtgcactggtatcagcagaagcctggcagcagccccagactgtttctgtacagcaccagcaatctggcctccggcgtgccaagcagattttctggctctggcagcggcaccgacttcacctttaccatctctagcctggaagccgaggacgccgccacctactactgtcagcagtacagcggctaccctctgaccttcggccagggcacaagactggaaatcaaaggcggaggcggaagtggaggcggaggatctggcggcggaggctctcaagttcagctgcaagagtctggccctggcctggtcaagcctagcgaaacactgagcctgacctgcgccgtgtctggctactctatcaccagcgcctactattggaactggatcagacagcctcctggcaaaggactggaatggatcggctacatcagctacgacggcagaaacaactacaaccccagcctgaagaaccggatcaccatcaatcccgacaccagcaagaaccagttcagcctccagctgaacagcgtgacccctgaggataccgccgtgtactactgtgccagagaaggcgactacgacgtgggcaactactacgctatggactactggggccagggaaccctggtcacagtctcttctacgcgtggaatgaggactgaggatcttcccaaagctgtcgtctttctcgaaccccaatggtatcgggtgctcgaaaaagactctgtgacactgaaatgccaaggggcctactctcccgaggacaactccacacagtggtttcataatgagtccctcatcagctctcaggccagctcttatttcattgatgccgctacagtggacgactccggcgagtatcggtgtcagaccaatctgtctacactgtctgaccccgtgcagcttgaggtccacattggatggttgctcttgcaagccccacgctgggttttcaaagaggaagatccaatccatctgcggtgccacagctggaaaaacaccgctctccacaaagtcacatacctgcaaaatggcaaaggacgcaaatacttccatcacaattccgatttttacattccgaaggctaccctgaaagacagcggcagctatttctgccggggactcgtcggctccaagaatgtgtcctccgaaaccgtgaatatcacgattacccaaggactggctgtgcctacaatctctagcttctttccgcctggataccaagtctccttctgtcttgtgatggtcctcctgtttgctgtggacacaggactgtacttttccgtgaaa

SEQ ID NO: 1222 - DNA, 1449 bp, synthetic construct
  source 1..1449: mol_type = other DNA
atggccttaccagtgaccgccttgctcctgccgctggccttgctgctccacgccgccaggccggagatcgtgctgacacagtctcccgccacactgtcactgtctccaggcgaaagagccacactgagctgtagagccagcagcaacgtgatctccagctacgtgcactggtatcagcagaagcctggacaggcccctcggctgctgatctacagcacaagcaatctggcctctggcatccccgccagattttctggctctggaagcggcaccgacttcaccctgaccataagcagcctggaacctgaggacttcgccgtgtactactgccagcagtatagcggctaccctctgaccttcggccagggcacaagactggaaatcaaaggcggaggcggaagtggaggcggaggatctggcggcggaggctctgaagtgcaactggtggaaagtggcggcggactggtgcaacctggaagaagcctgagactgtcctgtgccgccagcggctactctatcacaagcgcctactactggaactgggtccgacaggctcctggcaaaggactggaatgggtgtcctacatcagctacgacggcagaaacaactacaaccccagcctgaagaaccgcttcaccatcagccgggacaacgccaagaagtccctgtacctccagatgaacagcctgagagccgaggacacagccctgtactattgcgccaaagagggcgactacgacgtcggcaactactacgctatggactactggggccagggaaccaccgtgactgtctcttctacgcgtggaatgaggactgaggatcttcccaaagctgtcgtctttctcgaaccccaatggtatcgggtgctcgaaaaagactctgtgacactgaaatgccaaggggcctactctcccgaggacaactccacacagtggtttcataatgagtccctcatcagctctcaggccagctcttatttcattgatgccgctacagtggacgactccggcgagtatcggtgtcagaccaatctgtctacactgtctgaccccgtgcagcttgaggtccacattggatggttgctcttgcaagccccacgctgggttttcaaagaggaagatccaatccatctgcggtgccacagctggaaaaacaccgctctccacaaagtcacatacctgcaaaatggcaaaggacgcaaatacttccatcacaattccgatttttacattccgaaggctaccctgaaagacagcggcagctatttctgccggggactcgtcggctccaagaatgtgtcctccgaaaccgtgaatatcacgattacccaaggactggctgtgcctacaatctctagcttctttccgcctggataccaagtctccttctgtcttgtgatggtcctcctgtttgctgtggacacaggactgtacttttccgtgaaa

SEQ ID NO: 1223 - DNA, 1476 bp, synthetic construct
  source 1..1476: mol_type = other DNA
atggccttaccagtgaccgccttgctcctgccgctggccttgctgctccacgccgccaggccggacgtggtcatgacacagaccccactgagcctgcctgtgtctctgggagatcaggccagcatctcctgtagaagcagccagagcctggtgcacagcaacggcaacacctacctgcggtggtatctccagaagcctggacagagccccaaggtgctgatctacaaggtgtccaacagagtgtccggcgtgcccgatagattttctggcagcggctctggcaccgacttcaccctgaagatcaatagagtggaagccgaggacctgggcgtgtacttctgtagccagagcacccatgtgccttggacctttggcggaggcaccaagctggaaatcaagagcagcgccgacgacgccaagaaggacgccgccaaaaaggatgatgccaagaaagacgatgctaaaaaagacggcggcgtgaagctggacgagacaggcggaggacttgttcaacctggcggagccatgaagctgagctgtgtgaccagcggctttaccttcggccactactggatgaactgggtccgacagtcccctgagaaaggactggaatgggtcgcccagttcagaaacaagccctacaactacgaaacctactacagcgacagcgtgaagggcagattcaccatcagccgggacgacagcaagtccagcgtgtacctccagatgaacaacctgcgcgtggaagataccggcatctactactgtaccggggccagctacggcatggaatatctcggccagggcaccagcgtgaccgtgtctacaacgcgtggaatgaggactgaggatcttcccaaagctgtcgtctttctcgaaccccaatggtatcgggtgctcgaaaaagactctgtgacactgaaatgccaaggggcctactctcccgaggacaactccacacagtggtttcataatgagtccctcatcagctctcaggccagctcttatttcattgatgccgctacagtggacgactccggcgagtatcggtgtcagaccaatctgtctacactgtctgaccccgtgcagcttgaggtccacattggatggttgctcttgcaagccccacgctgggttttcaaagaggaagatccaatccatctgcggtgccacagctggaaaaacaccgctctccacaaagtcacatacctgcaaaatggcaaaggacgcaaatacttccatcacaattccgatttttacattccgaaggctaccctgaaagacagcggcagctatttctgccggggactcgtcggctccaagaatgtgtcctccgaaaccgtgaatatcacgattacccaaggactggctgtgcctacaatctctagcttctttccgcctggataccaagtctccttctgtcttgtgatggtcctcctgtttgctgtggacacaggactgtacttttccgtgaaa

SEQ ID NO: 1224 - DNA, 1464 bp, synthetic construct
  source 1..1464: mol_type = other DNA
atggccttaccagtgaccgccttgctcctgccgctggccttgctgctccacgccgccaggccgcaggtgcaactggtggaatctggcggcaatctggttcagcctggcggctctctgagactgtcttgtgccgccagcggcttcaccttcggcagcttttctatgagctgggtccgacaagctcctggcggaggacttgaatgggtggcaggactgtctgccagaagcagcctgacacactacgccgactctgtgaagggcagattcaccatcagccgggacaacgccaagaacagcgtgtacctccagatgaacagcctgagagtggaagataccgccgtgtactactgcgccagaagaagctacgacagcagcggctactggggccacttctacagctacatggatgtgtggggccagggcaccctggttacagtttctggcggaggcggaagtggaggcggaggatctggcggcggaggctcttctgtgctgacccagcctagctccgtgtctgctgctcctggacagaaagtgaccatctcctgtagcggcagcaccagcaacatcggcaacaactacgtgtcctggtatcagcagcaccccggcaaggcccctaagctgatgatctacgacgtgtccaagaggcccagcggcgtgccagatagattttccggcagcaagagcggcaacagcgccagcctggatattagcggactccagtctgaggacgaggccgactactattgcgccgcctgggatgatagcctgagcgagtttctgtttggcaccggcaccaagctgacagtgcttggaacgcgtggaatgaggactgaggatcttcccaaagctgtcgtctttctcgaaccccaatggtatcgggtgctcgaaaaagactctgtgacactgaaatgccaaggggcctactctcccgaggacaactccacacagtggtttcataatgagtccctcatcagctctcaggccagctcttatttcattgatgccgctacagtggacgactccggcgagtatcggtgtcagaccaatctgtctacactgtctgaccccgtgcagcttgaggtccacattggatggttgctcttgcaagccccacgctgggttttcaaagaggaagatccaatccatctgcggtgccacagctggaaaaacaccgctctccacaaagtcacatacctgcaaaatggcaaaggacgcaaatacttccatcacaattccgatttttacattccgaaggctaccctgaaagacagcggcagctatttctgccggggactcgtcggctccaagaatgtgtcctccgaaaccgtgaatatcacgattacccaaggactggctgtgcctacaatctctagcttctttccgcctggataccaagtctccttctgtcttgtgatggtcctcctgtttgctgtggacacaggactgtacttttccgtgaaa

SEQ ID NO: 1225 - DNA, 1437 bp, synthetic construct
  source 1..1437: mol_type = other DNA
atggccttaccagtgaccgccttgctcctgccgctggccttgctgctccacgccgccaggccgcagtctgtggtcacacagcctccatctgtgtctggcgctccaggccagagagtgaccatctcttgtaccggcagcagcagcaatatcggagccggctatgacgtgcactggtatcagcagctccctggcacagcccctaaactgctgatctacggcaacagcaacagacccagcggcgtgcccgatagattttccggctctaagagcggcacaagcgccagcctggctattactggactccaggccgaggacgaggccgactactactgtcagagctacgacagcagcctgagcggcagctatgtgtttggcaccggcaccaagctgacagtgcttggaggcggaggcggaagtggaggcggaggatctggcggcggaggctctgaagttcaactggtggaaaccggcggcaacctggttcaacctggcgcttctctgagactgagctgtgccgccagcggctttagctttagcggaacagccatgcactgggtccgacaggcacctggcaaaggactggaatgggtgtccaccatcagcagcacaggcagaagcacctactaccgggacagcgtgaagggcagattcaccatctccagagacaacagcaagaacaccctgtacctccagatgaacagcctgagaggcgaggacaccgccgtgtactattgtgccagagtgtccttcgactactggggccagggaaccctggtcacagtctcttctacgcgtggaatgaggactgaggatcttcccaaagctgtcgtctttctcgaaccccaatggtatcgggtgctcgaaaaagactctgtgacactgaaatgccaaggggcctactctcccgaggacaactccacacagtggtttcataatgagtccctcatcagctctcaggccagctcttatttcattgatgccgctacagtggacgactccggcgagtatcggtgtcagaccaatctgtctacactgtctgaccccgtgcagcttgaggtccacattggatggttgctcttgcaagccccacgctgggttttcaaagaggaagatccaatccatctgcggtgccacagctggaaaaacaccgctctccacaaagtcacatacctgcaaaatggcaaaggacgcaaatacttccatcacaattccgatttttacattccgaaggctaccctgaaagacagcggcagctatttctgccggggactcgtcggctccaagaatgtgtcctccgaaaccgtgaatatcacgattacccaaggactggctgtgcctacaatctctagcttctttccgcctggataccaagtctccttctgtcttgtgatggtcctcctgtttgctgtggacacaggactgtacttttccgtgaaa

SEQ ID NO: 1226 - DNA, 1443 bp, synthetic construct
  source 1..1443: mol_type = other DNA
atggccttaccagtgaccgccttgctcctgccgctggccttgctgctccacgccgccaggccgcagtctgtggttacacagcctgcctccgtgtctggctctcctggccagagcatcaccatcagctgtaccggcaccagctctgatgtcggcggctacaattacgtgtcctggtatcagcagcaccccggcaaggcccctaagctgatgatctacgacgtgtccaagaggcccagcggcgtgtccaatagattcagcggcagcaagagcggcaacaccgccagcctgacaatttctggactgcaagccgaggacgaggccgactactactgtagcagctacaccagcagcagcacactggtgtttggcggaggcaccaagctgacagttcttggaggcggaggcggaagtggaggcggaggatctggcggcggaggctctgaagttcagctggttgaaagcggcggagcctttgttcagcctggcggatctctgagactgagctgtgccgccagcggcttcacattttccagctacgccatgacctgggtccgacaggctcctggcaaaggactggaatgggtgtccaccatctccggcagaggcagaagcaccttctacgccgatagcgtgaagggcagattcacaatcagccgggacaacagcaagaacaccctgtacctccagatgaacagcctgagagccgaggataccgccgtgtactactgtgcccggtactatcacgctggcgcctttgatctttggggccagggaacactggtcaccgtgtcatctacgcgtggaatgaggactgaggatcttcccaaagctgtcgtctttctcgaaccccaatggtatcgggtgctcgaaaaagactctgtgacactgaaatgccaaggggcctactctcccgaggacaactccacacagtggtttcataatgagtccctcatcagctctcaggccagctcttatttcattgatgccgctacagtggacgactccggcgagtatcggtgtcagaccaatctgtctacactgtctgaccccgtgcagcttgaggtccacattggatggttgctcttgcaagccccacgctgggttttcaaagaggaagatccaatccatctgcggtgccacagctggaaaaacaccgctctccacaaagtcacatacctgcaaaatggcaaaggacgcaaatacttccatcacaattccgatttttacattccgaaggctaccctgaaagacagcggcagctatttctgccggggactcgtcggctccaagaatgtgtcctccgaaaccgtgaatatcacgattacccaaggactggctgtgcctacaatctctagcttctttccgcctggataccaagtctccttctgtcttgtgatggtcctcctgtttgctgtggacacaggactgtacttttccgtgaaa

SEQ ID NO: 1227 - DNA, 1449 bp, synthetic construct
  source 1..1449: mol_type = other DNA
atggccttaccagtgaccgccttgctcctgccgctggccttgctgctccacgccgccaggccggacgtggtcatgacacagagcccttctagcctgtctgccagcgtgggcgacagagtgacaatcacctgtcagagcagcctggacatcagccactacctgaactggtatcagcagaagcccggcaaggcccctaagctgctgatctacgacgccagcaatctggaaaccggcgtgcccagcagattttctggcagcggaagcggcacccacttcaccttcacaatatccagcctccagcctgaggacttcgccacctactactgccagcagtacgacaacctgcctctgacctttggcggaggcaccaagctggaaatcaagagaggcggaggcggaagtggaggcggaggatctggcggcggaggctctcaagttcaactggttcaatcaggcggaggcgtggtgcaacctggtggctctctgagagtgtcttgtgctgcctctggcgtgaccctgagcgactatggaatgcactgggtccgacaggcccctggcaaaggacttgagtgggtcgccttcatcagaaacgacggcagcgacaagtattacgccgacagcgtgaagggcagattcaccatcagccgggacaacagcgagaaaaccgtgtctctccagatgtctagcctgagagccgaggacaccgccgtgtactactgtgccaagaatggcgagagcggccctctggactactggtatctggatctgtggggcagaggcaccctggtcacagtctcttctacgcgtggaatgaggactgaggatcttcccaaagctgtcgtctttctcgaaccccaatggtatcgggtgctcgaaaaagactctgtgacactgaaatgccaaggggcctactctcccgaggacaactccacacagtggtttcataatgagtccctcatcagctctcaggccagctcttatttcattgatgccgctacagtggacgactccggcgagtatcggtgtcagaccaatctgtctacactgtctgaccccgtgcagcttgaggtccacattggatggttgctcttgcaagccccacgctgggttttcaaagaggaagatccaatccatctgcggtgccacagctggaaaaacaccgctctccacaaagtcacatacctgcaaaatggcaaaggacgcaaatacttccatcacaattccgatttttacattccgaaggctaccctgaaagacagcggcagctatttctgccggggactcgtcggctccaagaatgtgtcctccgaaaccgtgaatatcacgattacccaaggactggctgtgcctacaatctctagcttctttccgcctggataccaagtctccttctgtcttgtgatggtcctcctgtttgctgtggacacaggactgtacttttccgtgaaa

SEQ ID NO: 1228 - DNA, 1470 bp, synthetic construct
  source 1..1470: mol_type = other DNA
atggccttaccagtgaccgccttgctcctgccgctggccttgctgctccacgccgccaggccggacgtgatgctgacccagacaccactgagcctgcctgtgtctctgggcgatcaggccagcatctcctgtagaagcagccagagcatcctgcacagcaccggcgatacctacctggaatggtatctccagaagcctggacagagccccaagctgctgattaacaaggtgtccaaccggctgagcggcgtgcccgatagattttctggcagcggctctggcaccgacttcaccctgaagatcagcagagtggaagccgaggacctgggcgtgtactactgcttccaaggcagccatgttccttggacctttggcggaggcaccaagctggaaatcaagagagctgacgccgctcctaccgtgtccatctttcctggaggcggtggaagtggcggcggtggttcaggcggcggaggatctcaagtgaagctccagcagagcggccctagccttgtgaaacctggcgcttccgtgaagatgagctgcaaggccagcggctacaccttcaccgatttctacatgaaatgggtcaagcagagccacggcaagtctctggaatggatcggcgacatcaaccccaacatcggagacaccttctacaaccagaagttcaagggcaaagccacactgaccgtggacaagagcagcagcaccgcctacatgcagctcaacagcctgaccagcgaggacagcgccgtgtacttttgttccgtgggctacttcgacgtgtggggagccggaacaaccgtgacagtctcttctacgcgtggaatgaggactgaggatcttcccaaagctgtcgtctttctcgaaccccaatggtatcgggtgctcgaaaaagactctgtgacactgaaatgccaaggggcctactctcccgaggacaactccacacagtggtttcataatgagtccctcatcagctctcaggccagctcttatttcattgatgccgctacagtggacgactccggcgagtatcggtgtcagaccaatctgtctacactgtctgaccccgtgcagcttgaggtccacattggatggttgctcttgcaagccccacgctgggttttcaaagaggaagatccaatccatctgcggtgccacagctggaaaaacaccgctctccacaaagtcacatacctgcaaaatggcaaaggacgcaaatacttccatcacaattccgatttttacattccgaaggctaccctgaaagacagcggcagctatttctgccggggactcgtcggctccaagaatgtgtcctccgaaaccgtgaatatcacgattacccaaggactggctgtgcctacaatctctagcttctttccgcctggataccaagtctccttctgtcttgtgatggtcctcctgtttgctgtggacacaggactgtacttttccgtgaaa

SEQ ID NO: 1229 - DNA, 1470 bp, synthetic construct
  source 1..1470: mol_type = other DNA
atggccttaccagtgaccgccttgctcctgccgctggccttgctgctccacgccgccaggccgctgcctgttctgacacagcctccatccgtgtctgtggcccctggaaagaccgccagaatcacatgcggcggcaacaacatcggcagcaagagcgtgcactggtatcagcagaagcctggacaggctcctgtgctggtggtgtacgacgacagcgatagacctagcggcatccccgagagattcagcggcagcaattccggcaataccgccacactgaccatcagcagagtggaagctggcgacgaggccgactactactgccaagtgtgggacagcagcagcgactacgtggtgtttggcggcggaacaaagctgacagtgcttggcggaggcggaagtggaggcggaggatctggcggcggaggctctgaagttcaactggtgcagagcggagccgaagtgaagaagccaggcgagagcctgaagattagctgcaaaggcagcggctacagcttcaccagctactggatcggctgggtccgacagatgcctggcaaaggactggaatggatgggcatcatctaccccggcgacagcgacaccagatacagccctagctttcagggccaagtgaccatctccgccgacaagagcatcagcacagcctacctccagtggtcctctctgaaggccagcgataccgccatgtactactgcgccagacaagtctggggatggcaaggcggcatgtaccccaggtctaactggtggtacaacctggactcttggggccagggcacactggtcacagtctcttctacgcgtggaatgaggactgaggatcttcccaaagctgtcgtctttctcgaaccccaatggtatcgggtgctcgaaaaagactctgtgacactgaaatgccaaggggcctactctcccgaggacaactccacacagtggtttcataatgagtccctcatcagctctcaggccagctcttatttcattgatgccgctacagtggacgactccggcgagtatcggtgtcagaccaatctgtctacactgtctgaccccgtgcagcttgaggtccacattggatggttgctcttgcaagccccacgctgggttttcaaagaggaagatccaatccatctgcggtgccacagctggaaaaacaccgctctccacaaagtcacatacctgcaaaatggcaaaggacgcaaatacttccatcacaattccgatttttacattccgaaggctaccctgaaagacagcggcagctatttctgccggggactcgtcggctccaagaatgtgtcctccgaaaccgtgaatatcacgattacccaaggactggctgtgcctacaatctctagcttctttccgcctggataccaagtctccttctgtcttgtgatggtcctcctgtttgctgtggacacaggactgtacttttccgtgaaa

SEQ ID NO: 1230 - DNA, 1449 bp, synthetic construct
  source 1..1449: mol_type = other DNA
atggccttaccagtgaccgccttgctcctgccgctggccttgctgctccacgccgccaggccggagctggtcatgacacagagccctgcttctctggccgtgtcactgggacagagagccaccatctcttgcagagccagcgagagcgtggacagctacggcaagagcttcatgcactggtatcagctcaagcccggccagcctcctaagctgctgatctacagagcctccaacctggaaagcggcgtgccagccagattttctggcagcggcagcagaaccgacttcaccctgaccattgatcccgtggaagccgatgatgccgccacctactactgccagcagaacaacgaggacccctggacatttggcggaggcaccaagctggaaatcaaaggcggaggcggaagtggaggcggaggatctggcggcggaggctctgaagtgcagctcgaacagtctggccccgagcttgtgaaacctggcgcttccgtgaagatgagctgcaaggccagcggctacaccttcaccaactactacatgaaatgggtcaagcagagccacggcaagtccctggaatggatcggcgatctgaaccccaacaacggcgacaccttctacaaccagaagttcaagggcaaagccacactgaccgtggacaagagcagcaacaccgcctacatgcagctcaactccctgaccagcgaggacagcgccgtgtactactgtgccagaaccggcagatacgaagagaacgctatggactactggggccagggcacaagcgtgacagtctcttctacgcgtggaatgaggactgaggatcttcccaaagctgtcgtctttctcgaaccccaatggtatcgggtgctcgaaaaagactctgtgacactgaaatgccaaggggcctactctcccgaggacaactccacacagtggtttcataatgagtccctcatcagctctcaggccagctcttatttcattgatgccgctacagtggacgactccggcgagtatcggtgtcagaccaatctgtctacactgtctgaccccgtgcagcttgaggtccacattggatggttgctcttgcaagccccacgctgggttttcaaagaggaagatccaatccatctgcggtgccacagctggaaaaacaccgctctccacaaagtcacatacctgcaaaatggcaaaggacgcaaatacttccatcacaattccgatttttacattccgaaggctaccctgaaagacagcggcagctatttctgccggggactcgtcggctccaagaatgtgtcctccgaaaccgtgaatatcacgattacccaaggactggctgtgcctacaatctctagcttctttccgcctggataccaagtctccttctgtcttgtgatggtcctcctgtttgctgtggacacaggactgtacttttccgtgaaa

SEQ ID NO: 1231 - DNA, 1443 bp, synthetic construct; identical to SEQ ID NO: 1204
  source 1..1443: mol_type = other DNA

SEQ ID NO: 1232 - DNA, 1443 bp, synthetic construct; identical to SEQ ID NO: 1113
  source 1..1443: mol_type = other DNA

SEQ ID NO: 1233 - DNA, 1431 bp, synthetic construct
  source 1..1431: mol_type = other DNA
atggccttaccagtgaccgccttgctcctgccgctggccttgctgctccacgccgccaggccggacgtggtcatgacacagagcccttctagcctgtctgccagcgtgggcgacagagtgaccatcacctgtatggcctccgaggacatctacatccggctggcctggtatcagcagaagcctggaaacgcccctaagctgctgatctacgccgccacctctctggaaacaggcgtgccaagcagattttccggcagcggctctggcaccgatttcaccctgacaatatccagcctccagcctgaggacttcgccacctactactgccagcagtattggagcagcccctggacatttggcggaggcaccaaggtggaaatcaaaggcggaggcggaagtggaggcggaggatctggcggcggaggctctcaggttcagctgcaagagtctggccccggactggtcaagcctagccaaacactgagcctgacctgtaccgtgtccggctacagcatcaccagcgactacacctggaactggatcagacagcctcctggcaacggactggaatggatcggctacatcacctacagcggcagcaccagctacaaccccagcctgaaaagccgggtgctgatctccgtggacaccagcaagaatcaggtgtccctgaagctgagcagcgtgacagccgctgataccgccgtgtactactgtgccagactggggagaagatacacaatggactactggggccagggcaccaccgtgacagtttcttctacgcgtggaatgaggactgaggatcttcccaaagctgtcgtctttctcgaaccccaatggtatcgggtgctcgaaaaagactctgtgacactgaaatgccaaggggcctactctcccgaggacaactccacacagtggtttcataatgagtccctcatcagctctcaggccagctcttatttcattgatgccgctacagtggacgactccggcgagtatcggtgtcagaccaatctgtctacactgtctgaccccgtgcagcttgaggtccacattggatggttgctcttgcaagccccacgctgggttttcaaagaggaagatccaatccatctgcggtgccacagctggaaaaacaccgctctccacaaagtcacatacctgcaaaatggcaaaggacgcaaatacttccatcacaattccgatttttacattccgaaggctaccctgaaagacagcggcagctatttctgccggggactcgtcggctccaagaatgtgtcctccgaaaccgtgaatatcacgattacccaaggactggctgtgcctacaatctctagcttctttccgcctggataccaagtctccttctgtcttgtgatggtcctcctgtttgctgtggacacaggactgtacttttccgtgaaa

SEQ ID NO: 1234 - DNA, 1446 bp, synthetic construct
  source 1..1446: mol_type = other DNA
atggccttaccagtgaccgccttgctcctgccgctggccttgctgctccacgccgccaggccggaggtgcaactggttgagtctggcggaggactggtgcagcctggaagaagcctgagactgtcttgtgccgccagcggcttcaccttcgacgattatgccatgcactgggtccgacaggcccctggcaaaggacttgaatgggtgtccggcatctcctggaacagcggctctatcggctacgccgattccgtgaagggcagattcaccatcagccgggacaacgccaagaacagcctgtacctccagatgaactccctgagagccgaggacacagccctgtactactgcgccaaagacaaaggcggaggctactacgacttttggagcggcagcgattattggggccagggcacactggtcacagtgtctagcggcggaggcggaagtggaggcggaggatctggcggcggaggctcttcttctgagctgacacaggaccctgccgtgtctgttgctctgggccagacagtgcggattacctgtcagggcgatagcctgagaagctactacgcctcctggtatcagcagaagccaggccaggctcctgtgctggtcatctacggcaagaacaacagacccagcggcatccccgatagattcagcggaagcagctctggcaataccgccagcctgacaattactggcgctcaggccgaggacgaggccgactactactgcaacagcagagatagcagcggctgggttttcggcggaggcacaaaactgacagtgctgacgcgtggaatgaggactgaggatcttcccaaagctgtcgtctttctcgaaccccaatggtatcgggtgctcgaaaaagactctgtgacactgaaatgccaaggggcctactctcccgaggacaactccacacagtggtttcataatgagtccctcatcagctctcaggccagctcttatttcattgatgccgctacagtggacgactccggcgagtatcggtgtcagaccaatctgtctacactgtctgaccccgtgcagcttgaggtccacattggatggttgctcttgcaagccccacgctgggttttcaaagaggaagatccaatccatctgcggtgccacagctggaaaaacaccgctctccacaaagtcacatacctgcaaaatggcaaaggacgcaaatacttccatcacaattccgatttttacattccgaaggctaccctgaaagacagcggcagctatttctgccggggactcgtcggctccaagaatgtgtcctccgaaaccgtgaatatcacgattacccaaggactggctgtgcctacaatctctagcttctttccgcctggataccaagtctccttctgtcttgtgatggtcctcctgtttgctgtggacacaggactgtacttttccgtgaaa

SEQ ID NO: 1235 - DNA, 1473 bp, synthetic construct
  source 1..1473: mol_type = other DNA
atggccttaccagtgaccgccttgctcctgccgctggccttgctgctccacgccgccaggccggaagtgcagctccagcagtctggacctggcctggttaagcctagccagacactgagcctgacctgtgccatcagcggcgatagcgtgctgagcaacagcgacacctggaactggatcagacagagccctagcagaggactggaatggctgggcagaacctaccacagaagcacttggtacgacgactacgccagctctgtgcggggcagagtgtccatcaatgtggacaccagcaagaaccagtacagcctgcaactgaacgccgtgacacctgaggataccggcgtgtactactgcgccagagacagactccaggacggcaactcttggagcgacgcctttgatgtgtggggccagggcacaatggtcaccgtttctagcggcggaggcggaagtggaggcggaggatctggcggcggaggctctcaatctgctctgacacagcctgccagcgtgtcaggatctcctggacagagcatcaccatctcttgcaccggcaccagctctgatgtcggcggctacaattacgtgtcctggtatcagcagcaccccggcaaggcccctaagctgatgatctacgacgtgtccaacagacccagcggcgtgtccaatagattctccggcagcaagagcggcaacaccgccagcctgacaatttctggactgcaagccgaggacgaggccgactactactgtagcagctacaccagcagcagcacactggtgtacgtgttcggcacaggcaccaaagtgaccgtgcttacgcgtggaatgaggactgaggatcttcccaaagctgtcgtctttctcgaaccccaatggtatcgggtgctcgaaaaagactctgtgacactgaaatgccaaggggcctactctcccgaggacaactccacacagtggtttcataatgagtccctcatcagctctcaggccagctcttatttcattgatgccgctacagtggacgactccggcgagtatcggtgtcagaccaatctgtctacactgtctgaccccgtgcagcttgaggtccacattggatggttgctcttgcaagccccacgctgggttttcaaagaggaagatccaatccatctgcggtgccacagctggaaaaacaccgctctccacaaagtcacatacctgcaaaatggcaaaggacgcaaatacttccatcacaattccgatttttacattccgaaggctaccctgaaagacagcggcagctatttctgccggggactcgtcggctccaagaatgtgtcctccgaaaccgtgaatatcacgattacccaaggactggctgtgcctacaatctctagcttctttccgcctggataccaagtctccttctgtcttgtgatggtcctcctgtttgctgtggacacaggactgtacttttccgtgaaa

SEQ ID NO: 1236 - DNA, 1467 bp, synthetic construct
  source 1..1467: mol_type = other DNA
atggccttaccagtgaccgccttgctcctgccgctggccttgctgctccacgccgccaggccgcaggtgcaactggttcagtctggggccgaagtgaagaaacctggggcctctgtgaaggtgtcctgcaaggcttccggctacacctttaccagctacgacatcaactgggtccgacaggccacaggccaaggactggaatggatgggctggatgaaccccaacagcggcaataccggctacgcccagaaattccagggcagagtgaccatgaccagaaacaccagcatcagcaccgcctacatggaactgagcagcctgagaagcgaggacaccgccgtgtactattgcgccagaggcgacagcaactactggtcctactacggcatggacgtgtggggccagggaacactggttacagtttctagcggcggaggcggaagtggaggcggaggatctggcggcggaggctctggcggtggtggatctcaatctgtgctgacccagcctagatccgtgtctggctctcctggacagagcgtgaccatctcttgtaccggcaccagctctgatgtcggcggctacaattacgtgtcctggtatcagcagcaccccggcgaagcccctaagctgattatctacgacgccgacaagcggcccagcggcatcagcaatagattcagctctggcaagagcggcaacaccgccagcctgacaatcagcggactccaggtggaagatgaggccgactactactgctgctcctatgccggcggaagcacctgggttttcggaggcggtacaaaagtgaccgtgctgacgcgtggaatgaggactgaggatcttcccaaagctgtcgtctttctcgaaccccaatggtatcgggtgctcgaaaaagactctgtgacactgaaatgccaaggggcctactctcccgaggacaactccacacagtggtttcataatgagtccctcatcagctctcaggccagctcttatttcattgatgccgctacagtggacgactccggcgagtatcggtgtcagaccaatctgtctacactgtctgaccccgtgcagcttgaggtccacattggatggttgctcttgcaagccccacgctgggttttcaaagaggaagatccaatccatctgcggtgccacagctggaaaaacaccgctctccacaaagtcacatacctgcaaaatggcaaaggacgcaaatacttccatcacaattccgatttttacattccgaaggctaccctgaaagacagcggcagctatttctgccggggactcgtcggctccaagaatgtgtcctccgaaaccgtgaatatcacgattacccaaggactggctgtgcctacaatctctagcttctttccgcctggataccaagtctccttctgtcttgtgatggtcctcctgtttgctgtggacacaggactgtacttttccgtgaaa

SEQ ID NO: 1237 - DNA, 1473 bp, synthetic construct
  source 1..1473: mol_type = other DNA
atggccttaccagtgaccgccttgctcctgccgctggccttgctgctccacgccgccaggccggaagtgcagctccagcagtctggacctggcctggttaagcctagccagacactgagcctgacctgtgccatcagcggcgatagcgtgtcctctaatagcgccgcctggaactggatcagacagagccctagcagaggactggaatggctgggcagaacctactaccgcagcaagtggtacagcgactacgccgtgtccgtgaagtcccggatcaccatcaatcccgacaccagcaagaaccagttcagcctgcaactgaacagcgtgacccctgaggataccgccgtgtactactgcgccagagatccctacgacttttggagcggctaccccgacgcctttgacatctggggacagggcacaatggtcaccgtttctagcggcggaggcggaagtggaggcggaggatctggcggcggaggctctcaatctgctctgacacagcctgccagcgtgtcaggatctcctggacagagcatcaccatctcttgcaccggcaccagctctgatgtcggcggctacaattacgtgtcctggtatcagcagcaccccggcaaggcccctaaagtgattatcagcgaagtgaacaacagacccagcggcgtgtcccacagattcagcggctctaagtctggcaacaccgccagcctgacaatctctggactgcaagccgaggacgaggccgactacttctgtagcagctacaccagcggcagaaccctgtacgtgttcggcacaggcagcaaagtgacagtgctgggaacgcgtggaatgaggactgaggatcttcccaaagctgtcgtctttctcgaaccccaatggtatcgggtgctcgaaaaagactctgtgacactgaaatgccaaggggcctactctcccgaggacaactccacacagtggtttcataatgagtccctcatcagctctcaggccagctcttatttcattgatgccgctacagtggacgactccggcgagtatcggtgtcagaccaatctgtctacactgtctgaccccgtgcagcttgaggtccacattggatggttgctcttgcaagccccacgctgggttttcaaagaggaagatccaatccatctgcggtgccacagctggaaaaacaccgctctccacaaagtcacatacctgcaaaatggcaaaggacgcaaatacttccatcacaattccgatttttacattccgaaggctaccctgaaagacagcggcagctatttctgccggggactcgtcggctccaagaatgtgtcctccgaaaccgtgaatatcacgattacccaaggactggctgtgcctacaatctctagcttctttccgcctggataccaagtctccttctgtcttgtgatggtcctcctgtttgctgtggacacaggactgtacttttccgtgaaa

SEQ ID NO: 1238 - DNA, 1470 bp, synthetic construct
  source 1..1470: mol_type = other DNA
atggccttaccagtgaccgccttgctcctgccgctggccttgctgctccacgccgccaggccggaagtgcagctccagcagtctggacctggcctggttaagcctagccagacactgagcctgacctgtgccatcagcggcgattccatgctgagcaacagcgacacctggaactggatcagacagagccccagcagaggcctggaatggctgggcagaacataccacagaagcacttggtacgacgactacgccagctctgtgcggggcagagtgtccatcaatgtggacaccagcaagaaccagtacagcctgcaactgaacgccgtgacacctgaggataccggcgtgtactactgtgccagagtgcggctccaggacggcaattcttggagcgacgcctttgatgtgtggggccagggcacaatggtcaccgtttctagcggcggaggcggaagtggaggcggaggatctggcggcggaggctctcaatctgctctgacacagcctgccagcgcctctggatctcctggacagagcgtgaccatctcctgtaccggcacctcttctgatgtcggcggctacaactacgtgtcctggtatcagcagcaccccggcaaggcccctaagctgatgatctacgacgtgtccaacagacccagcggcgtgtccaatagattctccggcagcaagagcggcaacaccgccagcctgacaatttctggactgcaagccgaggacgaggccgactactactgtagcagctacaccagcagcagcacactgtacgtgttcggcacaggcacccagctcacagttcttacgcgtggaatgaggactgaggatcttcccaaagctgtcgtctttctcgaaccccaatggtatcgggtgctcgaaaaagactctgtgacactgaaatgccaaggggcctactctcccgaggacaactccacacagtggtttcataatgagtccctcatcagctctcaggccagctcttatttcattgatgccgctacagtggacgactccggcgagtatcggtgtcagaccaatctgtctacactgtctgaccccgtgcagcttgaggtccacattggatggttgctcttgcaagccccacgctgggttttcaaagaggaagatccaatccatctgcggtgccacagctggaaaaacaccgctctccacaaagtcacatacctgcaaaatggcaaaggacgcaaatacttccatcacaattccgatttttacattccgaaggctaccctgaaagacagcggcagctatttctgccggggactcgtcggctccaagaatgtgtcctccgaaaccgtgaatatcacgattacccaaggactggctgtgcctacaatctctagcttctttccgcctggataccaagtctccttctgtcttgtgatggtcctcctgtttgctgtggacacaggactgtacttttccgtgaaa

SEQ ID NO: 1239 - DNA, 1443 bp, synthetic construct
  source 1..1443: mol_type = other DNA
atggccttaccagtgaccgccttgctcctgccgctggccttgctgctccacgccgccaggccggagatcgtgctgacacagtctcccgccacactgtcactgtctccaggcgaaagagccacactgagctgtagcgccagcagcagcgtgtcctacatgtactggtatcagcagaagcccggacaggcccctagactgctgatctacagaaccagcaacctggcctctggcatccccgccagattttctggctctggcagcggcaccgatttcaccctgaccataagcagcctggaacctgaggacttcgccgtgtactactgccagcagtaccacagctaccccaccacctttggacagggcaccaaggtggaaatcaagcggacagttggcggaggcggaagtggaggcggaggatctggcggcggaggctctgaagtgcagctggttgaatcaggtggcggcctggttcaacctggcggatctctgagactgtcttgtgccgccagcggcttcagcttcaacacctacgccatgaactgggtccgacaggctcctggcaaaggactggaatgggtgtcccacatcagaagcaagagcaacaacttcgccacctactacgccgacagcgtgaaggacagattcaccatcagccgggacaacgccaagaacagcctgtacctccagatgaactccctgagagccgaggacaccgccgtgtattattgcgccagacaaggcggcgacttccctatggattattggggccagggcaccctggtcaccgtttcttctacgcgtggaatgaggactgaggatcttcccaaagctgtcgtctttctcgaaccccaatggtatcgggtgctcgaaaaagactctgtgacactgaaatgccaaggggcctactctcccgaggacaactccacacagtggtttcataatgagtccctcatcagctctcaggccagctcttatttcattgatgccgctacagtggacgactccggcgagtatcggtgtcagaccaatctgtctacactgtctgaccccgtgcagcttgaggtccacattggatggttgctcttgcaagccccacgctgggttttcaaagaggaagatccaatccatctgcggtgccacagctggaaaaacaccgctctccacaaagtcacatacctgcaaaatggcaaaggacgcaaatacttccatcacaattccgatttttacattccgaaggctaccctgaaagacagcggcagctatttctgccggggactcgtcggctccaagaatgtgtcctccgaaaccgtgaatatcacgattacccaaggactggctgtgcctacaatctctagcttctttccgcctggataccaagtctccttctgtcttgtgatggtcctcctgtttgctgtggacacaggactgtacttttccgtgaaa

SEQ ID NO: 1240 - DNA, 1431 bp, synthetic construct
  source 1..1431: mol_type = other DNA
atggccttaccagtgaccgccttgctcctgccgctggccttgctgctccacgccgccaggccggacgtggtcatgacacagagcccttctagcctgtctgccagcgtgggcgacagagtgaccatcacctgtaaagccagcgaggacatctacatccggctggcctggtatcagcagaagcctggaaaggcccctaagctgctgatctacgccgccacctctctggaaacaggcgtgccaagcagattttccggcagcggctctggcaccgatttcaccctgacaatatccagcctccagcctgaggacttcgccacctactactgccagcagtattggaccacaccttggacctttggcggaggcaccaaggtggaaatcaaaggcggaggcggaagtggaggcggaggatctggcggcggaggctctcaggtgcagctccaagagtctggccctggactggtcaagcctagccagacactgagcctgacctgtaccgtgtccggctacagcatcaccatcgactacacctggaactggatcagacagcctcctggcaaaggactggaatggatcggctacatcacctacagcggcagcaccgactacaaccccagcctgaaaagccgggtgctgatctccgtggacaccagcaagaatcaggtgtccctgaagctgagcagcgtgacagccgctgataccgccgtgtactactgtgccagactgggcagaagatacgccctggattattggggccagggcaccaccgtgacagtgtcatctacgcgtggaatgaggactgaggatcttcccaaagctgtcgtctttctcgaaccccaatggtatcgggtgctcgaaaaagactctgtgacactgaaatgccaaggggcctactctcccgaggacaactccacacagtggtttcataatgagtccctcatcagctctcaggccagctcttatttcattgatgccgctacagtggacgactccggcgagtatcggtgtcagaccaatctgtctacactgtctgaccccgtgcagcttgaggtccacattggatggttgctcttgcaagccccacgctgggttttcaaagaggaagatccaatccatctgcggtgccacagctggaaaaacaccgctctccacaaagtcacatacctgcaaaatggcaaaggacgcaaatacttccatcacaattccgatttttacattccgaaggctaccctgaaagacagcggcagctatttctgccggggactcgtcggctccaagaatgtgtcctccgaaaccgtgaatatcacgattacccaaggactggctgtgcctacaatctctagcttctttccgcctggataccaagtctccttctgtcttgtgatggtcctcctgtttgctgtggacacaggactgtacttttccgtgaaa

SEQ ID NO: 1241 - DNA, 1446 bp, synthetic construct
  source 1..1446: mol_type = other DNA
atggccttaccagtgaccgccttgctcctgccgctggccttgctgctccacgccgccaggccggacatccagctgactcagagccctagctttctgagcgccagcgtgggcgacagagtgaccattacatgtagagccagccagggcatcagcaccgacctgaactggtatcagcagaagcctggcaaggcccctaagctgctgatctacgccgccagcaatctggaaagcggcgtgccaagcagattttccggctctggcagcggcaccgagttcaccctgacaatatctagcctccagcctgaggacttcgccacctactactgccagcagagctacaactggccctacacctttggcggaggcaccaaggtggaaatcaagagaggcggaggcggaagtggaggcggaggatctggcggcggaggctctgaagttcagctggttgaatcaggcggaggactcgtgaaacctggcggctctctgagactgtcttgtgccgccagcggcttcaccttcagcaacttcgagatgaactgggtccgacaggccccaggcaaaggactggaatgggtgtccggcatcagctccaatggccggtacatcaactacgccgacagcgtgaagggcagattcaccatcagccgggacaacgccaagaacagcctgtacctccagatgaactccctgagagccgaggacaccgccgtgtactattgtgccagagtggtggacttcgaccaggactacaacggcttcgactattggggccagggcaccctggttaccgttagctctacgcgtggaatgaggactgaggatcttcccaaagctgtcgtctttctcgaaccccaatggtatcgggtgctcgaaaaagactctgtgacactgaaatgccaaggggcctactctcccgaggacaactccacacagtggtttcataatgagtccctcatcagctctcaggccagctcttatttcattgatgccgctacagtggacgactccggcgagtatcggtgtcagaccaatctgtctacactgtctgaccccgtgcagcttgaggtccacattggatggttgctcttgcaagccccacgctgggttttcaaagaggaagatccaatccatctgcggtgccacagctggaaaaacaccgctctccacaaagtcacatacctgcaaaatggcaaaggacgcaaatacttccatcacaattccgatttttacattccgaaggctaccctgaaagacagcggcagctatttctgccggggactcgtcggctccaagaatgtgtcctccgaaaccgtgaatatcacgattacccaaggactggctgtgcctacaatctctagcttctttccgcctggataccaagtctccttctgtcttgtgatggtcctcctgtttgctgtggacacaggactgtacttttccgtgaaa

SEQ ID NO: 1242 - DNA, 1440 bp, synthetic construct
  source 1..1440: mol_type = other DNA
atggccttaccagtgaccgccttgctcctgccgctggccttgctgctccacgccgccaggccggacatccaactgactcagagccccagctttctgagcgcctctgtgggcgacagagtgaccatcacatgtagtctcagcctgggcatcagcacatggcgggattggtttccgccgaggcttggcaggggccttgagccgctgacctacgccgccagcacactgcaaagcggagtgcctagcagattttccggcagcggctctggcaccgagttcaccctgacaatatccagcctccagcctgaggacttcgccacctactactgccagcagctcaacagctaccctctgacctttggcggaggcaccaaggtggaaatcaagagaggcggaggcggaagtggaggcggaggatctggcggcggaggctctgaagttcaactggttgagtctggtggcggcctggttaagcctggcggatctctgagactgagctgtgccgccagcggcttcacctttagcacatacggcatgagctgggtccgacaggcccctggaaaaggacttgagtgggtcgcctacatcaacaacggctccggctacatctactacgccgacagcgtgaagggcagattcaccatcagccgggacaacgccaagaacagcctgtacctccagatgaactccctgagagccgaggacaccgccgtgtactattgtgccagaggacagtggtggagcggcggagactttgattattggggccagggcaccctggtcaccgtttcttctacgcgtggaatgaggactgaggatcttcccaaagctgtcgtctttctcgaaccccaatggtatcgggtgctcgaaaaagactctgtgacactgaaatgccaaggggcctactctcccgaggacaactccacacagtggtttcataatgagtccctcatcagctctcaggccagctcttatttcattgatgccgctacagtggacgactccggcgagtatcggtgtcagaccaatctgtctacactgtctgaccccgtgcagcttgaggtccacattggatggttgctcttgcaagccccacgctgggttttcaaagaggaagatccaatccatctgcggtgccacagctggaaaaacaccgctctccacaaagtcacatacctgcaaaatggcaaaggacgcaaatacttccatcacaattccgatttttacattccgaaggctaccctgaaagacagcggcagctatttctgccggggactcgtcggctccaagaatgtgtcctccgaaaccgtgaatatcacgattacccaaggactggctgtgcctacaatctctagcttctttccgcctggataccaagtctccttctgtcttgtgatggtcctcctgtttgctgtggacacaggactgtacttttccgtgaaa

SEQ ID NO: 1243 - DNA, 1446 bp, synthetic construct
  source 1..1446: mol_type = other DNA
atggccttaccagtgaccgccttgctcctgccgctggccttgctgctccacgccgccaggccggacatccagatgacccagaccacaagcagcctgtctgccagcctgggcgacagagtgaccatctcttgtagagccagccaggacatcagcaactacctgaactggtatcagcagaaacccgacggcaccgtgaagctgctgatctactacaccagcatcctgcacagcggcgtgcccagcagattttctggctctggcagcggcaccgactacagcctgaccatcagcaatctggaacaagaggacttcgctacctacttctgccagcaaggcaacaccctgccttggacatttggcggaggcaccaagctggaaatcaaagctggcggaggcggaagtggaggcggaggatctggcggcggaggctctgaagtgcaactggttgaatctggcggcggactggttaagcctggcggatctctgaagctgagctgtgccgcctctggcttcgccttcagcatctacgatatgagctgggtccgacagacccctgagaagagactggaatgggtcgcctacatctctagcggcggagggacctactatcccgacacagtgaagggcagattcaccatctccagagacaacgccaagaacaccctgtacctccagatgagcagcctgaagtccgaggacaccgccatgtactactgcgccagacacagcggctatggcacacattggggagtgctgtttgcctactggggccagggaacactggtcacagtttctgctacgcgtggaatgaggactgaggatcttcccaaagctgtcgtctttctcgaaccccaatggtatcgggtgctcgaaaaagactctgtgacactgaaatgccaaggggcctactctcccgaggacaactccacacagtggtttcataatgagtccctcatcagctctcaggccagctcttatttcattgatgccgctacagtggacgactccggcgagtatcggtgtcagaccaatctgtctacactgtctgaccccgtgcagcttgaggtccacattggatggttgctcttgcaagccccacgctgggttttcaaagaggaagatccaatccatctgcggtgccacagctggaaaaacaccgctctccacaaagtcacatacctgcaaaatggcaaaggacgcaaatacttccatcacaattccgatttttacattccgaaggctaccctgaaagacagcggcagctatttctgccggggactcgtcggctccaagaatgtgtcctccgaaaccgtgaatatcacgattacccaaggactggctgtgcctacaatctctagcttctttccgcctggataccaagtctccttctgtcttgtgatggtcctcctgtttgctgtggacacaggactgtacttttccgtgaaa

SEQ ID NO: 1244 - DNA, 1476 bp, synthetic construct
  source 1..1476: mol_type = other DNA
atggccttaccagtgaccgccttgctcctgccgctggccttgctgctccacgccgccaggccggacatcgtgatgacacagagccctgatagcctggccgtgtctctgggagagagagccaccatcaactgcaagagcagccagagcctgctgtacagaagcaaccagaagaactacctggcctggtatcagcagaagcccggccagcctcctaagctgctgatctactgggccagcaccagagaaagcggcgtgcccgatagattttctggctctggcagcggcaccgacttcaccctgacaatttctagcctgcaagccgaggacgtggccgtgtactactgccagcagtattacaactaccccagaaccttcggccagggcaccaaggtggaaatcaagagaacagttggcggaggcggaagtggaggcggaggatctggcggcggaggctctgaagttcagctgcttgaatcaggcggcggactggttcaacctggcggatctctgagactgagctgtgccgccagcggctacagcatcacaagcgactatgcctggaactgggtccgacaggcccctggcaaaggactggaatgggtgtcctacatcagcaacagcggcagcaccagctacaaccccagcctgaagtcccggttcaccatcagcagagacaacagcaagaacaccctgtacctccagatgaacagcctgagagctgaggacaccgccgtgtattattgcgccaaagagcggaactacgactacgacgattactactacgctatggactactggggccagggaaccctggtcacagtctcttctacgcgtggaatgaggactgaggatcttcccaaagctgtcgtctttctcgaaccccaatggtatcgggtgctcgaaaaagactctgtgacactgaaatgccaaggggcctactctcccgaggacaactccacacagtggtttcataatgagtccctcatcagctctcaggccagctcttatttcattgatgccgctacagtggacgactccggcgagtatcggtgtcagaccaatctgtctacactgtctgaccccgtgcagcttgaggtccacattggatggttgctcttgcaagccccacgctgggttttcaaagaggaagatccaatccatctgcggtgccacagctggaaaaacaccgctctccacaaagtcacatacctgcaaaatggcaaaggacgcaaatacttccatcacaattccgatttttacattccgaaggctaccctgaaagacagcggcagctatttctgccggggactcgtcggctccaagaatgtgtcctccgaaaccgtgaatatcacgattacccaaggactggctgtgcctacaatctctagcttctttccgcctggataccaagtctccttctgtcttgtgatggtcctcctgtttgctgtggacacaggactgtacttttccgtgaaa

SEQ ID NO: 1245 - DNA, 1455 bp, synthetic construct
  source 1..1455: mol_type = other DNA
atggccttaccagtgaccgccttgctcctgccgctggccttgctgctccacgccgccaggccggacgtggtcatgacacagagccctctgagcctgcctgtgacacttggacagcctgccagcatcagctgtagaagcagccagagcctgctgcacagcagcggcaatacctacctggaatggtatcagcagaggcccggacagagccccagacctctgatctacaagatcagcacccggttcagcggcgtgcccgatagattttctggctctggcagcggcaccgacttcaccctgaagattagcagagtggaagccgaggacgtgggcgtgtactactgcttccaaggcagccacgtgccatacacctttggcggcggaacaaaggtggaaatcaagagaggcggaggcggaagtggaggcggaggatctggcggcggaggctctcaagttcagctggttcagagcggagccgaagtgaagaaacctggggcctctgtgaaggtgtcctgcaaagcctctggcctgaccatcgaggactactacatgcactgggtccgacaggcccctggacaaggacttgaatggatgggctggatcgaccccgagaacggcgatacagagtacggccctaagttccagggcagagtgaccatgaccagagacaccagcatcaacaccgcctacatggaactgagccggctgagatccgatgacaccgccgtgtactattgcgccgtgcacaatgcccactacggcacttggtttgcctattggggccagggcacactggtcaccgttagctctacgcgtggaatgaggactgaggatcttcccaaagctgtcgtctttctcgaaccccaatggtatcgggtgctcgaaaaagactctgtgacactgaaatgccaaggggcctactctcccgaggacaactccacacagtggtttcataatgagtccctcatcagctctcaggccagctcttatttcattgatgccgctacagtggacgactccggcgagtatcggtgtcagaccaatctgtctacactgtctgaccccgtgcagcttgaggtccacattggatggttgctcttgcaagccccacgctgggttttcaaagaggaagatccaatccatctgcggtgccacagctggaaaaacaccgctctccacaaagtcacatacctgcaaaatggcaaaggacgcaaatacttccatcacaattccgatttttacattccgaaggctaccctgaaagacagcggcagctatttctgccggggactcgtcggctccaagaatgtgtcctccgaaaccgtgaatatcacgattacccaaggactggctgtgcctacaatctctagcttctttccgcctggataccaagtctccttctgtcttgtgatggtcctcctgtttgctgtggacacaggactgtacttttccgtgaaa

SEQ ID NO: 1246 - DNA, 1431 bp, synthetic construct
  source 1..1431: mol_type = other DNA
atggccttaccagtgaccgccttgctcctgccgctggccttgctgctccacgccgccaggccggacatccagatgacacagagccctagcagcctgtctgccagcgtgggagacagagtgaccatcacctgtagagccagcgagaacatctacagcaacctggcctggtatcagcagaagcctggcaaggcccctaagctgctgatctacgccgccaccaatctggctgatggcgtgccaagcagattttccggctctggcagcggcaccgatttcaccctgacaatatccagcctccagcctgaggacttcgccacctactactgccagcacttttggggcacccctacattcggccagggcaccaaggtggaaatcaagagaacagttggcggaggcggaagtggaggcggaggatctggcggcggaggctctgaagtgcagctggttgaatcaggtggcggcctggttcaacctggcggatctctgagactgagctgtgccgcctctggcttcagcctgacaaattacggcgtgcactgggtccgacaggcccctggaaaaggactggaatgggtgtccgtgatttggagcggcggcagcaccgattacaacgccgccttcatcagccggttcaccatcagcgccgacaccagcaagaataccgcctacctccagatgaactccctgagagccgaggacaccgccgtgtactattgcgccagagaactgatccacgctatggacaactggggccagggaaccctggtcacagtctcttctacgcgtggaatgaggactgaggatcttcccaaagctgtcgtctttctcgaaccccaatggtatcgggtgctcgaaaaagactctgtgacactgaaatgccaaggggcctactctcccgaggacaactccacacagtggtttcataatgagtccctcatcagctctcaggccagctcttatttcattgatgccgctacagtggacgactccggcgagtatcggtgtcagaccaatctgtctacactgtctgaccccgtgcagcttgaggtccacattggatggttgctcttgcaagccccacgctgggttttcaaagaggaagatccaatccatctgcggtgccacagctggaaaaacaccgctctccacaaagtcacatacctgcaaaatggcaaaggacgcaaatacttccatcacaattccgatttttacattccgaaggctaccctgaaagacagcggcagctatttctgccggggactcgtcggctccaagaatgtgtcctccgaaaccgtgaatatcacgattacccaaggactggctgtgcctacaatctctagcttctttccgcctggataccaagtctccttctgtcttgtgatggtcctcctgtttgctgtggacacaggactgtacttttccgtgaaa

SEQ ID NO: 1247 - DNA, 1452 bp, synthetic construct
  source 1..1452: mol_type = other DNA
atggccttaccagtgaccgccttgctcctgccgctggccttgctgctccacgccgccaggccggacttcgtgatgacacagagccctctgagcctgcctgtgacacctggcgaacctgccagcatcagctgtagaagcagccagagcatcgtgcacagcaacggcaacacctacctggaatggtatctccagaagcctggacagagcccacagctgctgatctacaaggtgtccaacagattcagcggcgtgcccgacagattttctggcagcggctctggcaccgacttcaccctgaagattagcagagtggaagccgaggacgtgggcgtgtactactgcttccaaggctctcacgtgcccctgacctttggacagggcaccaagctggaaatcaagagaggcggaggcggaagtggaggcggaggatctggcggcggaggctctgaagtgcagctggttgaaagcggagccgaagtgaagaaacctggggcctctgtgaaggtgtcctgcaaggccagcggctacacctttaccagctactggattcactgggtccgacaggcccctggacaaggacttgagtggatgggcgagaacgacccctccaacggcaggaccaactacaacgagaagttcaagaaccgcgtgaccctgaccgtggacaccagcatctctaccgcctacatggaactgagccggctgagatccgatgacaccgccgtgtactattgcgccagaggacccaactacttttacagcatggactactggggccagggcacaatggtcaccgttagctctacgcgtggaatgaggactgaggatcttcccaaagctgtcgtctttctcgaaccccaatggtatcgggtgctcgaaaaagactctgtgacactgaaatgccaaggggcctactctcccgaggacaactccacacagtggtttcataatgagtccctcatcagctctcaggccagctcttatttcattgatgccgctacagtggacgactccggcgagtatcggtgtcagaccaatctgtctacactgtctgaccccgtgcagcttgaggtccacattggatggttgctcttgcaagccccacgctgggttttcaaagaggaagatccaatccatctgcggtgccacagctggaaaaacaccgctctccacaaagtcacatacctgcaaaatggcaaaggacgcaaatacttccatcacaattccgatttttacattccgaaggctaccctgaaagacagcggcagctatttctgccggggactcgtcggctccaagaatgtgtcctccgaaaccgtgaatatcacgattacccaaggactggctgtgcctacaatctctagcttctttccgcctggataccaagtctccttctgtcttgtgatggtcctcctgtttgctgtggacacaggactgtacttttccgtgaaa

SEQ ID NO: 1248 - DNA, 1431 bp, synthetic construct
  source 1..1431: mol_type = other DNA
atggccttaccagtgaccgccttgctcctgccgctggccttgctgctccacgccgccaggccggacatccagctgactcagagccctagctttctgagcgccagcgtgggcgacagagtgaccatcacatgtagcgccagatccagcatcagcttcatgtactggtatcagcagaagcccggcaaggcccctaagctgctgatctacgacaccagcaatctggcctctggcgtgcccagcagattttctggaagcggcagcggcaccgagttcaccctgacaatctctagcctggaagccgaggatgccgccacctactattgccagcagtggtccagctatcccctgacatttggacagggcaccaagctggaaatcaaaggcggaggcggaagtggaggcggaggatctggcggcggaggctctcaggttcagctggttcagtctggggccgaagtgaagaaacctggggcctctgtgaaggtgtcctgcaaggcttccggctacacctttaccggctcttggatgaactgggtccgacaggctcctggacagggactcgaatggatcggcagaatctatcctggcgacggcgagacaaactacaacggcaagttcaaggaccgcgtgacaatcaccgccgacaagagcacaagcaccgcctacatggaactgagcagcctgcggagcgaagataccgccgtgtactactgcgcccggatctacggcaacaacgtgtacttcgatgtgtggggccagggcacaaccgtgacagtctcttctacgcgtggaatgaggactgaggatcttcccaaagctgtcgtctttctcgaaccccaatggtatcgggtgctcgaaaaagactctgtgacactgaaatgccaaggggcctactctcccgaggacaactccacacagtggtttcataatgagtccctcatcagctctcaggccagctcttatttcattgatgccgctacagtggacgactccggcgagtatcggtgtcagaccaatctgtctacactgtctgaccccgtgcagcttgaggtccacattggatggttgctcttgcaagccccacgctgggttttcaaagaggaagatccaatccatctgcggtgccacagctggaaaaacaccgctctccacaaagtcacatacctgcaaaatggcaaaggacgcaaatacttccatcacaattccgatttttacattccgaaggctaccctgaaagacagcggcagctatttctgccggggactcgtcggctccaagaatgtgtcctccgaaaccgtgaatatcacgattacccaaggactggctgtgcctacaatctctagcttctttccgcctggataccaagtctccttctgtcttgtgatggtcctcctgtttgctgtggacacaggactgtacttttccgtgaaa

SEQ ID NO: 1249 - DNA, 1455 bp, synthetic construct
  source 1..1455: mol_type = other DNA
atggccttaccagtgaccgccttgctcctgccgctggccttgctgctccacgccgccaggccgcagctggtgctgacacagtctccaagcgcctctgccagcctgggatctagcgtgaagctgacctgtacactgagcagcggccacaagaccgacaccatcgactggtatcagcagcagcctggcaaggcccctagatacctgatgaagctggaaggcagcggcagctacaacaaaggctctggcgtgcccgatagattcagcggcagttcttctggcgctgattggtatctgaccatcagcagcctccagagcgaggacgaggccgattactactgcggcacagactaccccggcaactacctgtttggcggcggaacacagctgacagtgcttggcggcggaggcggaagtggaggcggaggatctggcggcggaggctctcaagaacagctggttgaaagcggcggaggactggttcaacctggcggttctctgagactgagctgtgccgccagcggcttcaccttcagcgactactacatgagctggatcagacaggccccaggcaaaggactggaatgggtcgccacaatctaccccagcagcggcaagacctactacgccgattctgccaagggcagactgaccatctccagcgacaacgccaaggacagcctgtacctccagatgaacagcctgagagccgaggacaccgccgtgtactactgcaccagagatagctacgccgacgacgccgctctgtttgacatttggggccagggcaccaccgtgaccgtttcttctacgcgtggaatgaggactgaggatcttcccaaagctgtcgtctttctcgaaccccaatggtatcgggtgctcgaaaaagactctgtgacactgaaatgccaaggggcctactctcccgaggacaactccacacagtggtttcataatgagtccctcatcagctctcaggccagctcttatttcattgatgccgctacagtggacgactccggcgagtatcggtgtcagaccaatctgtctacactgtctgaccccgtgcagcttgaggtccacattggatggttgctcttgcaagccccacgctgggttttcaaagaggaagatccaatccatctgcggtgccacagctggaaaaacaccgctctccacaaagtcacatacctgcaaaatggcaaaggacgcaaatacttccatcacaattccgatttttacattccgaaggctaccctgaaagacagcggcagctatttctgccggggactcgtcggctccaagaatgtgtcctccgaaaccgtgaatatcacgattacccaaggactggctgtgcctacaatctctagcttctttccgcctggataccaagtctccttctgtcttgtgatggtcctcctgtttgctgtggacacaggactgtacttttccgtgaaa

SEQ ID NO: 1250 - DNA, 1440 bp, synthetic construct
  source 1..1440: mol_type = other DNA
atggccttaccagtgaccgccttgctcctgccgctggccttgctgctccacgccgccaggccggacatcgtgctgacacagagccctccaagcctggctatgagcctgggaaagagagccaccatcagctgtagagccagcgagagcgtgacaatcctgggctctcacctgatccactggtatcagcagaagcccggccagcctcctacactgctgattcagctggcctccaatgtgcagacaggcgtgccagccagattttctggcagcggcagcagaaccgacttcaccctgaccattgatcccgtggaagaggacgacgtggccgtgtactactgcctccagagcagaacaatccccagaacctttggcggaggcaccaagctggaaatcaaaggcggcggaggaagcggaggcggaggatctggtggtggtggatctcaaatccagctggtgcagtctggccccgagctgaagaaacctggcgagacagtgaagatcagctgcaaggccagcggctacaccttcaccgactacagcatcaactgggtcaagagagcccctggcaagggcctgaaatggatgggctggatcaacaccgaaaccagagagcccgcctacgcctacgacttcagaggcagattcgccttcagcctggaaaccagcgccagcacagcctacctccagatcaacaacctgaagtacgaggacaccgccacctacttttgcgccctggactacagctacgctatggactattggggccagggcaccagcgtgacagtctcttctacgcgtggaatgaggactgaggatcttcccaaagctgtcgtctttctcgaaccccaatggtatcgggtgctcgaaaaagactctgtgacactgaaatgccaaggggcctactctcccgaggacaactccacacagtggtttcataatgagtccctcatcagctctcaggccagctcttatttcattgatgccgctacagtggacgactccggcgagtatcggtgtcagaccaatctgtctacactgtctgaccccgtgcagcttgaggtccacattggatggttgctcttgcaagccccacgctgggttttcaaagaggaagatccaatccatctgcggtgccacagctggaaaaacaccgctctccacaaagtcacatacctgcaaaatggcaaaggacgcaaatacttccatcacaattccgatttttacattccgaaggctaccctgaaagacagcggcagctatttctgccggggactcgtcggctccaagaatgtgtcctccgaaaccgtgaatatcacgattacccaaggactggctgtgcctacaatctctagcttctttccgcctggataccaagtctccttctgtcttgtgatggtcctcctgtttgctgtggacacaggactgtacttttccgtgaaa

SEQ ID NO: 1251 - DNA, 1452 bp, synthetic construct
  source 1..1452: mol_type = other DNA
atggccttaccagtgaccgccttgctcctgccgctggccttgctgctccacgccgccaggccgcaggtacagctgcaggaatctgggcccggacttgtcaagccaagtcagacactttctcttacatgtaccgtgagcggcggaagtataagcagtggaggcttttactggtcttggatacggcagcacccaggcaaaggcttggagtggattggatacattcatcattcaggatctacacactataatccatcccttaagtcccgggtcaccattagcattgatacgtctaagaatctgttcagtctcaggctgtcctccgtcactgctgccgacacagccgtgtactactgcgcctccttggtttactgcggaggcgactgttatagcggctttgattattgggggcaggggaccctcgtaaccgtgagctctggaggcggaggatcaggtggcggtggatctggcggtggcggatctgatatccagctcactcaaagcccctctagtctctctgcctcagtgggggatcgggtcagttttacttgtcaagcttcacaggatatcaacaacttccttaattggtatcagcagaagccaggaaaagcacccaagctgctcatctatgatgcctcaaatttggagacgggtgttcccagtcgattctctgggtcagggtccgggaccgactttacgtttacgatctcctctctgcagcccgaagacatcgccacatactattgtcaacagtacggcaacttgcctttcacatttgggggcgggactaaggttgaaatcaagaggacgcgtggaatgaggactgaggatcttcccaaagctgtcgtctttctcgaaccccaatggtatcgggtgctcgaaaaagactctgtgacactgaaatgccaaggggcctactctcccgaggacaactccacacagtggtttcataatgagtccctcatcagctctcaggccagctcttatttcattgatgccgctacagtggacgactccggcgagtatcggtgtcagaccaatctgtctacactgtctgaccccgtgcagcttgaggtccacattggatggttgctcttgcaagccccacgctgggttttcaaagaggaagatccaatccatctgcggtgccacagctggaaaaacaccgctctccacaaagtcacatacctgcaaaatggcaaaggacgcaaatacttccatcacaattccgatttttacattccgaaggctaccctgaaagacagcggcagctatttctgccggggactcgtcggctccaagaatgtgtcctccgaaaccgtgaatatcacgattacccaaggactggctgtgcctacaatctctagcttctttccgcctggataccaagtctccttctgtcttgtgatggtcctcctgtttgctgtggacacaggactgtacttttccgtgaaa

SEQ ID NO: 1252 - DNA, 1446 bp, synthetic construct
  source 1..1446: mol_type = other DNA
atggccttaccagtgaccgccttgctcctgccgctggccttgctgctccacgccgccaggccgcaggtccaactgcaagaaagcggacccggactggtgaagccttctgagacacttagtctgacgtgcacggtcagtggcggctccatctcctcctattattggtcatggatacgacaacccccaggtaagggcctggaatggattggctatatctactattcaggaagcacgaactacaatcccagcctgaagtcccgagtgacaatttcagtagataccagtaaaaaccagttcagtcttaaactgtcaagcgtgacagctgccgacaccgctgtgtattactgcgtctcactggtgtattgtggaggggattgttatagcgggttcgattattggggacagggaaccctggtgactgtatcttccggaggcggaggatcaggtggcggtggatctggcggtggcggatctgatattcaactgacacaatcccccagctcactcagcgccagcgtgggggacagggttagctttacctgtcaagcctctcaggatataaataactttctgaactggtatcaacagaagcctgggaaggcgcccaaactcctgatctatgatgcgtccaacctggaaactggcgtgccttcacgctttagcggctctggcagtggtacagacttcacttttaccatctcttcacttcagccggaggacatcgccacatattactgtcaacagtacggaaacttgccctttacttttggaggcggcaccaaagttgaaatcaaaagaacgcgtggaatgaggactgaggatcttcccaaagctgtcgtctttctcgaaccccaatggtatcgggtgctcgaaaaagactctgtgacactgaaatgccaaggggcctactctcccgaggacaactccacacagtggtttcataatgagtccctcatcagctctcaggccagctcttatttcattgatgccgctacagtggacgactccggcgagtatcggtgtcagaccaatctgtctacactgtctgaccccgtgcagcttgaggtccacattggatggttgctcttgcaagccccacgctgggttttcaaagaggaagatccaatccatctgcggtgccacagctggaaaaacaccgctctccacaaagtcacatacctgcaaaatggcaaaggacgcaaatacttccatcacaattccgatttttacattccgaaggctaccctgaaagacagcggcagctatttctgccggggactcgtcggctccaagaatgtgtcctccgaaaccgtgaatatcacgattacccaaggactggctgtgcctacaatctctagcttctttccgcctggataccaagtctccttctgtcttgtgatggtcctcctgtttgctgtggacacaggactgtacttttccgtgaaa

SEQ ID NO: 1253 - DNA, 1461 bp, synthetic construct
  source 1..1461: mol_type = other DNA
atggccttaccagtgaccgccttgctcctgccgctggccttgctgctccacgccgccaggccgcaagttactttgaaggagtctggacctgtactggtgaagccaaccgagacactgacactcacgtgtacagtgagtggtttttccttgatcaacgcaaggatgggcgtcagctggatcaggcaaccccctggcaaggctctggaatggctcgctcacatattcagcaatgccgaaaaaagctaccggacaagcctgaaatcccgcctgactatttccaaggacacttctaagtctcaggtggtgctgaccatgaccaacatggacccggtggacaccgccacctattactgcgcaagaatccctgggtatggtgggaatggtgactaccattattatgggatggatgtgtgggggcaaggcacaaccgtaacggtctcaagcggaggcggaggatcaggtggcggtggatctggcggtggcggatctgacattcagatgacccaaagcccgtccagcctgtccgccagcctgggagatagagtgacaatcacgtgtagagcttcccaagggataagaaatgatctcgggtggtatcagcagaagcccggcaaagcccccaaaaggcttatatatgctagtagtacactgcagtctggagttccttcccgattttcaggtagcggctccggtacagagttcaccctcacgataagctcactccagcctgaggatttcgcaacgtactactgcctccagcacaacaattttccctggactttcggccagggcaccaaggtggagatcaagaggacgcgtggaatgaggactgaggatcttcccaaagctgtcgtctttctcgaaccccaatggtatcgggtgctcgaaaaagactctgtgacactgaaatgccaaggggcctactctcccgaggacaactccacacagtggtttcataatgagtccctcatcagctctcaggccagctcttatttcattgatgccgctacagtggacgactccggcgagtatcggtgtcagaccaatctgtctacactgtctgaccccgtgcagcttgaggtccacattggatggttgctcttgcaagccccacgctgggttttcaaagaggaagatccaatccatctgcggtgccacagctggaaaaacaccgctctccacaaagtcacatacctgcaaaatggcaaaggacgcaaatacttccatcacaattccgatttttacattccgaaggctaccctgaaagacagcggcagctatttctgccggggactcgtcggctccaagaatgtgtcctccgaaaccgtgaatatcacgattacccaaggactggctgtgcctacaatctctagcttctttccgcctggataccaagtctccttctgtcttgtgatggtcctcctgtttgctgtggacacaggactgtacttttccgtgaaa

SEQ ID NO: 1254 - DNA, 1443 bp, synthetic construct
  source 1..1443: mol_type = other DNA
atggccttaccagtgaccgccttgctcctgccgctggccttgctgctccacgccgccaggccgcagatccagttggtggaatcagggggcggtgtggtgcagccgggtaggagcctgagactgtcatgcgtggcgtctggcttcacattcaagaactacggcatgcactgggtgcgacaggcccccggaaagggtttggagtgggtcgccgtgatctggtacgacggatctaatgagtattacggagatcctgtgaagggaaggttcaccatctcccgcgacaatagcaaaaatatgctctacctgcaaatgaactcactcagggcggatgatacggcggtctactattgcgctcgctcagggattgctgtggccggcgcattcgattactggggacagggtaccctggtgacagtatcaagcggaggcggaggatcaggtggcggtggatctggcggtggcggatctgagattgtgttgacacagtctcccgataccctgtcactgtcacccggcgagaaggcaacgctgagttgcagagcaagccagtcagtctcctcttcttttctggcctggtatcagcaaaaaccaggtcaggcaccatctctcctgatttacgttgccagcagacgggcggctggcattcccgacaggttctctggaagcggatctgggaccgattttaccctgacaattagccgcttggagcccgaagactttggtatgttttactgccagcactacggaaggacacctttcacatttggcccgggcacgaaagtcgatataaaacgcacgcgtggaatgaggactgaggatcttcccaaagctgtcgtctttctcgaaccccaatggtatcgggtgctcgaaaaagactctgtgacactgaaatgccaaggggcctactctcccgaggacaactccacacagtggtttcataatgagtccctcatcagctctcaggccagctcttatttcattgatgccgctacagtggacgactccggcgagtatcggtgtcagaccaatctgtctacactgtctgaccccgtgcagcttgaggtccacattggatggttgctcttgcaagccccacgctgggttttcaaagaggaagatccaatccatctgcggtgccacagctggaaaaacaccgctctccacaaagtcacatacctgcaaaatggcaaaggacgcaaatacttccatcacaattccgatttttacattccgaaggctaccctgaaagacagcggcagctatttctgccggggactcgtcggctccaagaatgtgtcctccgaaaccgtgaatatcacgattacccaaggactggctgtgcctacaatctctagcttctttccgcctggataccaagtctccttctgtcttgtgatggtcctcctgtttgctgtggacacaggactgtacttttccgtgaaa

SEQ ID NO: 1255 - DNA, 1446 bp, synthetic construct
  source 1..1446: mol_type = other DNA
atggccttaccagtgaccgccttgctcctgccgctggccttgctgctccacgccgccaggccggacatccaactgactcagagccccagctttctgagcgcctctgtgggcgacagagtgaccatcacatgtagagccagccagggcatcagcagctacctggcttggtatcagcagaagcctggcaaggcccctaaactgctgatctacgccgccagcacactccagtctggcgtgccaagcagattttctggcagcggctctggcaccgagttcaccctgacaatatccagcctccagcctgaggacttcgccacctactactgccagcaagtgaacagctaccctctgacctttggcggaggcaccaaggtggaaatcaagagaggcggaggcggaagtggaggcggaggatctggcggcggaggctctcaactgcaactgcaagagtctggccctggcctggtcaagcctagcgaaacactgagcctgacctgtaccgtgtctggcggcagcatcagctccagcacatattactggggctggatcagacagcctcctggcaaaggactggaatggatcggctccatctacttcaccggcagcaccgactacaaccccagcctgaagtccagggtgtccatctccgtggacaccagcaagaaccagttctccctgaagctgagcagcgtgacagccgctgataccgccgtgtactactgcgccaaagaggacgatagcagcggctactacagcttcgactattggggccagggcaacctggtcaccgttagctctacgcgtggaatgaggactgaggatcttcccaaagctgtcgtctttctcgaaccccaatggtatcgggtgctcgaaaaagactctgtgacactgaaatgccaaggggcctactctcccgaggacaactccacacagtggtttcataatgagtccctcatcagctctcaggccagctcttatttcattgatgccgctacagtggacgactccggcgagtatcggtgtcagaccaatctgtctacactgtctgaccccgtgcagcttgaggtccacattggatggttgctcttgcaagccccacgctgggttttcaaagaggaagatccaatccatctgcggtgccacagctggaaaaacaccgctctccacaaagtcacatacctgcaaaatggcaaaggacgcaaatacttccatcacaattccgatttttacattccgaaggctaccctgaaagacagcggcagctatttctgccggggactcgtcggctccaagaatgtgtcctccgaaaccgtgaatatcacgattacccaaggactggctgtgcctacaatctctagcttctttccgcctggataccaagtctccttctgtcttgtgatggtcctcctgtttgctgtggacacaggactgtacttttccgtgaaa

SEQ ID NO: 1256 - DNA, 1455 bp, synthetic construct
  source 1..1455: mol_type = other DNA
atggccttaccagtgaccgccttgctcctgccgctggccttgctgctccacgccgccaggccgcagtctgctctgacccagcctagatccgtgtctggctctcctggacacagcgtgaccatcagctgtaccggcacctcttccgacgtgggcgactacaattacgtgtcctggtatcagcagaggcccggcaaggtgccaaagctgctgatctacgacgtgtccaagaggccaagcggcgtgcccgatagattttccggcagcaagtctggcaacaccgccagcctgacaatctctggactgcaagccgaggacgaggccatctacttttgtgccagctacgccggcaactacaacgtggtgtttggcggaggcaccaagctgacagtgcttggacaaggcggaggcggaagtggaggcggaggatctggcggcggaggctctcaagttcagctggtgcagtctggcagcgagctgaagaaacctggggcctctgtgaaggtgtcctgcaaggcttccggctacaccttcaacacctacgccatgaattgggtccgacaggctccaggccaaggactggaatggatgggctggatcaacaccaacaccggcaatcccacatacgcccagggcttcaccggcagattcgtgttctctctggacacctccgtgtccaccgcctacctccagatcagctctctgaaggccgaggataccgccgtgtactactgcgccagacggtacttcgattggctgctgggagccttcgacatctggggccagggaacaatggtcaccgtgtctagtacgcgtggaatgaggactgaggatcttcccaaagctgtcgtctttctcgaaccccaatggtatcgggtgctcgaaaaagactctgtgacactgaaatgccaaggggcctactctcccgaggacaactccacacagtggtttcataatgagtccctcatcagctctcaggccagctcttatttcattgatgccgctacagtggacgactccggcgagtatcggtgtcagaccaatctgtctacactgtctgaccccgtgcagcttgaggtccacattggatggttgctcttgcaagccccacgctgggttttcaaagaggaagatccaatccatctgcggtgccacagctggaaaaacaccgctctccacaaagtcacatacctgcaaaatggcaaaggacgcaaatacttccatcacaattccgatttttacattccgaaggctaccctgaaagacagcggcagctatttctgccggggactcgtcggctccaagaatgtgtcctccgaaaccgtgaatatcacgattacccaaggactggctgtgcctacaatctctagcttctttccgcctggataccaagtctccttctgtcttgtgatggtcctcctgtttgctgtggacacaggactgtacttttccgtgaaa

SEQ ID NO: 1257 - DNA, 1431 bp, synthetic construct
  source 1..1431: mol_type = other DNA
atggccttaccagtgaccgccttgctcctgccgctggccttgctgctccacgccgccaggccggacatccagatgacacagagccctagcagcctgtctgccagcgtgggagacagagtgaccatcacatgtagcgccagccagggcatcaacaactacctgaactggtatcagcagaagcccggcaaggcccctaagctgctgatccactacacatctggactgcacgctggcgtgcccagcagattttctggctctggcagcggcaccgactacaccctgacaatatctagcctccagcctgaggacgtggcaacctactactgccagcagtacagcatcctgccttggacctttggcggaggcaccaaggtggaaatcaagagaggcggaggcggaagtggaggcggaggatctggcggcggaggctctcaagttcagcttgttcagagcggagccgaagtgaagaaacccggcagctctgtgaaggtgtcctgcaaggcttccggctacgcctttagcagcagctggatgaactgggtccgacaggctcctggacagggccttgaatggatgggcagaatctatcccggcgacggcaatacccactacgcccagaaattccagggccgcgtgacactgacagccgacaagtctacaagcaccgcctacatggaactgagcagcctgagaagcgaggacaccgccgtgtactattgcggcgaaggctatctggaccctatggactattggggccagggcacactggtcaccgttagctctacgcgtggaatgaggactgaggatcttcccaaagctgtcgtctttctcgaaccccaatggtatcgggtgctcgaaaaagactctgtgacactgaaatgccaaggggcctactctcccgaggacaactccacacagtggtttcataatgagtccctcatcagctctcaggccagctcttatttcattgatgccgctacagtggacgactccggcgagtatcggtgtcagaccaatctgtctacactgtctgaccccgtgcagcttgaggtccacattggatggttgctcttgcaagccccacgctgggttttcaaagaggaagatccaatccatctgcggtgccacagctggaaaaacaccgctctccacaaagtcacatacctgcaaaatggcaaaggacgcaaatacttccatcacaattccgatttttacattccgaaggctaccctgaaagacagcggcagctatttctgccggggactcgtcggctccaagaatgtgtcctccgaaaccgtgaatatcacgattacccaaggactggctgtgcctacaatctctagcttctttccgcctggataccaagtctccttctgtcttgtgatggtcctcctgtttgctgtggacacaggactgtacttttccgtgaaa

SEQ ID NO: 1258 - DNA, 1440 bp, synthetic construct
  source 1..1440: mol_type = other DNA
atggccttaccagtgaccgccttgctcctgccgctggccttgctgctccacgccgccaggccggaggtgcagctggttgaatctggcggaggactggttcagcctggcggatctctgagactgtcttgtgccgccagcggctacaccttcaccacctattggatgcactgggtccgacaggcccctggcaaaggacttgagtgggtcggatatatcaggcccagcaccggctacacagagtacaaccagaagttcaaggaccgcttcaccatcagcgccgacaccagcaagaataccgcctacctccagatgaacagcctgagagccgaggacaccgccgtgtactactgtgccagatccagatggctgctggactattggggccagggcacactggttacagtttctggcggaggcggaagtggaggcggaggatctggcggcggaggctctgacattcagatgacacagagccctagcagcctgagcgcctctgtgggagacagagtgaccatcacatgcaagagcagccagagcgtgctgtactccagcaatcagaagaactacctggcctggttccagcagaagcctggcaaggctcctaagctgctgatctactgggccagcaccagagaaagcggcgtgccaagcagattttctggcagcggctctggcaccgacttcaccctgacaatatccagcctccagcctgaggacttcgccacctacttttgccaccagtacctgagcagctacacattcggacagggcaccaaggtggaaatcaagcggacgcgtggaatgaggactgaggatcttcccaaagctgtcgtctttctcgaaccccaatggtatcgggtgctcgaaaaagactctgtgacactgaaatgccaaggggcctactctcccgaggacaactccacacagtggtttcataatgagtccctcatcagctctcaggccagctcttatttcattgatgccgctacagtggacgactccggcgagtatcggtgtcagaccaatctgtctacactgtctgaccccgtgcagcttgaggtccacattggatggttgctcttgcaagccccacgctgggttttcaaagaggaagatccaatccatctgcggtgccacagctggaaaaacaccgctctccacaaagtcacatacctgcaaaatggcaaaggacgcaaatacttccatcacaattccgatttttacattccgaaggctaccctgaaagacagcggcagctatttctgccggggactcgtcggctccaagaatgtgtcctccgaaaccgtgaatatcacgattacccaaggactggctgtgcctacaatctctagcttctttccgcctggataccaagtctccttctgtcttgtgatggtcctcctgtttgctgtggacacaggactgtacttttccgtgaaa

SEQ ID NO: 1259 - DNA, 1431 bp, synthetic construct
  source 1..1431: mol_type = other DNA
atggccttaccagtgaccgccttgctcctgccgctggccttgctgctccacgccgccaggccggacatccagatgacacagagccctagcagcctgtctgccagcgtgggagacagagtgaccatcacctgtagagccagccaggacatcagcaactacctgaactggtatcagcagaagcccggcaaggcccctaagctgctgatctactacaccagcagactgcacagcggcgtgcccagcagattttctggctctggcagcggcaccgacttcaccctgacaatatctagcctccagcctgaggacttcgccacctactattgccagcagggcaacaccctgccttacacatttggacagggcaccaaggtggaaatcaagagaggcggaggcggaagtggaggcggaggatctggcggcggaggctctgaagtgcagctggttgaatcaggtggcggcctggttcaacctggcggatctctgagactgagctgtgccgccagcggcttcaccttcagcgactactttatgagctgggtccgacaggcccctggcaaaggacttgaatgggtcgccaccatcagcaatggcggcacctacacttactaccccgacagcgtgaagggcagattcaccatctccagagacaacagcaagaacaccctgtacctccagatgaactccctgagagccgaggacaccgccgtgtactactgcgccagattcgacggctacatcttcgactattggggccagggcaccctggtcacagtctcttctacgcgtggaatgaggactgaggatcttcccaaagctgtcgtctttctcgaaccccaatggtatcgggtgctcgaaaaagactctgtgacactgaaatgccaaggggcctactctcccgaggacaactccacacagtggtttcataatgagtccctcatcagctctcaggccagctcttatttcattgatgccgctacagtggacgactccggcgagtatcggtgtcagaccaatctgtctacactgtctgaccccgtgcagcttgaggtccacattggatggttgctcttgcaagccccacgctgggttttcaaagaggaagatccaatccatctgcggtgccacagctggaaaaacaccgctctccacaaagtcacatacctgcaaaatggcaaaggacgcaaatacttccatcacaattccgatttttacattccgaaggctaccctgaaagacagcggcagctatttctgccggggactcgtcggctccaagaatgtgtcctccgaaaccgtgaatatcacgattacccaaggactggctgtgcctacaatctctagcttctttccgcctggataccaagtctccttctgtcttgtgatggtcctcctgtttgctgtggacacaggactgtacttttccgtgaaa

SEQ ID NO: 1260 - DNA, 1452 bp, synthetic construct
  source 1..1452: mol_type = other DNA
atggccttaccagtgaccgccttgctcctgccgctggccttgctgctccacgccgccaggccggacatccagatgacacagagccctagcagcctgtctgccagcgtgggagacagagtgaccatcacctgtaccgccagcagcagagtgtccagcagctacctgcactggttccagcagaagcctggcaaggcccctaagctgctgatctacagcaccagcaatctggcctctggcgtgcccagcagattttctggctctggcagcggcaccgacttcaccctgacaatatctagcctccagcctgaggacttcgccacctactactgccaccagtaccacagaagcccctacacattcggccagggcaccaaggtggaaatcaagagaggcggaggcggaagtggaggcggaggatctggcggcggaggctctgaagttcagctggttgaatctggcggcggactggttcaacctggcggatctctgagactgagctgtgccgcctctggctacgccttcagcaacagctggatcaactgggtccgacaggcccctggcaaaggactggaatgggtcggacaaatctaccccggcgactacgacaccaactacaacggcaagttcaagggcagattcaccatcagccgggacaagagcaagaacaccgcctacctccagatgaactccctgagagccgaggacaccgccgtgtactattgtgctagaggcggctccatctactacggcaacctgggcttcttcgacgtgtggggacagggcacactggtcacagtctcttctacgcgtggaatgaggactgaggatcttcccaaagctgtcgtctttctcgaaccccaatggtatcgggtgctcgaaaaagactctgtgacactgaaatgccaaggggcctactctcccgaggacaactccacacagtggtttcataatgagtccctcatcagctctcaggccagctcttatttcattgatgccgctacagtggacgactccggcgagtatcggtgtcagaccaatctgtctacactgtctgaccccgtgcagcttgaggtccacattggatggttgctcttgcaagccccacgctgggttttcaaagaggaagatccaatccatctgcggtgccacagctggaaaaacaccgctctccacaaagtcacatacctgcaaaatggcaaaggacgcaaatacttccatcacaattccgatttttacattccgaaggctaccctgaaagacagcggcagctatttctgccggggactcgtcggctccaagaatgtgtcctccgaaaccgtgaatatcacgattacccaaggactggctgtgcctacaatctctagcttctttccgcctggataccaagtctccttctgtcttgtgatggtcctcctgtttgctgtggacacaggactgtacttttccgtgaaa

SEQ ID NO: 1261 - DNA, 1422 bp, synthetic construct
  source 1..1422: mol_type = other DNA
atggccttaccagtgaccgccttgctcctgccgctggccttgctgctccacgccgccaggccggacatccagatgacacagagccctagcagcctgtctgccagcgtgggagacagagtgaccatcacatgtagcgccagcagcagcgtgacctacatgtactggtatcagcagaagcccggcaaggcccctaagctgctgatctacgacaccagcaatctggcctctggcgtgcccagcagattttctggctctggcagcggcaccgactacaccctgacaatatctagcctccagcctgaggacttcgccacctactactgccagcagtggtccaactatcccctgacattcggccagggcaccaaggtggaaatcaaaggcggaggcggaagtggaggcggaggatctggcggcggaggctctcaagttcagctggttcagagcggagccgaagtgaagaaacctggggcctctgtgaaggtgtcctgcaaggccagcggctacagcttcatcgagtacaccatcaactgggtccgacaggcccctggacaaggcctggaatggatcggcaacatcgacccctactacggcacaacctactacaaccagatgttcaccggcagagccacactgaccgtggacacctctatcagcaccgcctacatggaactgagccggctgagatccgatgacaccgccgtgtactattgtgccagaggcagcgcctggtttccctattggggacagggaaccctggtcaccgttagctctacgcgtggaatgaggactgaggatcttcccaaagctgtcgtctttctcgaaccccaatggtatcgggtgctcgaaaaagactctgtgacactgaaatgccaaggggcctactctcccgaggacaactccacacagtggtttcataatgagtccctcatcagctctcaggccagctcttatttcattgatgccgctacagtggacgactccggcgagtatcggtgtcagaccaatctgtctacactgtctgaccccgtgcagcttgaggtccacattggatggttgctcttgcaagccccacgctgggttttcaaagaggaagatccaatccatctgcggtgccacagctggaaaaacaccgctctccacaaagtcacatacctgcaaaatggcaaaggacgcaaatacttccatcacaattccgatttttacattccgaaggctaccctgaaagacagcggcagctatttctgccggggactcgtcggctccaagaatgtgtcctccgaaaccgtgaatatcacgattacccaaggactggctgtgcctacaatctctagcttctttccgcctggataccaagtctccttctgtcttgtgatggtcctcctgtttgctgtggacacaggactgtacttttccgtgaaa

SEQ ID NO: 1262 - DNA, 1422 bp, synthetic construct
  source 1..1422: mol_type = other DNA
atggccttaccagtgaccgccttgctcctgccgctggccttgctgctccacgccgccaggccggagatcgtgctgacacagagcccttctagcctgtctgccagcgtgggcgacagagtgaccatcacatgtagagccagcgagaacatctacagctacctggcctggtatcagcagaagcctggcaaggcccctaagctgctgatctacaacaccaagacactcggcgagggcgtgcccagcagattttctggttctggcagcggcaccgacttcaccctgaccatatctagcctgcagcctgaggacttcgccacctactactgccagcaccactacggcacccctttcacatttggccctggcaccaaggtggacatcaaaggcggaggcggaagtggaggcggaggatctggcggcggaggctctcaagttcagctggttcagagcggagccgaagtgaagaaacctggggcctctgtgaaggtgtcctgcaaggccagcggctacaccttcagcgactattgggtgcactgggtccgacaggctccaggacaaggactggaatggatgggagccatcgacggcagcgataccttcaacgattacagccagaaattcaaaggccgcgtgaccatgaccagagacaccagcatcagcaccgcctacatggaactgagccggctgagatccgatgacaccgccgtgtactattgtgccagaggcggcctgctgcagtattggggacagggaacactggtcaccgtgtcctctacgcgtggaatgaggactgaggatcttcccaaagctgtcgtctttctcgaaccccaatggtatcgggtgctcgaaaaagactctgtgacactgaaatgccaaggggcctactctcccgaggacaactccacacagtggtttcataatgagtccctcatcagctctcaggccagctcttatttcattgatgccgctacagtggacgactccggcgagtatcggtgtcagaccaatctgtctacactgtctgaccccgtgcagcttgaggtccacattggatggttgctcttgcaagccccacgctgggttttcaaagaggaagatccaatccatctgcggtgccacagctggaaaaacaccgctctccacaaagtcacatacctgcaaaatggcaaaggacgcaaatacttccatcacaattccgatttttacattccgaaggctaccctgaaagacagcggcagctatttctgccggggactcgtcggctccaagaatgtgtcctccgaaaccgtgaatatcacgattacccaaggactggctgtgcctacaatctctagcttctttccgcctggataccaagtctccttctgtcttgtgatggtcctcctgtttgctgtggacacaggactgtacttttccgtgaaa

SEQ ID NO: 1263 - DNA, 1434 bp, synthetic construct
  source 1..1434: mol_type = other DNA
atggccttaccagtgaccgccttgctcctgccgctggccttgctgctccacgccgccaggccgcaggttcagctccagcagtctggacctgagctggttaagcctggcgcttccgtgaagatcagctgcaaggcttccggctacgccttcagcagcagctggatgaactgggtcaaacagaggcccggcaaaggactggaatggatcggcagaatctaccccggcgacgaggacaccaattacagcggcaagttcaaggacaaggccacactgaccgccgacaagagcagcaccacagcctacatgcagctgagcagcctgaccagcgaggatagcgccgtgtacttctgtgccagaagcctgctgtacggcgactacctggattattggggccagggcacaaccctgacagtgtctagcggcggaggcggaagtggaggcggaggatctggcggcggaggctctcaaattgtgctgacacagagccccgccatcatgagcgcttctccaggcgagaaagtgaccatgacctgtagcgccagcagctccgtgtcttacatgcactggtatcagcagaagtccggcacaagccccaagcggtggatctacgataccagcaaactggcctccggcgtgcccgatagattttctggcagcggcagcggaaccagctacttcctgaccatcaacaacatggaagccgaggacgccgccacctactactgccagcagtggaacatcaaccctctgacctttggagccggcaccaagctggaactgaagagaacgcgtggaatgaggactgaggatcttcccaaagctgtcgtctttctcgaaccccaatggtatcgggtgctcgaaaaagactctgtgacactgaaatgccaaggggcctactctcccgaggacaactccacacagtggtttcataatgagtccctcatcagctctcaggccagctcttatttcattgatgccgctacagtggacgactccggcgagtatcggtgtcagaccaatctgtctacactgtctgaccccgtgcagcttgaggtccacattggatggttgctcttgcaagccccacgctgggttttcaaagaggaagatccaatccatctgcggtgccacagctggaaaaacaccgctctccacaaagtcacatacctgcaaaatggcaaaggacgcaaatacttccatcacaattccgatttttacattccgaaggctaccctgaaagacagcggcagctatttctgccggggactcgtcggctccaagaatgtgtcctccgaaaccgtgaatatcacgattacccaaggactggctgtgcctacaatctctagcttctttccgcctggataccaagtctccttctgtcttgtgatggtcctcctgtttgctgtggacacaggactgtacttttccgtgaaa

SEQ ID NO: 1264 - DNA, 1443 bp, synthetic construct
  source 1..1443: mol_type = other DNA
atggccttaccagtgaccgccttgctcctgccgctggccttgctgctccacgccgccaggccggacatccagatgacacagagcagcgcctacctgagcgtgtcccttggaggcagagtgaccatcacatgcaaggccagcgaccacatcaacaactggctggcctggtatcagcacaagcccggcaatgcccctagactgctgatctctggcgctaccacactggaaacaggcgtgcccagcagattttctggcagcggctctggcaaggactacaccctgagcatcaccagcctccagaccgaggatgtggctacctactactgccagcagagctggaacaccccttggacatttggcggaggcaccaagctggaaatcaagagaggcggaggcggaagtggaggcggaggatctggcggcggaggctctcaagttcagctgcaacagagcggagccgagcttgtcagacctggcagctctgtgaagattagctgcaaagccagcggctacgccttcagcagctactgggtcaactggatgaagcagcggcctggacagggcctcgaatggatcggccaaatctatcctggcgacggcgacaccaactacaacggcaagtttaagggcagagccaccgtgaccgccgacaagagcagcagcacatcctacatgcagttcagcagcctgaccagcgaggacagcgccgtgtatttctgtgccagatccatcaccaccgtcgtgggctgcgctatggattattggggccagggcacaagcgtgaccgtgtcatctacgcgtggaatgaggactgaggatcttcccaaagctgtcgtctttctcgaaccccaatggtatcgggtgctcgaaaaagactctgtgacactgaaatgccaaggggcctactctcccgaggacaactccacacagtggtttcataatgagtccctcatcagctctcaggccagctcttatttcattgatgccgctacagtggacgactccggcgagtatcggtgtcagaccaatctgtctacactgtctgaccccgtgcagcttgaggtccacattggatggttgctcttgcaagccccacgctgggttttcaaagaggaagatccaatccatctgcggtgccacagctggaaaaacaccgctctccacaaagtcacatacctgcaaaatggcaaaggacgcaaatacttccatcacaattccgatttttacattccgaaggctaccctgaaagacagcggcagctatttctgccggggactcgtcggctccaagaatgtgtcctccgaaaccgtgaatatcacgattacccaaggactggctgtgcctacaatctctagcttctttccgcctggataccaagtctccttctgtcttgtgatggtcctcctgtttgctgtggacacaggactgtacttttccgtgaaa

SEQ ID NO: 1265 - DNA, 1440 bp, synthetic construct
  source 1..1440: mol_type = other DNA
atggccttaccagtgaccgccttgctcctgccgctggccttgctgctccacgccgccaggccggaggttcagctgcttgagtctggcggaggactggttcaacctggcggaagcctgagactgtcttgtgccgccagcggcttcacctttagcagctacgccatgagctgggtccgacaggctcctggcaaaggactggaatgggtgtccgtgatctctggctctggcggcagacccaattacgccgattctgtgaagggcagattcaccatcagccgggacaacagcaagaacaccctgtacctccagatgaacagcctgcgcgacgaggataccgccgtgtactattgtgccaaggtggactacagcaactacctgttcttcgactactggggccagggcaccctggtcacagtttctagcggcggaggcggaagtggaggcggaggatctggcggcggaggctctgaaatcgtgctgacacagagccccggcacactgtcactttctccaggcgaaggcgctaccctgtcttgtagagctggacagtctgtgcggagcagctacctcggatggtatcagcagaagcctggacaggcccctcggctgttgatctacggtgcttctagcagagccacaggcatccccgatagattttctggcagcggctccggcaccgacttcaccctgacaatcagcagactggaacccgaggacttcgccgtgtattactgccagcagtacggctacagccctcctacatttggcggaggcaccaagctggaaatcaagacgcgtggaatgaggactgaggatcttcccaaagctgtcgtctttctcgaaccccaatggtatcgggtgctcgaaaaagactctgtgacactgaaatgccaaggggcctactctcccgaggacaactccacacagtggtttcataatgagtccctcatcagctctcaggccagctcttatttcattgatgccgctacagtggacgactccggcgagtatcggtgtcagaccaatctgtctacactgtctgaccccgtgcagcttgaggtccacattggatggttgctcttgcaagccccacgctgggttttcaaagaggaagatccaatccatctgcggtgccacagctggaaaaacaccgctctccacaaagtcacatacctgcaaaatggcaaaggacgcaaatacttccatcacaattccgatttttacattccgaaggctaccctgaaagacagcggcagctatttctgccggggactcgtcggctccaagaatgtgtcctccgaaaccgtgaatatcacgattacccaaggactggctgtgcctacaatctctagcttctttccgcctggataccaagtctccttctgtcttgtgatggtcctcctgtttgctgtggacacaggactgtacttttccgtgaaa

SEQ ID NO: 1266 - DNA, 1449 bp, synthetic construct
  source 1..1449: mol_type = other DNA
atggccttaccagtgaccgccttgctcctgccgctggccttgctgctccacgccgccaggccggacatcgtgctgacacagagccctccaagcctggctatgagcctgggaaagagagccaccatcagctgtagagccagcgagagcgtgacaatcctgggctctcacctgatccactggtatcagcagaagcccggccagcctcctacactgctgattcagctggcctccaatgtgcagacaggcgtgccagccagattttctggcagcggcagcagaaccgacttcaccctgaccattgatcccgtggaagaggacgacgtggccgtgtactactgcctccagagcagaacaatccccagaacctttggcggaggcaccaagctggaaatcaagggcagcacaagcggcagcggaaagcctggatctggcgagggatctaccaagggacagatccagctggtgcagtctggccccgagctgaagaaacctggcgagacagtgaagatcagctgcaaggccagcggctacaccttcaccgactacagcatcaactgggtcaagagagcccctggcaagggcctgaaatggatgggctggatcaacaccgaaaccagagagcccgcctacgcctacgacttcagaggcagattcgccttcagcctggaaaccagcgccagcacagcctacctccagatcaacaacctgaagtacgaggacaccgccacctacttttgcgccctggactacagctacgctatggactattggggccagggcaccagcgtgacagtctcttctacgcgtggaatgaggactgaggatcttcccaaagctgtcgtctttctcgaaccccaatggtatcgggtgctcgaaaaagactctgtgacactgaaatgccaaggggcctactctcccgaggacaactccacacagtggtttcataatgagtccctcatcagctctcaggccagctcttatttcattgatgccgctacagtggacgactccggcgagtatcggtgtcagaccaatctgtctacactgtctgaccccgtgcagcttgaggtccacattggatggttgctcttgcaagccccacgctgggttttcaaagaggaagatccaatccatctgcggtgccacagctggaaaaacaccgctctccacaaagtcacatacctgcaaaatggcaaaggacgcaaatacttccatcacaattccgatttttacattccgaaggctaccctgaaagacagcggcagctatttctgccggggactcgtcggctccaagaatgtgtcctccgaaaccgtgaatatcacgattacccaaggactggctgtgcctacaatctctagcttctttccgcctggataccaagtctccttctgtcttgtgatggtcctcctgtttgctgtggacacaggactgtacttttccgtgaaa

SEQ ID NO: 1267 - DNA, 1449 bp, synthetic construct
  source 1..1449: mol_type = other DNA
atggccttaccagtgaccgccttgctcctgccgctggccttgctgctccacgccgccaggccggacatccagatgacacagagccctagcagcctgtctgccagcgtgggagacagagtgaccatcacctgtagagccagcagcagcgtgtcctacatgcactggtatcagcagaagcccggcaaggcccctaagctgctgatctacgccaccagcaatctggcctctggcgtgccaagcagattttctggcagcggctctggcaccgacttcaccctgacaatatccagcctccagcctgaggacttcgccacctactactgccagcagtggaccttcaatcctcctaccttcggccagggcaccaagctggaaatcaagagaacagtggctgccggcggaggcggaagtggaggcggaggatctggcggcggaggctctcaagttcagctggttcagtctggggccgaagtgaagaaacctggggcctctgtgaaggtgtcctgcaaggcttccggctacacctttaccagctacaatatgcactgggtccgacaggctcccggccagagacttgaatggatgggcggcatctaccccggcaatggcgacacctcctacaaccagaaattcaagggccgcgtgacaatcaccagagacacctctgccagcaccgcctacatggaactgagcagcctgagaagcgaggacaccgccgtgtactactgcgccagatacgactacaactacgctatggactactggggccagggaaccctggtcacagtgtctagtgcttccacgcgtggaatgaggactgaggatcttcccaaagctgtcgtctttctcgaaccccaatggtatcgggtgctcgaaaaagactctgtgacactgaaatgccaaggggcctactctcccgaggacaactccacacagtggtttcataatgagtccctcatcagctctcaggccagctcttatttcattgatgccgctacagtggacgactccggcgagtatcggtgtcagaccaatctgtctacactgtctgaccccgtgcagcttgaggtccacattggatggttgctcttgcaagccccacgctgggttttcaaagaggaagatccaatccatctgcggtgccacagctggaaaaacaccgctctccacaaagtcacatacctgcaaaatggcaaaggacgcaaatacttccatcacaattccgatttttacattccgaaggctaccctgaaagacagcggcagctatttctgccggggactcgtcggctccaagaatgtgtcctccgaaaccgtgaatatcacgattacccaaggactggctgtgcctacaatctctagcttctttccgcctggataccaagtctccttctgtcttgtgatggtcctcctgtttgctgtggacacaggactgtacttttccgtgaaa

SEQ ID NO: 1268 - DNA, 1434 bp, synthetic construct
  source 1..1434: mol_type = other DNA
atggccttaccagtgaccgccttgctcctgccgctggccttgctgctccacgccgccaggccggagatcgtgctgacacagagccctggcacactgtcactgtctccaggcgaaagagccacactgagctgtagagccagccagagcgtgtccagctcttacctggcttggtatcagcagaagcccggacaggctcccagactgctgatctacggtgcctctagcagagccacaggcatccccgatagattttctggcagcggctccggcaccgacttcaccctgacaatcagcagactggaacccgaggacttcgccgtgtactactgccagcagtaccaccactctccactgacctttggcggaggcaccaaggtggaaatcaagagaggcggaggcggaagtggaggcggaggatctggcggcggaggctctgaagttcagctggttgaatcaggtggcggcctggttcaacctggcggatctctgagactgtcttgtgccgccagcggcttcactttcagcggcagatccatgaactgggtccgacaggcccctggcaaaggactggaatgggtgtcctacatcagcagcgacagccggaccatctactacgccgatagcgtgaagggcagattcaccatctccagagacaacgccaagaacagcctgtacctccagatgaactccctgagagccgaggacacagccgtgtattattgtgccagaggcggccacggctacttcgatctttggggcagaggcaccctggtcaccgtttcttctacgcgtggaatgaggactgaggatcttcccaaagctgtcgtctttctcgaaccccaatggtatcgggtgctcgaaaaagactctgtgacactgaaatgccaaggggcctactctcccgaggacaactccacacagtggtttcataatgagtccctcatcagctctcaggccagctcttatttcattgatgccgctacagtggacgactccggcgagtatcggtgtcagaccaatctgtctacactgtctgaccccgtgcagcttgaggtccacattggatggttgctcttgcaagccccacgctgggttttcaaagaggaagatccaatccatctgcggtgccacagctggaaaaacaccgctctccacaaagtcacatacctgcaaaatggcaaaggacgcaaatacttccatcacaattccgatttttacattccgaaggctaccctgaaagacagcggcagctatttctgccggggactcgtcggctccaagaatgtgtcctccgaaaccgtgaatatcacgattacccaaggactggctgtgcctacaatctctagcttctttccgcctggataccaagtctccttctgtcttgtgatggtcctcctgtttgctgtggacacaggactgtacttttccgtgaaa

SEQ ID NO: 1269 - DNA, 1443 bp, synthetic construct
  source 1..1443: mol_type = other DNA
atggccttaccagtgaccgccttgctcctgccgctggccttgctgctccacgccgccaggccggagatcgtgctgacacagagccctggcacactgtcactgtctccaggcgaaagagccacactgagctgtagagccagccagagcgtgtccagcgattacctggcttggtatcagcagaagcccggacaggctcccagactgctgatctatggtgcctctcggagagccacaggcatccccgatagattttctggcagcggctccggcaccgacttcaccctgacaatcagcagactggaacccgaggacttcgccgtgtactactgccagcagtacgtgtcctactggacctttggcggaggcaccaaggtggaaatcaagagaggcggaggcggaagtggaggcggaggatctggcggcggaggctctcaagttcagctggttgaatcaggcggaggcgttgtgcagcctggcagaagtctgagactgtcttgtgccgccagcggcttcaccttcagcagctatggaatgcactgggtccgacaggcccctggcaaaggacttgaatgggtggccggcatttggtgggacggcagcaatgagaagtacgccgacagcgtgaagggcagattcaccatctccagagacaacagcaagaacaccctgtacctccagatgaacagcctgagagccgaggacacagccgtgtattattgcgccaaagaggccccttactacgccaaggactacatggacgtgtggggcaagggcaccacagtgactgtctcttctacgcgtggaatgaggactgaggatcttcccaaagctgtcgtctttctcgaaccccaatggtatcgggtgctcgaaaaagactctgtgacactgaaatgccaaggggcctactctcccgaggacaactccacacagtggtttcataatgagtccctcatcagctctcaggccagctcttatttcattgatgccgctacagtggacgactccggcgagtatcggtgtcagaccaatctgtctacactgtctgaccccgtgcagcttgaggtccacattggatggttgctcttgcaagccccacgctgggttttcaaagaggaagatccaatccatctgcggtgccacagctggaaaaacaccgctctccacaaagtcacatacctgcaaaatggcaaaggacgcaaatacttccatcacaattccgatttttacattccgaaggctaccctgaaagacagcggcagctatttctgccggggactcgtcggctccaagaatgtgtcctccgaaaccgtgaatatcacgattacccaaggactggctgtgcctacaatctctagcttctttccgcctggataccaagtctccttctgtcttgtgatggtcctcctgtttgctgtggacacaggactgtacttttccgtgaaa

SEQ ID NO: 1270 - DNA, 1443 bp, synthetic construct
  source 1..1443: mol_type = other DNA
atggccttaccagtgaccgccttgctcctgccgctggccttgctgctccacgccgccaggccggacatccagatgacacagagccctagcagcctgtctgccagcgtgggagacagagtgaccatcacctgtagagccagccaggacgtgaacacagccgtggcttggtatcagcagaagcctggcaaggcccctaagctgctgatctacagcgccagctttctgtacagcggcgtgcccagcagattcagcggaagcagaagcggcaccgacttcaccctgacaatatccagcctccagcctgaggacttcgccacctactactgccagcagcactacaccacacctccaacattcggccagggcaccaaggtggaaatcaagagaacaggcggaggcggaagtggaggcggaggatctggcggcggaggctctgaagtgcagctggttgaatcaggtggcggcctggttcaacctggcggatctctgagactgagctgtgccgccagcggcttcaacatcaaggacacctacatccactgggtccgacaggcccctggcaaaggacttgaatgggtcgccagaatctaccccaccaacggctacaccagatacgccgactctgtgaagggcagattcaccatcagcgccgacaccagcaagaacaccgcctacctccagatgaactccctgagagccgaggacaccgccgtgtactactgtagcagatggggcggctggggcttctacgctatggattattggggccagggaaccctggtcaccgtgtcatctacgcgtggaatgaggactgaggatcttcccaaagctgtcgtctttctcgaaccccaatggtatcgggtgctcgaaaaagactctgtgacactgaaatgccaaggggcctactctcccgaggacaactccacacagtggtttcataatgagtccctcatcagctctcaggccagctcttatttcattgatgccgctacagtggacgactccggcgagtatcggtgtcagaccaatctgtctacactgtctgaccccgtgcagcttgaggtccacattggatggttgctcttgcaagccccacgctgggttttcaaagaggaagatccaatccatctgcggtgccacagctggaaaaacaccgctctccacaaagtcacatacctgcaaaatggcaaaggacgcaaatacttccatcacaattccgatttttacattccgaaggctaccctgaaagacagcggcagctatttctgccggggactcgtcggctccaagaatgtgtcctccgaaaccgtgaatatcacgattacccaaggactggctgtgcctacaatctctagcttctttccgcctggataccaagtctccttctgtcttgtgatggtcctcctgtttgctgtggacacaggactgtacttttccgtgaaa

SEQ ID NO: 1271 - DNA, 1428 bp, synthetic construct
  source 1..1428: mol_type = other DNA
atggccttaccagtgaccgccttgctcctgccgctggccttgctgctccacgccgccaggccgcaggtgcagctggttgaatctggcggcggacttgtgaagcctggcggatctctgagactgagctgtgccgccagcggcttcaccttcagcgactactacatgacctggatcagacaggcccctggcaaaggactggaatggatcagctacatcagcagcagcggcagcaccatctactacgccgatagcgtgaagggcagattcaccatcagccgggacaacgccaagaacagcctgtacctccagatgaactccctgagagccgaggacaccgccgtgtactactgcgccagagacagaaacagccacttcgactattggggccagggcaccctggtcacagtttctagcggcggaggcggaagtggaggcggaggatctggcggcggaggctctgatattcagatgacacagagccccagcagcgtgtccgcctctgtgggagatagagtgaccatcacctgtagagccagccagggcatcacaagatggctggcctggtatcagcagaagccaggcaaggcccctaagctgctgatctacgccgcttctgtgctccagagcggagtgcctagcagattttctggcagcggctccggcaccgatttcaccctgacaatatccagcctccagcctgaggacttcgccacctactactgccagcagagcaacagcttccccagaacattcggacagggcaccaaggtggaaatcaagacgcgtggaatgaggactgaggatcttcccaaagctgtcgtctttctcgaaccccaatggtatcgggtgctcgaaaaagactctgtgacactgaaatgccaaggggcctactctcccgaggacaactccacacagtggtttcataatgagtccctcatcagctctcaggccagctcttatttcattgatgccgctacagtggacgactccggcgagtatcggtgtcagaccaatctgtctacactgtctgaccccgtgcagcttgaggtccacattggatggttgctcttgcaagccccacgctgggttttcaaagaggaagatccaatccatctgcggtgccacagctggaaaaacaccgctctccacaaagtcacatacctgcaaaatggcaaaggacgcaaatacttccatcacaattccgatttttacattccgaaggctaccctgaaagacagcggcagctatttctgccggggactcgtcggctccaagaatgtgtcctccgaaaccgtgaatatcacgattacccaaggactggctgtgcctacaatctctagcttctttccgcctggataccaagtctccttctgtcttgtgatggtcctcctgtttgctgtggacacaggactgtacttttccgtgaaa

SEQ ID NO: 1272 - DNA, 1428 bp, synthetic construct
  source 1..1428: mol_type = other DNA
atggccttaccagtgaccgccttgctcctgccgctggccttgctgctccacgccgccaggccgcaggtgcagctggttgaatctggcggcggacttgtgaagcctggcggatctctgagactgagctgtgccgccagcggcttcaccttcagcgatcactacatgagctggatcagacaggcccctggcaaaggactggaatggttcagctacatcagcagcagcggcggcatcatctactacgccgatagcgtgaagggcagattcaccatcagccgggacaacgccaagaacagcctgtacctccagatgaactccctgagagccgaggacaccgccgtgtactactgtgccagagatgtgggcagccacttcgactattggggccagggaacactggtcaccgtttctagcggcggaggcggaagtggaggcggaggatctggcggcggaggctctgatattcagatgacacagagccccagcagcgtgtccgcctctgtgggagatagagtgaccatcacctgtcgggccagccaggacattagcagatggctggcttggtatcagcagaagccaggcaaggcccctaagctgctgatttcagccgccagcagactccagagcggagtgcctagcagattttctggctctggcagcggcaccgacttcaccctgacaatatctagcctccagcctgaggacttcgccatctactattgccagcaggccaagagcttccccagaacatttggacagggcaccaaggtggaaatcaagacgcgtggaatgaggactgaggatcttcccaaagctgtcgtctttctcgaaccccaatggtatcgggtgctcgaaaaagactctgtgacactgaaatgccaaggggcctactctcccgaggacaactccacacagtggtttcataatgagtccctcatcagctctcaggccagctcttatttcattgatgccgctacagtggacgactccggcgagtatcggtgtcagaccaatctgtctacactgtctgaccccgtgcagcttgaggtccacattggatggttgctcttgcaagccccacgctgggttttcaaagaggaagatccaatccatctgcggtgccacagctggaaaaacaccgctctccacaaagtcacatacctgcaaaatggcaaaggacgcaaatacttccatcacaattccgatttttacattccgaaggctaccctgaaagacagcggcagctatttctgccggggactcgtcggctccaagaatgtgtcctccgaaaccgtgaatatcacgattacccaaggactggctgtgcctacaatctctagcttctttccgcctggataccaagtctccttctgtcttgtgatggtcctcctgtttgctgtggacacaggactgtacttttccgtgaaa

SEQ ID NO: 1273 - DNA, 1464 bp, synthetic construct
  source 1..1464: mol_type = other DNA
atggccttaccagtgaccgccttgctcctgccgctggccttgctgctccacgccgccaggccgcaggtgcagctggttgaatctggtggcggagtggtgcagtctggcagaagcctgagactgtcttgtgccgccagcggcttcaccttcagaaactacggaatgcactgggtccgacaggcccctggcaaaggacttgaatgggtcgccgtgatttggtacgacggcagcgacaagtactacgccgattctgtgcggggcagattcaccatcagccgggacaacagcaagaacaccctgtacctccagatgaacagcctgagagccgaggacaccgccgtgtactactgtgccagagatggctacgacatcctgaccggcaatcccagagacttcgactattggggccagggcacactggtcacagtttctagcggcggaggcggaagtggaggcggaggatctggcggcggaggctctgataccgtgatgacccagacacctctgagcagccacgtgacacttggacagcctgccagcatcagctgtagaagcagccagagcctggtgcacagcgacggcaatacctacctgtcttggctccagcagaggccaggacagcctcctagactgctgatctaccggatcagcagacggttcagcggcgtgcccgatagattttctggaagcggagccggcaccgacttcaccctggaaatcagcagagtggaagccgaggatgtgggcgtctactactgtatgcagagcacccacgtgccacggacctttggacagggcaccaaggtggaaatcaagacgcgtggaatgaggactgaggatcttcccaaagctgtcgtctttctcgaaccccaatggtatcgggtgctcgaaaaagactctgtgacactgaaatgccaaggggcctactctcccgaggacaactccacacagtggtttcataatgagtccctcatcagctctcaggccagctcttatttcattgatgccgctacagtggacgactccggcgagtatcggtgtcagaccaatctgtctacactgtctgaccccgtgcagcttgaggtccacattggatggttgctcttgcaagccccacgctgggttttcaaagaggaagatccaatccatctgcggtgccacagctggaaaaacaccgctctccacaaagtcacatacctgcaaaatggcaaaggacgcaaatacttccatcacaattccgatttttacattccgaaggctaccctgaaagacagcggcagctatttctgccggggactcgtcggctccaagaatgtgtcctccgaaaccgtgaatatcacgattacccaaggactggctgtgcctacaatctctagcttctttccgcctggataccaagtctccttctgtcttgtgatggtcctcctgtttgctgtggacacaggactgtacttttccgtgaaa

SEQ ID NO: 1274 - DNA, 1443 bp, synthetic construct
  source 1..1443: mol_type = other DNA
atggccttaccagtgaccgccttgctcctgccgctggccttgctgctccacgccgccaggccggaggtgcagctggttgaatctggcggaggactggttcagcctggcggatctctgagactgtcttgtgccgccagcggcttcccattcagcagctacgatatgcactgggtccgacaggccacaggcaaaggactggaatgggtgtccgccatcggaacagccggcgctacctattatcccggctctgtgaagggcagattcaccatcagcagagagaacgccaagaacagcctgtacctccagatgaactccctgagagccggcgataccgccgtgtactattgtgccagaggcgactacgtgtggggcacctacagacccctgttcgattattggggccagggcaccctggtcacagtttctagtggcggaggcggaagtggaggcggaggatctggcggcggaggctctgatattcagctgactcagagccccagcttcctgtctgcctctgtgggcgacagagtgaccatcacatgttgggccagccagggcatcaacaactacctggcctggtatcagcagaagcccggcaaggctcctaagctgctgatctacgccgccagcacactgcaaacaggcgtgccaagcagattttccggctctggcagcggcaccgagttcaccctgacaatatctagcctccagcctgaggacttcgccacctactactgccagcagctgaacagctaccctctgacctttggaggcggcaccaaggtggaaatcaagacgcgtggaatgaggactgaggatcttcccaaagctgtcgtctttctcgaaccccaatggtatcgggtgctcgaaaaagactctgtgacactgaaatgccaaggggcctactctcccgaggacaactccacacagtggtttcataatgagtccctcatcagctctcaggccagctcttatttcattgatgccgctacagtggacgactccggcgagtatcggtgtcagaccaatctgtctacactgtctgaccccgtgcagcttgaggtccacattggatggttgctcttgcaagccccacgctgggttttcaaagaggaagatccaatccatctgcggtgccacagctggaaaaacaccgctctccacaaagtcacatacctgcaaaatggcaaaggacgcaaatacttccatcacaattccgatttttacattccgaaggctaccctgaaagacagcggcagctatttctgccggggactcgtcggctccaagaatgtgtcctccgaaaccgtgaatatcacgattacccaaggactggctgtgcctacaatctctagcttctttccgcctggataccaagtctccttctgtcttgtgatggtcctcctgtttgctgtggacacaggactgtacttttccgtgaaa

SEQ ID NO: 1275 - DNA, 1434 bp, synthetic construct
  source 1..1434: mol_type = other DNA
atggccttaccagtgaccgccttgctcctgccgctggccttgctgctccacgccgccaggccgcaggttcagctgcaagagtctggccctggcctggtcaagcctagcgaaacactgagcctgacctgtaccgtgtctggggccagcatcagcagcttctactggtcctggatcagacagcctcctggcaaaggactggaatggatcggctacatctactacagcggcaccaccaactacaaccccagcctgaagtccagagtgaccatcagcgtggacaccagcaagaaccagttctccctgaagctgagcagcgtgacagccgccgatacagccgtgtactactgtgccagaattgccgtggccggcttcttcttcgactattggggccagggcaccctggtcacagtttctagcggcggaggcggaagtggaggcggaggatctggcggcggaggctctgaaattgtgctgacacagagccccggcacactgtcactttctccaggcgaaagagccacactgagctgtagagccagccagagcgtgaacaagaactacctggcttggtatcagcagaagcccggacaggctcccagactgctgatctacggtgcctctagcagagccacaggcatccccgatagattttctggcagcggctccggcaccgacttcaccctgacaatcagcagactggaacccgaggacttcgccgtgtattattgccagcagtacgacagaagccctctgacctttggaggcggcaccaaggtggaaatcaagacgcgtggaatgaggactgaggatcttcccaaagctgtcgtctttctcgaaccccaatggtatcgggtgctcgaaaaagactctgtgacactgaaatgccaaggggcctactctcccgaggacaactccacacagtggtttcataatgagtccctcatcagctctcaggccagctcttatttcattgatgccgctacagtggacgactccggcgagtatcggtgtcagaccaatctgtctacactgtctgaccccgtgcagcttgaggtccacattggatggttgctcttgcaagccccacgctgggttttcaaagaggaagatccaatccatctgcggtgccacagctggaaaaacaccgctctccacaaagtcacatacctgcaaaatggcaaaggacgcaaatacttccatcacaattccgatttttacattccgaaggctaccctgaaagacagcggcagctatttctgccggggactcgtcggctccaagaatgtgtcctccgaaaccgtgaatatcacgattacccaaggactggctgtgcctacaatctctagcttctttccgcctggataccaagtctccttctgtcttgtgatggtcctcctgtttgctgtggacacaggactgtacttttccgtgaaa

SEQ ID NO: 1276 - DNA, 1461 bp, synthetic construct
  source 1..1461: mol_type = other DNA
atggccttaccagtgaccgccttgctcctgccgctggccttgctgctccacgccgccaggccgcaggttcagctggttcagtctggggccgaagtgaagaaacctggggcctctgtgaaggtgtcctgcaaggccagcggctacacctttaccaactactacatgcactgggtccgacaggcccctggactgggacttgagtggatgggcatcatcaaccctagcgacggcagcacaagctacgcccagaaattccagggcagagtgaccatgaccagagacaccagcaccaacaccgtgtacatggacctgagcagcctgagaagcgaggacaccgccgtgtactattgtgccagaggcggcaacagcgccttctacagctactacgacatggacgtgtggggccagggcaccacagtgacagtttctagcggcggaggcggaagtggaggcggaggatctggcggcggaggctctgatgtggtcatgacacagacccctctgagcctgcctgtgacacttggacagcctgccagcatcagctgtagatccagccagagcctggtgtacagagatggcaacacctacctgagctggttccagcagaggcctggacagtctcctcggcggctgatctacaaggtgtccaactggcagagcggcgtgcccgatagattttctggcggtggcagcggcaccgacttcaccctgaagatcagcagagtggaagccgaggacgtgggcgtgtactactgtatgcagggcacacactggcctccaacattcggccagggaacaaaggtggaaatcaagacgcgtggaatgaggactgaggatcttcccaaagctgtcgtctttctcgaaccccaatggtatcgggtgctcgaaaaagactctgtgacactgaaatgccaaggggcctactctcccgaggacaactccacacagtggtttcataatgagtccctcatcagctctcaggccagctcttatttcattgatgccgctacagtggacgactccggcgagtatcggtgtcagaccaatctgtctacactgtctgaccccgtgcagcttgaggtccacattggatggttgctcttgcaagccccacgctgggttttcaaagaggaagatccaatccatctgcggtgccacagctggaaaaacaccgctctccacaaagtcacatacctgcaaaatggcaaaggacgcaaatacttccatcacaattccgatttttacattccgaaggctaccctgaaagacagcggcagctatttctgccggggactcgtcggctccaagaatgtgtcctccgaaaccgtgaatatcacgattacccaaggactggctgtgcctacaatctctagcttctttccgcctggataccaagtctccttctgtcttgtgatggtcctcctgtttgctgtggacacaggactgtacttttccgtgaaa

SEQ ID NO: 1277 - DNA, 1422 bp, synthetic construct
  source 1..1422: mol_type = other DNA
atggccttaccagtgaccgccttgctcctgccgctggccttgctgctccacgccgccaggccgcaggttcagctccagcagtctggacctgagctggttaagcctggcgcttctgtgcggatctcttgcaaggccagcggctacaccttcaccacctactacatccactgggtcaagcagcggcctggacagggactcgaatggatcggctggatctaccccggcaacgtgaacaccaactacaacgagaagttcaagggcaaagccacactgaccgccgacaagagcagcagcacagcctacatgcagctgaccagcctgacctctgaggacagcgccgtgtacttttgtgccagaggcgtgtactacttcgactactggggccagggcaccatcctgacagtttctagcggcggaggcggaagtggaggcggaggatctggcggcggaggctctatcgtgatgacccagactcctaagttcctgctggtgtctgccggcgacagagtgaccatcacctgtaaagccagccagagcgtgaacaacgacgtgtcctggttccagcagaagcccggccaatctcctacactgctgatctactacgccagcaacagatacaccggcgtgcccgatagattcaccggctctggctacggcaccgacttcacctttaccatcagcaccgtgcaggccgaggacctggctgtgtacttctgccagcaagactacagcagcccttacacctttggaggcggcaccaagctggaaatcaagacgcgtggaatgaggactgaggatcttcccaaagctgtcgtctttctcgaaccccaatggtatcgggtgctcgaaaaagactctgtgacactgaaatgccaaggggcctactctcccgaggacaactccacacagtggtttcataatgagtccctcatcagctctcaggccagctcttatttcattgatgccgctacagtggacgactccggcgagtatcggtgtcagaccaatctgtctacactgtctgaccccgtgcagcttgaggtccacattggatggttgctcttgcaagccccacgctgggttttcaaagaggaagatccaatccatctgcggtgccacagctggaaaaacaccgctctccacaaagtcacatacctgcaaaatggcaaaggacgcaaatacttccatcacaattccgatttttacattccgaaggctaccctgaaagacagcggcagctatttctgccggggactcgtcggctccaagaatgtgtcctccgaaaccgtgaatatcacgattacccaaggactggctgtgcctacaatctctagcttctttccgcctggataccaagtctccttctgtcttgtgatggtcctcctgtttgctgtggacacaggactgtacttttccgtgaaa

SEQ ID NO: 1278 - DNA, 1431 bp, synthetic construct
  source 1..1431: mol_type = other DNA
atggccttaccagtgaccgccttgctcctgccgctggccttgctgctccacgccgccaggccgcaggttcagctgcaagagtctggccctggcctggtcaagcctagccaaacactgagcctgacctgtaccgtgtctggcggcagcatcaacaacaacaattactactggacctggatcagacagcaccccggcaaaggactggaatggatcggctacatctactacagcggcagcaccttctacaaccccagcctgaagtccagagtgaccatcagcgtggacaccagcaagacccagttctccctgaagctgagcagcgtgacagccgccgatacagccgtgtactactgcgccagagaagataccatgaccggcctggatgtgtggggccagggaacaacagtgacagtgtctagcggcggaggcggaagtggaggcggaggatctggcggcggaggctctgacattcagatgacacagagccctagcagcctgagcgcctctgtgggagacagagtgacaattacctgtcgggccagccagtctatcaacaactacctgaactggtatcagcagaagcccggcaaggcccctacactgctgatctatgccgccagctctctccagagcggagtgcctagcagattcagcggaagcagaagcggcaccgacttcaccctgacaatatccagcctccagcctgaggacttcgccgcctacttttgccagcagacctacagcaaccccacctttggccagggcaccaaggtggaagtgaagacgcgtggaatgaggactgaggatcttcccaaagctgtcgtctttctcgaaccccaatggtatcgggtgctcgaaaaagactctgtgacactgaaatgccaaggggcctactctcccgaggacaactccacacagtggtttcataatgagtccctcatcagctctcaggccagctcttatttcattgatgccgctacagtggacgactccggcgagtatcggtgtcagaccaatctgtctacactgtctgaccccgtgcagcttgaggtccacattggatggttgctcttgcaagccccacgctgggttttcaaagaggaagatccaatccatctgcggtgccacagctggaaaaacaccgctctccacaaagtcacatacctgcaaaatggcaaaggacgcaaatacttccatcacaattccgatttttacattccgaaggctaccctgaaagacagcggcagctatttctgccggggactcgtcggctccaagaatgtgtcctccgaaaccgtgaatatcacgattacccaaggactggctgtgcctacaatctctagcttctttccgcctggataccaagtctccttctgtcttgtgatggtcctcctgtttgctgtggacacaggactgtacttttccgtgaaa

SEQ ID NO: 1279 - DNA, 1446 bp, synthetic construct
  source 1..1446: mol_type = other DNA
atggccttaccagtgaccgccttgctcctgccgctggccttgctgctccacgccgccaggccgagctacgagctgacacagcctccaagcgtgtccgtgtctcctggacagacagccagcatcacctgtagcggcgataagctgggcgataagtacgccagctggtatcagcagaagcccggccagtctcctgtgctggtcatctaccaggacaacagaaggcccagcggcatccccgagagattcagcggcagcaatagcggcaataccgccacactgaccatcagcggcacccaggctatggacgaggccgactactattgccaggcttgggacagcgacacctacgtgttcggcaccggcaccaaagtgacagtgcttggacaaggcggaggcggaagtggaggcggaggatctggcggcggaggctctgaagttcagctggttcagagcggagccgaagtgaagaaacctggggcctctgtgaaggtgtcctgcaaggcttccggcgataccttcaagcggtactacgtgcactgggtccgacaggctccaggacaaggactggaatggatgggcatcatcaaccccagcggcgtgtccacaacatacgcccagaaattccagggcagagtgaccatgaccagagacaccagcacctccaccgtgtacatggaactgagcagcctgagaagcgaggacaccgccgtgtactactgtgctgaagtgcgcggcagcggcttcaactacttcggcatggatgtgtggggccagggcacactggttaccgtttcttctacgcgtggaatgaggactgaggatcttcccaaagctgtcgtctttctcgaaccccaatggtatcgggtgctcgaaaaagactctgtgacactgaaatgccaaggggcctactctcccgaggacaactccacacagtggtttcataatgagtccctcatcagctctcaggccagctcttatttcattgatgccgctacagtggacgactccggcgagtatcggtgtcagaccaatctgtctacactgtctgaccccgtgcagcttgaggtccacattggatggttgctcttgcaagccccacgctgggttttcaaagaggaagatccaatccatctgcggtgccacagctggaaaaacaccgctctccacaaagtcacatacctgcaaaatggcaaaggacgcaaatacttccatcacaattccgatttttacattccgaaggctaccctgaaagacagcggcagctatttctgccggggactcgtcggctccaagaatgtgtcctccgaaaccgtgaatatcacgattacccaaggactggctgtgcctacaatctctagcttctttccgcctggataccaagtctccttctgtcttgtgatggtcctcctgtttgctgtggacacaggactgtacttttccgtgaaa

SEQ ID NO: 1280 - DNA, 1443 bp, synthetic construct
  source 1..1443: mol_type = other DNA
atggccttaccagtgaccgccttgctcctgccgctggccttgctgctccacgccgccaggccggaggttcagctgcttgagtctggcggaggactggttcaacctggcggaagcctgagactgtcttgtgccgccagcggcttcacctttagcagctacgccatgagctgggtccgacaggctcctggcaaaggactggaagtggtggtgtctgccatttctggcggcggaggcagaacctactacgccgattctgtgaagggcagattcaccatcagccgggacaacagcaagaacaccctgtacctgcagatgaacagcctgagagccgaggacaccgccgtgtactactgtgccagagaagagatggccttccgggcctacagattcgacatctggggccagggaaccctggtcacagtttctagcggcggaggcggaagtggaggcggaggatctggcggcggaggctctgatattcagatgacacagagccccagcagcctgtctgcctctgtgggagacagagtgaccatcacctgtagagccagccagagcatcagcagctacctgaactggtatcagcagaagcccggcaaggcccctaaactgctgatctatgccgcctccagtctgcagagcggagtgcctagcagattttctggctctggcagcggcaccgacttcaccctgacaatatctagcctgcagcctgaggacttcgccacctactactgccagcagagctacatcacccctctgacattcggtggcggcaccaaggtggaaatcaagacgcgtggaatgaggactgaggatcttcccaaagctgtcgtctttctcgaaccccaatggtatcgggtgctcgaaaaagactctgtgacactgaaatgccaaggggcctactctcccgaggacaactccacacagtggtttcataatgagtccctcatcagctctcaggccagctcttatttcattgatgccgctacagtggacgactccggcgagtatcggtgtcagaccaatctgtctacactgtctgaccccgtgcagcttgaggtccacattggatggttgctcttgcaagccccacgctgggttttcaaagaggaagatccaatccatctgcggtgccacagctggaaaaacaccgctctccacaaagtcacatacctgcaaaatggcaaaggacgcaaatacttccatcacaattccgatttttacattccgaaggctaccctgaaagacagcggcagctatttctgccggggactcgtcggctccaagaatgtgtcctccgaaaccgtgaatatcacgattacccaaggactggctgtgcctacaatctctagcttctttccgcctggataccaagtctccttctgtcttgtgatggtcctcctgtttgctgtggacacaggactgtacttttccgtgaaa

SEQ ID NO: 1281 - DNA, 1467 bp, synthetic construct
  source 1..1467: mol_type = other DNA
atggccttaccagtgaccgccttgctcctgccgctggccttgctgctccacgccgccaggccggacatcgtgctgacacagagccctgcttctctggccgtgtctcttggacagggcgctaccatcagctgtagagccagcaagagcgtgtccaccagcggctacacctacatgcactggtatcagcagaagcccggccagcctcctaagctgctgatctacctggcctccaacctggaaagcggagtgcctgccagattttctggcagcggctctggcaccgacttcaccctgaatatccatcctgtggaagaagaggacgccgccacctactactgtcagcactctggcgaactgccacctagctttggcggaggcaccaagctggaaatcaagagagctggcggaggcggaagtggaggcggaggatctggcggcggaggctctgaagtgcagctggtggaatctggcggcgaccttgtgaaacctggcggctctctgaagctgagctgtgccgtgtccggcttcacctttagcagctacggcatgagctgggtccgacagacccctgacaagagactggaatgggtcgccacagtgtctagcggcggcacctacacatattaccccgacagcgtgaagggcagattcaccatcagccgggacaacgccaagaacaccctgtacctccagatgagcagcctgaagtccgaggacagcgccatgtactactgcgccagacaccggggcaattactacgccacctattattacgctatggactactggggccagggcaccagcgtgacagtttcttctacgcgtggaatgaggactgaggatcttcccaaagctgtcgtctttctcgaaccccaatggtatcgggtgctcgaaaaagactctgtgacactgaaatgccaaggggcctactctcccgaggacaactccacacagtggtttcataatgagtccctcatcagctctcaggccagctcttatttcattgatgccgctacagtggacgactccggcgagtatcggtgtcagaccaatctgtctacactgtctgaccccgtgcagcttgaggtccacattggatggttgctcttgcaagccccacgctgggttttcaaagaggaagatccaatccatctgcggtgccacagctggaaaaacaccgctctccacaaagtcacatacctgcaaaatggcaaaggacgcaaatacttccatcacaattccgatttttacattccgaaggctaccctgaaagacagcggcagctatttctgccggggactcgtcggctccaagaatgtgtcctccgaaaccgtgaatatcacgattacccaaggactggctgtgcctacaatctctagcttctttccgcctggataccaagtctccttctgtcttgtgatggtcctcctgtttgctgtggacacaggactgtacttttccgtgaaa

SEQ ID NO: 1282 - DNA, 1449 bp, synthetic construct
  source 1..1449: mol_type = other DNA
atggccttaccagtgaccgccttgctcctgccgctggccttgctgctccacgccgccaggccggacatccagatgacacagagccctagcagcctgtctgccagcgtgggagacagagtgaccatcacatgtagcgccagccagggcatcagaaactacctgaactggtatcagcagaaacccggcaaggtgcccaagctgctgatctactacaccagcagactgcacagcggcgtgcccagcagattttctggctctggcagcggcaccgacttcaccctgacaatatctagcctccagcctgaggacgtggcaacctactactgtcagcagtacggcaagctgccctacacattcggccagggcaccaagctggaaatcaagagaacagtggctgccggcggaggcggaagtggaggcggaggatctggcggcggaggctctgaagttcagctggttgaatcaggcggcggactggttcaacctggcggatctctgagactgagctgtgccgccagcggcttcacattttccgacgcctggatggactgggtccgacaggctcctggaaaaggactggaatgggtcggagagatccggtccaaagtgaacaaccacgaaacctactatgccgagagcgtgaagggcagattcaccatcagccgggacgacagcaagaacagcctgtacctccagatgaactccctgaaaaccgaggacaccgccgtgtactactgcgccagaaacgactacttcgactactggggccagggaaccaccgtgacagtgtctagtgcttccacgcgtggaatgaggactgaggatcttcccaaagctgtcgtctttctcgaaccccaatggtatcgggtgctcgaaaaagactctgtgacactgaaatgccaaggggcctactctcccgaggacaactccacacagtggtttcataatgagtccctcatcagctctcaggccagctcttatttcattgatgccgctacagtggacgactccggcgagtatcggtgtcagaccaatctgtctacactgtctgaccccgtgcagcttgaggtccacattggatggttgctcttgcaagccccacgctgggttttcaaagaggaagatccaatccatctgcggtgccacagctggaaaaacaccgctctccacaaagtcacatacctgcaaaatggcaaaggacgcaaatacttccatcacaattccgatttttacattccgaaggctaccctgaaagacagcggcagctatttctgccggggactcgtcggctccaagaatgtgtcctccgaaaccgtgaatatcacgattacccaaggactggctgtgcctacaatctctagcttctttccgcctggataccaagtctccttctgtcttgtgatggtcctcctgtttgctgtggacacaggactgtacttttccgtgaaa

SEQ ID NO: 1283 - DNA, 1473 bp, synthetic construct
  source 1..1473: mol_type = other DNA
atggccttaccagtgaccgccttgctcctgccgctggccttgctgctccacgccgccaggccggaggttcagctgcaagagtctggggccgaagtgaagaaacctggcagcagcgtgaaggtgtcctgcaaggccagcggcttcaacatcaaggacacctacatgcactgggtccgacaggcccctggacaaggacttgagtggatgggcagaatcgaccccgccaacggcaacagcaaatacgtgcccaagttccagggcagagtgaccatcacagccgacgagagcacaagcaccgcctacatggaactgagcagcctgagaagcgaggacaccgccgtgtactactgtgcccctttcggctactacgtgtccgactacgccatggcctattggggccagggaaccaccgtgacagtgtctagtgcatctggcggaggcggaagtggaggcggaggatctggcggcggaggctctgacatcgtgatgacacagagccccgatagcctggccgtgtctctgggagaaagagccaccatcaactgtagagccggcgagagcgtggacatcttcggcgtgggatttctgcactggtatcagcagaagcccggccagcctcctaagctgctgatctacagagccagcaacctggaaagcggcgtgcccgatagattttctggcagcggctctggcaccgacttcaccctgacaatcagacctctccaggccgaggatgtggccgtgtattattgccagcagaccaacgaggacccctacacatttggacagggcaccaagctggaaatcaagagaacagtggccgccacgcgtggaatgaggactgaggatcttcccaaagctgtcgtctttctcgaaccccaatggtatcgggtgctcgaaaaagactctgtgacactgaaatgccaaggggcctactctcccgaggacaactccacacagtggtttcataatgagtccctcatcagctctcaggccagctcttatttcattgatgccgctacagtggacgactccggcgagtatcggtgtcagaccaatctgtctacactgtctgaccccgtgcagcttgaggtccacattggatggttgctcttgcaagccccacgctgggttttcaaagaggaagatccaatccatctgcggtgccacagctggaaaaacaccgctctccacaaagtcacatacctgcaaaatggcaaaggacgcaaatacttccatcacaattccgatttttacattccgaaggctaccctgaaagacagcggcagctatttctgccggggactcgtcggctccaagaatgtgtcctccgaaaccgtgaatatcacgattacccaaggactggctgtgcctacaatctctagcttctttccgcctggataccaagtctccttctgtcttgtgatggtcctcctgtttgctgtggacacaggactgtacttttccgtgaaa

SEQ ID NO: 1284 - DNA, 1452 bp, synthetic construct
  source 1..1452: mol_type = other DNA
atggccttaccagtgaccgccttgctcctgccgctggccttgctgctccacgccgccaggccgcaagttcagctggttcagtctggggccgaagtgaagaaacctggcagcagcgtgaaggtgtcctgcaaagcaagcggcggcacctttagcagctacgccatctcttgggtccgacaggcaccaggacaaggactggaatggatgggcctgattatccccagatacggcaaggccagatacgcccagaaattccagggcagagtgaccatcaccgccgacgagtctacaagcaccgcctacatggaactgagcagcctgagaagcgaggacacagccgtgtattattgcgcccggaactggccctactactacatggatttttggggccagggaaccctggtcaccgtgtctagtgcatctggcggaggcggaagtggaggcggaggatctggcggcggaggctctgacatcgtgctgacacagtctcccgccacactgtcactgtctccaggcgaaagagccacactgagctgtagagccagccagaacatcgtgttcaacctggcctggtatcagcagaagcctggacaggctccccggctgctgatctacgatgccagcaatagagccaccggcgtgcccgccagattttctggttctggcagcggcaccgacttcaccctgaccatatctagcctggaacctgaggacttcgccgtgtactactgccagcagaaaaagtccatgcctctgaccttcggccagggcaccaaggtggaaatcaagagaacagtggctgccacgcgtggaatgaggactgaggatcttcccaaagctgtcgtctttctcgaaccccaatggtatcgggtgctcgaaaaagactctgtgacactgaaatgccaaggggcctactctcccgaggacaactccacacagtggtttcataatgagtccctcatcagctctcaggccagctcttatttcattgatgccgctacagtggacgactccggcgagtatcggtgtcagaccaatctgtctacactgtctgaccccgtgcagcttgaggtccacattggatggttgctcttgcaagccccacgctgggttttcaaagaggaagatccaatccatctgcggtgccacagctggaaaaacaccgctctccacaaagtcacatacctgcaaaatggcaaaggacgcaaatacttccatcacaattccgatttttacattccgaaggctaccctgaaagacagcggcagctatttctgccggggactcgtcggctccaagaatgtgtcctccgaaaccgtgaatatcacgattacccaaggactggctgtgcctacaatctctagcttctttccgcctggataccaagtctccttctgtcttgtgatggtcctcctgtttgctgtggacacaggactgtacttttccgtgaaa

SEQ ID NO: 1285 - DNA, 1461 bp, synthetic construct
  source 1..1461: mol_type = other DNA
atggccttaccagtgaccgccttgctcctgccgctggccttgctgctccacgccgccaggccggaggtgcagctggttgaatctggcggcggacttgtgaagcctggcggatctctgagactgagctgtgccgccagcggcttcacctttagcaatgcctggatgagctgggtccgacaggcccctggaaaaggactggaatgggtcggacggatcaagagcaagaccgaaggcggcaccaccgattatgctgcccctgtgaagggcagattcaccatcagcagggacgacagcaagaacaccctgtacctccagatgaacagcctgaaaaccgaggacaccgccgtgtactactgcaccacaccttacgagtggtcttggtacgactactggggccagggcacactggtcacagtgtcatctgcatctggcggaggcggaagtggaggcggaggatctggcggcggaggctctcagacagtggtcacccaagagcctagcctgacagtgtctcctggcggaaccgtgacactgacatgtggcagttctaccggcgctgtgaccaccagcaattacgccaactgggtgcagcagaagccaggccaagctcctagaggactgatcggcggcacaaacaagagagcccctggcacaccagccagattttctggctctctgctcggcggaaaggccgctcttacactgtctggtgtccagcctgaggacgaggccgagtattattgcgccctgtggtacagcaacctgtgggttttcggcggaggcaccaagctgacagtgctgactgttgctgctacgcgtggaatgaggactgaggatcttcccaaagctgtcgtctttctcgaaccccaatggtatcgggtgctcgaaaaagactctgtgacactgaaatgccaaggggcctactctcccgaggacaactccacacagtggtttcataatgagtccctcatcagctctcaggccagctcttatttcattgatgccgctacagtggacgactccggcgagtatcggtgtcagaccaatctgtctacactgtctgaccccgtgcagcttgaggtccacattggatggttgctcttgcaagccccacgctgggttttcaaagaggaagatccaatccatctgcggtgccacagctggaaaaacaccgctctccacaaagtcacatacctgcaaaatggcaaaggacgcaaatacttccatcacaattccgatttttacattccgaaggctaccctgaaagacagcggcagctatttctgccggggactcgtcggctccaagaatgtgtcctccgaaaccgtgaatatcacgattacccaaggactggctgtgcctacaatctctagcttctttccgcctggataccaagtctccttctgtcttgtgatggtcctcctgtttgctgtggacacaggactgtacttttccgtgaaa

SEQ ID NO: 1286 - DNA, 1461 bp, synthetic construct
  source 1..1461: mol_type = other DNA
atggccttaccagtgaccgccttgctcctgccgctggccttgctgctccacgccgccaggccgcaggttcagctggttcagtctggggccgaagtgaagaaacctggggcctctgtgaaggtgtcctgcaaggcttccggctacacctttaccagctactacatgcactgggtccgacaggcccctggacaaggacttgagtggatgggcatcatcaaccctagcggcggcagcacaagctacgcccagaaattccagggcagagtgaccatgacacacgacaccagcacctccaccgtgtacatggaactgagcagcctgagaagcgaggacaccgccgtgtactactgcgccagatccttcttcaccggcttccacctggattactggggccagggaacactggtcacagtgtcatctgcatctggcggaggcggaagtggaggcggaggatctggcggcggaggctctgaaattgtgctgacacagagccccggcacactgtcactttctccaggcgaaagagccacactgagctgtagagccagccagagcgtgtccagctcttacctggcttggtatcagcagaagcccggccaggctcctagactgctgatctacggtgccagcagcagagccacaggcatccccgatagattttctggcagcggctccggcaccgacttcaccctgacaatcagcagactggaacccgaggactttgccgtgtattattgccagcagtacaccaacgagcactactacaccttcggccagggcaccaaggtggaaatcaagagaacagtggccgccacgcgtggaatgaggactgaggatcttcccaaagctgtcgtctttctcgaaccccaatggtatcgggtgctcgaaaaagactctgtgacactgaaatgccaaggggcctactctcccgaggacaactccacacagtggtttcataatgagtccctcatcagctctcaggccagctcttatttcattgatgccgctacagtggacgactccggcgagtatcggtgtcagaccaatctgtctacactgtctgaccccgtgcagcttgaggtccacattggatggttgctcttgcaagccccacgctgggttttcaaagaggaagatccaatccatctgcggtgccacagctggaaaaacaccgctctccacaaagtcacatacctgcaaaatggcaaaggacgcaaatacttccatcacaattccgatttttacattccgaaggctaccctgaaagacagcggcagctatttctgccggggactcgtcggctccaagaatgtgtcctccgaaaccgtgaatatcacgattacccaaggactggctgtgcctacaatctctagcttctttccgcctggataccaagtctccttctgtcttgtgatggtcctcctgtttgctgtggacacaggactgtacttttccgtgaaa

SEQ ID NO: 1287 - DNA, 1479 bp, synthetic construct
  source 1..1479: mol_type = other DNA
atggccttaccagtgaccgccttgctcctgccgctggccttgctgctccacgccgccaggccggagatcgtgctgacacagtctcccgccacactgtcactgtctccaggcgaaagagccacactgagctgtagcgtgtccagcagcatcagcagcagcaacctgcactggtatcagcagaagcctggacaggcccctcggctgctgatctacggcacatctaatctggcctctggcatccccgccagattttctggctctggaagcggcaccgacttcaccctgaccataagcagcctggaacctgaggacttcgccgtgtactactgccagcagtggtccagctatccccacacatttggcggaggcaccaaggtggaaatcaagagaacagtggctgccggcggaggcggaagtggaggcggaggatctggcggcggaggctctcaggttcagctggttcagagcggagccgaagtgaagaaacctggggcctctgtgaaggtgtcctgcaaggcttccggctacacctttaccaactacctgatcgagtgggtccgacaggctccaggacaaggactggaatggatgggcctgattaaccctggcagcggcggcaccaactacaacgagaagttcaagggcagagtgaccatgaccaccgacaccagcacaagcaccgcctacatggaactgcggagcctgagaagcgacgacaccgccgtgtattattgcgccagaagaagccctctcggctcttggatctactacgcctatgacggcgtggcctattggggccagggaacactggttacagtgtcctctgccagcacgcgtggaatgaggactgaggatcttcccaaagctgtcgtctttctcgaaccccaatggtatcgggtgctcgaaaaagactctgtgacactgaaatgccaaggggcctactctcccgaggacaactccacacagtggtttcataatgagtccctcatcagctctcaggccagctcttatttcattgatgccgctacagtggacgactccggcgagtatcggtgtcagaccaatctgtctacactgtctgaccccgtgcagcttgaggtccacattggatggttgctcttgcaagccccacgctgggttttcaaagaggaagatccaatccatctgcggtgccacagctggaaaaacaccgctctccacaaagtcacatacctgcaaaatggcaaaggacgcaaatacttccatcacaattccgatttttacattccgaaggctaccctgaaagacagcggcagctatttctgccggggactcgtcggctccaagaatgtgtcctccgaaaccgtgaatatcacgattacccaaggactggctgtgcctacaatctctagcttctttccgcctggataccaagtctccttctgtcttgtgatggtcctcctgtttgctgtggacacaggactgtacttttccgtgaaa

SEQ ID NO: 1288 - DNA, 1434 bp, synthetic construct
  source 1..1434: mol_type = other DNA
atggccttaccagtgaccgccttgctcctgccgctggccttgctgctccacgccgccaggccggacatccagatgacacagagccctagcagcctgtctgccagcgtgggagacagagtgaccatcacctgtaaagccggccagaacgtgggcacaagcgtggcatggtatcagcagaagcctggcaaggcccctaagctgctgatctacagcgccagctacagatacagcggcgtgcccagcagattttctggcagcggctctggcaccgacttcaccctgacaatatccagcctccagcctgaggacttcgccacctactactgccagcagtacatcacatacccctacaccttcggccagggcaccaaggtggaaatcaagagaacagtggctgccggcggaggcggaagtggaggcggaggatctggcggcggaggctctgaagttcagctggttgaatcaggcggcggactggttcaacctggcggatctctgagactgagctgtgccgccagcggcttcaccttcagcagatactggatgagctgggtccgacaggcccctggcaaaggacttgaatgggtcgccgagatcaaccccgacagcagcaccatccagtacaccccatctctgaaggcccggttcaccctgtccgtggacagaagcaagaacaccctgtacctccagatgaactccctgagagccgaggacaccgccgtgtactattgtgccagacctgcctattggggccagggaacactggtcacagtgtctagcgcttccacgcgtggaatgaggactgaggatcttcccaaagctgtcgtctttctcgaaccccaatggtatcgggtgctcgaaaaagactctgtgacactgaaatgccaaggggcctactctcccgaggacaactccacacagtggtttcataatgagtccctcatcagctctcaggccagctcttatttcattgatgccgctacagtggacgactccggcgagtatcggtgtcagaccaatctgtctacactgtctgaccccgtgcagcttgaggtccacattggatggttgctcttgcaagccccacgctgggttttcaaagaggaagatccaatccatctgcggtgccacagctggaaaaacaccgctctccacaaagtcacatacctgcaaaatggcaaaggacgcaaatacttccatcacaattccgatttttacattccgaaggctaccctgaaagacagcggcagctatttctgccggggactcgtcggctccaagaatgtgtcctccgaaaccgtgaatatcacgattacccaaggactggctgtgcctacaatctctagcttctttccgcctggataccaagtctccttctgtcttgtgatggtcctcctgtttgctgtggacacaggactgtacttttccgtgaaa

SEQ ID NO: 1289 - DNA, 1455 bp, synthetic construct
  source 1..1455: mol_type = other DNA
atggccttaccagtgaccgccttgctcctgccgctggccttgctgctccacgccgccaggccggacatccagatgacacagagccctagcagcctgtctgccagcgtgggagacagagtgaccatcacatgtagcgccagccaggacatcggcaactttctgaactggtatcagcagaagcccggcaaggcccctaagctgctgatctactacacctccagcctgtacagcggcgtgcccagcagattttctggcagcggctctggcaccgacttcaccctgacaatatccagcctccagccagaggacttcgccacctactactgccagcagtacagcaagctgcccctgacctttggacagggcaccaagctggaaatcaagagaacagtggctgccggcggaggcggaagtggaggcggaggatctggcggcggaggctctcaagttcagctggttcagtctggggccgaagtgaagaaacctggggcctctgtgaaggtgtcctgcaaggcttccggctacacctttaccggctacaacatccactgggtccgacaggctcccggccaaagacttgaatggatgggcgctatctaccccggcaacggcgataccagctacaagcagaaattccggggcagagtgacaattaccagagacaccagcgccagcaccgcctacatggaactgtctagcctgagaagcgaggacaccgccgtgtactattgcgccagaggcgaaacagccagagccacctttgcctattggggccagggaaccctggtcacagtgtctagtgcttccacgcgtggaatgaggactgaggatcttcccaaagctgtcgtctttctcgaaccccaatggtatcgggtgctcgaaaaagactctgtgacactgaaatgccaaggggcctactctcccgaggacaactccacacagtggtttcataatgagtccctcatcagctctcaggccagctcttatttcattgatgccgctacagtggacgactccggcgagtatcggtgtcagaccaatctgtctacactgtctgaccccgtgcagcttgaggtccacattggatggttgctcttgcaagccccacgctgggttttcaaagaggaagatccaatccatctgcggtgccacagctggaaaaacaccgctctccacaaagtcacatacctgcaaaatggcaaaggacgcaaatacttccatcacaattccgatttttacattccgaaggctaccctgaaagacagcggcagctatttctgccggggactcgtcggctccaagaatgtgtcctccgaaaccgtgaatatcacgattacccaaggactggctgtgcctacaatctctagcttctttccgcctggataccaagtctccttctgtcttgtgatggtcctcctgtttgctgtggacacaggactgtacttttccgtgaaa

SEQ ID NO: 1290 - DNA, 1047 bp, synthetic construct
  source 1..1047: mol_type = other DNA
atggccttaccagtgaccgccttgctcctgccgctggccttgctgctccacgccgccaggccggatgtgcaagtgacacagagccctagcagcctgtctgcctctgtgggcgacagagtgacaatcacctgtcggagcagccagagcctggctaactcctacggcaataccttcctgagctggtatctgcacaagcccggaaaggctccccagctgctgatctacggcatcagcaacagattcagcggcgtgcccgataggtttagcggctctggaagcggcaccgacttcaccctgacaatatccagcctccagcctgaggactttgccacctactactgtctgcaaggcacccaccagccttacacattcggacagggcaccaaggtggaaatcaagacgcgtggaatgaggactgaggatcttcccaaagctgtcgtctttctcgaaccccaatggtatcgggtgctcgaaaaagactctgtgacactgaaatgccaaggggcctactctcccgaggacaactccacacagtggtttcataatgagtccctcatcagctctcaggccagctcttatttcattgatgccgctacagtggacgactccggcgagtatcggtgtcagaccaatctgtctacactgtctgaccccgtgcagcttgaggtccacattggatggttgctcttgcaagccccacgctgggttttcaaagaggaagatccaatccatctgcggtgccacagctggaaaaacaccgctctccacaaagtcacatacctgcaaaatggcaaaggacgcaaatacttccatcacaattccgatttttacattccgaaggctaccctgaaagacagcggcagctatttctgccggggactcgtcggctccaagaatgtgtcctccgaaaccgtgaatatcacgattacccaaggactggctgtgcctacaatctctagcttctttccgcctggataccaagtctccttctgtcttgtgatggtcctcctgtttgctgtggacacaggactgtacttttccgtgaaa

SEQ ID NO: 1291 - DNA, 1032 bp, synthetic construct
  source 1..1032: mol_type = other DNA
atggccttaccagtgaccgccttgctcctgccgctggccttgctgctccacgccgccaggccggacatccagatgacacagagccctagcagcctgtctgccagcgtgggagacagagtgaccatcacctgtagagccagccaggacatcagcaactacctgaactggtatcagcagaaacccggcaaggccgtgaagctgctgatctactacaccagcatcctgcacagcggcgtgcccagcagattttctggctctggcagcggcaccgactacaccctgacaatatctagcctccagcctgaggacttcgctacctacttctgccagcaaggcaacaccctgccttggacatttggcggaggcaccaaggtggaaatcaaaacgcgtggaatgaggactgaggatcttcccaaagctgtcgtctttctcgaaccccaatggtatcgggtgctcgaaaaagactctgtgacactgaaatgccaaggggcctactctcccgaggacaactccacacagtggtttcataatgagtccctcatcagctctcaggccagctcttatttcattgatgccgctacagtggacgactccggcgagtatcggtgtcagaccaatctgtctacactgtctgaccccgtgcagcttgaggtccacattggatggttgctcttgcaagccccacgctgggttttcaaagaggaagatccaatccatctgcggtgccacagctggaaaaacaccgctctccacaaagtcacatacctgcaaaatggcaaaggacgcaaatacttccatcacaattccgatttttacattccgaaggctaccctgaaagacagcggcagctatttctgccggggactcgtcggctccaagaatgtgtcctccgaaaccgtgaatatcacgattacccaaggactggctgtgcctacaatctctagcttctttccgcctggataccaagtctccttctgtcttgtgatggtcctcctgtttgctgtggacacaggactgtacttttccgtgaaa

SEQ ID NO: 1292 - DNA, 1035 bp, synthetic construct
  source 1..1035: mol_type = other DNA
atggccttaccagtgaccgccttgctcctgccgctggccttgctgctccacgccgccaggccggacatcgtgatgacccagagccagcggttcatgaccacaagcgtgggcgatagagtgtccgtgacatgcaaggccagccagagcgtggactctaacgtggcctggtatcagcagaagcccagacagagccccaaggctctgatctttagcgccagcctgagattcagcggagtgcccgctagattcacaggcagcggctctggcaccgatttcaccctgaccatcagcaacctccagagcgaggacctggccgagtatttctgccagcagtacaacaactaccctctgaccttcggagccggcaccaagctggaactgaagagaacgcgtggaatgaggactgaggatcttcccaaagctgtcgtctttctcgaaccccaatggtatcgggtgctcgaaaaagactctgtgacactgaaatgccaaggggcctactctcccgaggacaactccacacagtggtttcataatgagtccctcatcagctctcaggccagctcttatttcattgatgccgctacagtggacgactccggcgagtatcggtgtcagaccaatctgtctacactgtctgaccccgtgcagcttgaggtccacattggatggttgctcttgcaagccccacgctgggttttcaaagaggaagatccaatccatctgcggtgccacagctggaaaaacaccgctctccacaaagtcacatacctgcaaaatggcaaaggacgcaaatacttccatcacaattccgatttttacattccgaaggctaccctgaaagacagcggcagctatttctgccggggactcgtcggctccaagaatgtgtcctccgaaaccgtgaatatcacgattacccaaggactggctgtgcctacaatctctagcttctttccgcctggataccaagtctccttctgtcttgtgatggtcctcctgtttgctgtggacacaggactgtacttttccgtgaaa

SEQ ID NO: 1293 - DNA, 1035 bp, synthetic construct
  source 1..1035: mol_type = other DNA
atggccttaccagtgaccgccttgctcctgccgctggccttgctgctccacgccgccaggccggacatccagatgacacagagccctagcagcctgtctgccagcgtgggagacagagtgaccatcacctgtagagccagccaggacatcagcaactacctgaactggtatcagcagaagcccggcaaggcccctaagctgctgatctactacaccagcatcctgcacagcggcgtgcccagcagattttctggctctggcagcggcaccgacttcaccctgacaatatctagcctccagcctgaggacttcgccacctactattgccagcagggcaacaccctgccttggacctttggacagggcaccaaggtggaaatcaagagaacgcgtggaatgaggactgaggatcttcccaaagctgtcgtctttctcgaaccccaatggtatcgggtgctcgaaaaagactctgtgacactgaaatgccaaggggcctactctcccgaggacaactccacacagtggtttcataatgagtccctcatcagctctcaggccagctcttatttcattgatgccgctacagtggacgactccggcgagtatcggtgtcagaccaatctgtctacactgtctgaccccgtgcagcttgaggtccacattggatggttgctcttgcaagccccacgctgggttttcaaagaggaagatccaatccatctgcggtgccacagctggaaaaacaccgctctccacaaagtcacatacctgcaaaatggcaaaggacgcaaatacttccatcacaattccgatttttacattccgaaggctaccctgaaagacagcggcagctatttctgccggggactcgtcggctccaagaatgtgtcctccgaaaccgtgaatatcacgattacccaaggactggctgtgcctacaatctctagcttctttccgcctggataccaagtctccttctgtcttgtgatggtcctcctgtttgctgtggacacaggactgtacttttccgtgaaa

SEQ ID NO: 1294 - DNA, 1035 bp, synthetic construct
  source 1..1035: mol_type = other DNA
atggccttaccagtgaccgccttgctcctgccgctggccttgctgctccacgccgccaggccggacatccagatgacacagagccctagcagcctgtctgccagcgtgggagacagagtgaccatcacatgcaaggccagcgaccacatcaacaactggctggcctggtatcagcagaagcctggcaaggcccctaagctgctgatctacggcgctaccacactggaaacaggcgtgcccagcagattttctggcagcggctctggcaccgacttcaccctgacaatatccagcctccagcctgaggacttcgccacctactactgtcagcagagctggaacaccccttggacattcggccagggcaccaaggtggaaatcaagagaacgcgtggaatgaggactgaggatcttcccaaagctgtcgtctttctcgaaccccaatggtatcgggtgctcgaaaaagactctgtgacactgaaatgccaaggggcctactctcccgaggacaactccacacagtggtttcataatgagtccctcatcagctctcaggccagctcttatttcattgatgccgctacagtggacgactccggcgagtatcggtgtcagaccaatctgtctacactgtctgaccccgtgcagcttgaggtccacattggatggttgctcttgcaagccccacgctgggttttcaaagaggaagatccaatccatctgcggtgccacagctggaaaaacaccgctctccacaaagtcacatacctgcaaaatggcaaaggacgcaaatacttccatcacaattccgatttttacattccgaaggctaccctgaaagacagcggcagctatttctgccggggactcgtcggctccaagaatgtgtcctccgaaaccgtgaatatcacgattacccaaggactggctgtgcctacaatctctagcttctttccgcctggataccaagtctccttctgtcttgtgatggtcctcctgtttgctgtggacacaggactgtacttttccgtgaaa

SEQ ID NO: 1295 - DNA, 1035 bp, synthetic construct
  source 1..1035: mol_type = other DNA
atggccttaccagtgaccgccttgctcctgccgctggccttgctgctccacgccgccaggccgagctacgtgctgacacagcctccatccgtgtctgtggctccaggacagaccgccagaatcacatgcggcggcaacaacatcggcagcaagagcgtgcactggtatcagcagccacctggacaggctccagtggtggtggtgtacgacgacagcgatagacctagcggcatccccgagagattcagcggcagcaattccggcaataccgccacactgaccatcagcagagtggaagctggcgacgaggccgtgtactactgccaagtgtgggacagcagcagcgatcacgtggtgtttggcggcggaacaaagctgacagtgcttacgcgtggaatgaggactgaggatcttcccaaagctgtcgtctttctcgaaccccaatggtatcgggtgctcgaaaaagactctgtgacactgaaatgccaaggggcctactctcccgaggacaactccacacagtggtttcataatgagtccctcatcagctctcaggccagctcttatttcattgatgccgctacagtggacgactccggcgagtatcggtgtcagaccaatctgtctacactgtctgaccccgtgcagcttgaggtccacattggatggttgctcttgcaagccccacgctgggttttcaaagaggaagatccaatccatctgcggtgccacagctggaaaaacaccgctctccacaaagtcacatacctgcaaaatggcaaaggacgcaaatacttccatcacaattccgatttttacattccgaaggctaccctgaaagacagcggcagctatttctgccggggactcgtcggctccaagaatgtgtcctccgaaaccgtgaatatcacgattacccaaggactggctgtgcctacaatctctagcttctttccgcctggataccaagtctccttctgtcttgtgatggtcctcctgtttgctgtggacacaggactgtacttttccgtgaaa

SEQ ID NO: 1296 - DNA, 1035 bp, synthetic construct
  source 1..1035: mol_type = other DNA
atggccttaccagtgaccgccttgctcctgccgctggccttgctgctccacgccgccaggccggacatccagatgacacagagccctagcagcctgtctgccagcgtgggagacagagtgaccatcacctgtatggcctccgaggacatctacatccggctggcctggtatcagcagaagcctggaaaggcccctaagctgctgatctacgccgccacctctctggaaacaggcgtgccaagcagattttccggcagcggctctggcaccgatttcaccctgaccataagcagcctgcagcctgaggacttcgccacctactactgccagcagtattggagcagcccctggacctttggacagggcaccaaggtggaaatcaagagaacgcgtggaatgaggactgaggatcttcccaaagctgtcgtctttctcgaaccccaatggtatcgggtgctcgaaaaagactctgtgacactgaaatgccaaggggcctactctcccgaggacaactccacacagtggtttcataatgagtccctcatcagctctcaggccagctcttatttcattgatgccgctacagtggacgactccggcgagtatcggtgtcagaccaatctgtctacactgtctgaccccgtgcagcttgaggtccacattggatggttgctcttgcaagccccacgctgggttttcaaagaggaagatccaatccatctgcggtgccacagctggaaaaacaccgctctccacaaagtcacatacctgcaaaatggcaaaggacgcaaatacttccatcacaattccgatttttacattccgaaggctaccctgaaagacagcggcagctatttctgccggggactcgtcggctccaagaatgtgtcctccgaaaccgtgaatatcacgattacccaaggactggctgtgcctacaatctctagcttctttccgcctggataccaagtctccttctgtcttgtgatggtcctcctgtttgctgtggacacaggactgtacttttccgtgaaa

SEQ ID NO: 1297 - DNA, 1047 bp, synthetic construct
  source 1..1047: mol_type = other DNA
atggccttaccagtgaccgccttgctcctgccgctggccttgctgctccacgccgccaggccggacatccagatgacacagagccctagcagcgtgtccgcctctgtgggagacagagtgaccatcacctgtagagccagcgagagcgtggacaactacggcatcagcttcatgaactggtatcagcagaagcccggcaaggcccctaagctgctgattagcgccgccagcaatagagccacaggcgtgccaagcagattttccggctctggcagcggcaccgatttcaccctgacaatatccagcctccagcctgaggacttcgccatctactactgccagcagagcaaagaggtgccctggacctttggacagggcaccaaggtggaaatcaagagaacgcgtggaatgaggactgaggatcttcccaaagctgtcgtctttctcgaaccccaatggtatcgggtgctcgaaaaagactctgtgacactgaaatgccaaggggcctactctcccgaggacaactccacacagtggtttcataatgagtccctcatcagctctcaggccagctcttatttcattgatgccgctacagtggacgactccggcgagtatcggtgtcagaccaatctgtctacactgtctgaccccgtgcagcttgaggtccacattggatggttgctcttgcaagccccacgctgggttttcaaagaggaagatccaatccatctgcggtgccacagctggaaaaacaccgctctccacaaagtcacatacctgcaaaatggcaaaggacgcaaatacttccatcacaattccgatttttacattccgaaggctaccctgaaagacagcggcagctatttctgccggggactcgtcggctccaagaatgtgtcctccgaaaccgtgaatatcacgattacccaaggactggctgtgcctacaatctctagcttctttccgcctggataccaagtctccttctgtcttgtgatggtcctcctgtttgctgtggacacaggactgtacttttccgtgaaa

SEQ ID NO: 1298 - DNA, 1047 bp, synthetic construct
  source 1..1047: mol_type = other DNA
atggccttaccagtgaccgccttgctcctgccgctggccttgctgctccacgccgccaggccggacatccagctgacacagagcccttctagcctgtctgccagcgtgggcgacagagtgaccatcacatgtagagccagcaagagcgtgtccaccagcggctacagctacatgcactggtatcagcagaagcccggcaaggcccctaagctgctgatctacctggtgtccaacctggaaagcggcgtgcccagcagattttctggcagcggctctggcaccgacttcaccctgacaatatccagcctccagcctgaggacttcgccacctactactgccagcagttcagcgagctgccttggacctttggacagggcaccaaggtggaaatcaagagaacgcgtggaatgaggactgaggatcttcccaaagctgtcgtctttctcgaaccccaatggtatcgggtgctcgaaaaagactctgtgacactgaaatgccaaggggcctactctcccgaggacaactccacacagtggtttcataatgagtccctcatcagctctcaggccagctcttatttcattgatgccgctacagtggacgactccggcgagtatcggtgtcagaccaatctgtctacactgtctgaccccgtgcagcttgaggtccacattggatggttgctcttgcaagccccacgctgggttttcaaagaggaagatccaatccatctgcggtgccacagctggaaaaacaccgctctccacaaagtcacatacctgcaaaatggcaaaggacgcaaatacttccatcacaattccgatttttacattccgaaggctaccctgaaagacagcggcagctatttctgccggggactcgtcggctccaagaatgtgtcctccgaaaccgtgaatatcacgattacccaaggactggctgtgcctacaatctctagcttctttccgcctggataccaagtctccttctgtcttgtgatggtcctcctgtttgctgtggacacaggactgtacttttccgtgaaa

SEQ ID NO: 1299 - DNA, 1038 bp, synthetic construct
  source 1..1038: mol_type = other DNA
atggccttaccagtgaccgccttgctcctgccgctggccttgctgctccacgccgccaggccggacatccagatgacacagagccctagcagcgtgtccgcctctgtgggagacagagtgaccatcacctgtcgggccagccagttcatcagcagcagctacctgagctggtatcagcagaagcctggcaaggcccctaagctgctgatctctggcagctctagcagagccacaggcgtgccaagcagattttctggcagcggctctggcaccgacttcaccctgacaatatccagcctccagcctgaggacttcgccatctactactgccagcagctgtactctagccccatgacattcggccagggcaccaaggtggaaatcaagagaacgcgtggaatgaggactgaggatcttcccaaagctgtcgtctttctcgaaccccaatggtatcgggtgctcgaaaaagactctgtgacactgaaatgccaaggggcctactctcccgaggacaactccacacagtggtttcataatgagtccctcatcagctctcaggccagctcttatttcattgatgccgctacagtggacgactccggcgagtatcggtgtcagaccaatctgtctacactgtctgaccccgtgcagcttgaggtccacattggatggttgctcttgcaagccccacgctgggttttcaaagaggaagatccaatccatctgcggtgccacagctggaaaaacaccgctctccacaaagtcacatacctgcaaaatggcaaaggacgcaaatacttccatcacaattccgatttttacattccgaaggctaccctgaaagacagcggcagctatttctgccggggactcgtcggctccaagaatgtgtcctccgaaaccgtgaatatcacgattacccaaggactggctgtgcctacaatctctagcttctttccgcctggataccaagtctccttctgtcttgtgatggtcctcctgtttgctgtggacacaggactgtacttttccgtgaaa

SEQ ID NO: 1300 - DNA, 1080 bp, synthetic construct
  source 1..1080: mol_type = other DNA
atggccttaccagtgaccgccttgctcctgccgctggccttgctgctccacgccgccaggccgcaggtccagctcgtcgagtccggcggcggcctcgtccaggccggcgactccgtcaccctctcctgcaccgcctccggccgcaccttctcctcctacgccctcgcctggttccgccagcgccccggcaaggagcgcgagttcgtcgccggcctccgctggggcggccccaccaactacgccgactccgtcaaggaccgcttcaccatctccggcgactccgccaagcacaccatgtacctccagatgaactccctcaagcccgaggacaccgccgtctactactgcggctacaaccccggcggctgggccgtcccctcccagtacgagtacgactcctggggccagggcacccaggtcaccgtctcctccacgcgtggaatgaggactgaggatcttcccaaagctgtcgtctttctcgaaccccaatggtatcgggtgctcgaaaaagactctgtgacactgaaatgccaaggggcctactctcccgaggacaactccacacagtggtttcataatgagtccctcatcagctctcaggccagctcttatttcattgatgccgctacagtggacgactccggcgagtatcggtgtcagaccaatctgtctacactgtctgaccccgtgcagcttgaggtccacattggatggttgctcttgcaagccccacgctgggttttcaaagaggaagatccaatccatctgcggtgccacagctggaaaaacaccgctctccacaaagtcacatacctgcaaaatggcaaaggacgcaaatacttccatcacaattccgatttttacattccgaaggctaccctgaaagacagcggcagctatttctgccggggactcgtcggctccaagaatgtgtcctccgaaaccgtgaatatcacgattacccaaggactggctgtgcctacaatctctagcttctttccgcctggataccaagtctccttctgtcttgtgatggtcctcctgtttgctgtggacacaggactgtacttttccgtgaaa

SEQ ID NO: 1301 - DNA, 1065 bp, synthetic construct
  source 1..1065: mol_type = other DNA
atggccttaccagtgaccgccttgctcctgccgctggccttgctgctccacgccgccaggccgcaggttcagctgcaagagtctggcggaggacttgctcaagctggcggaagcctgagactgtcttgtgccgcctctggcagaaccttcagcatgggctggtttagacaggcccctggcaaagagagagagttcgtcgccgccatcacatacagcggcggcagcccttactacgcctcttctgtcagaggccggttcaccatcagccgggacaacgccaagaacaccgtgtacctccagatgaacagcctgaagccagaggacaccgccgtgtactactgtgccgccaatccaacctacggcagcgactggaatgccgagaattggggccagggcacccaagtgacagtgtctagtacgcgtggaatgaggactgaggatcttcccaaagctgtcgtctttctcgaaccccaatggtatcgggtgctcgaaaaagactctgtgacactgaaatgccaaggggcctactctcccgaggacaactccacacagtggtttcataatgagtccctcatcagctctcaggccagctcttatttcattgatgccgctacagtggacgactccggcgagtatcggtgtcagaccaatctgtctacactgtctgaccccgtgcagcttgaggtccacattggatggttgctcttgcaagccccacgctgggttttcaaagaggaagatccaatccatctgcggtgccacagctggaaaaacaccgctctccacaaagtcacatacctgcaaaatggcaaaggacgcaaatacttccatcacaattccgatttttacattccgaaggctaccctgaaagacagcggcagctatttctgccggggactcgtcggctccaagaatgtgtcctccgaaaccgtgaatatcacgattacccaaggactggctgtgcctacaatctctagcttctttccgcctggataccaagtctccttctgtcttgtgatggtcctcctgtttgctgtggacacaggactgtacttttccgtgaaa

SEQ ID NO: 1302 - DNA, 1059 bp, synthetic construct
  source 1..1059: mol_type = other DNA
atggccttaccagtgaccgccttgctcctgccgctggccttgctgctccacgccgccaggccggaagtgcagctggttgaatctggcggaggactggttcagcctggcggatctctgagactgtcttgtgccgccagcggcttcagcttcagcgacttttggatgagctgggtccgacaggcccctggcaaaggacttgaatgggtcgccacaatcagccaggccggcagcgagaaggactacgtggactctgtgaagggcagattcaccatcagccgggacaacgccaagaagtccctgtacctccagatgaacagcctgagagccgaggacaccgccgtgtactattgtgcctctggcgtgtacagcttcgactacagaggccagggcaccctggtcacagtctcttctacgcgtggaatgaggactgaggatcttcccaaagctgtcgtctttctcgaaccccaatggtatcgggtgctcgaaaaagactctgtgacactgaaatgccaaggggcctactctcccgaggacaactccacacagtggtttcataatgagtccctcatcagctctcaggccagctcttatttcattgatgccgctacagtggacgactccggcgagtatcggtgtcagaccaatctgtctacactgtctgaccccgtgcagcttgaggtccacattggatggttgctcttgcaagccccacgctgggttttcaaagaggaagatccaatccatctgcggtgccacagctggaaaaacaccgctctccacaaagtcacatacctgcaaaatggcaaaggacgcaaatacttccatcacaattccgatttttacattccgaaggctaccctgaaagacagcggcagctatttctgccggggactcgtcggctccaagaatgtgtcctccgaaaccgtgaatatcacgattacccaaggactggctgtgcctacaatctctagcttctttccgcctggataccaagtctccttctgtcttgtgatggtcctcctgtttgctgtggacacaggactgtacttttccgtgaaa

SEQ ID NO: 1303 - DNA, 1059 bp, synthetic construct
  source 1..1059: mol_type = other DNA
atggccttaccagtgaccgccttgctcctgccgctggccttgctgctccacgccgccaggccggaagtgcagctggttgaatctggcggaggactggttcagcctggcggatctctgagactgtcttgtgccgccagcggcttcaccttcagcaactactggatgagctgggtccgacaggcccctggaaagggacaagaatgggtcgccaccatcaaccaggacggcagcgacaaggattacgtggacagcgtgaagggcagattcaccatcagccgggacaacgccaagaagtccctgtacctccagatgaacagcctgagagccgaggacaccgccgtgtactattgtgcctctggcgtgtacagcttcgactacagaggccagggcaccctggtcacagtctcttctacgcgtggaatgaggactgaggatcttcccaaagctgtcgtctttctcgaaccccaatggtatcgggtgctcgaaaaagactctgtgacactgaaatgccaaggggcctactctcccgaggacaactccacacagtggtttcataatgagtccctcatcagctctcaggccagctcttatttcattgatgccgctacagtggacgactccggcgagtatcggtgtcagaccaatctgtctacactgtctgaccccgtgcagcttgaggtccacattggatggttgctcttgcaagccccacgctgggttttcaaagaggaagatccaatccatctgcggtgccacagctggaaaaacaccgctctccacaaagtcacatacctgcaaaatggcaaaggacgcaaatacttccatcacaattccgatttttacattccgaaggctaccctgaaagacagcggcagctatttctgccggggactcgtcggctccaagaatgtgtcctccgaaaccgtgaatatcacgattacccaaggactggctgtgcctacaatctctagcttctttccgcctggataccaagtctccttctgtcttgtgatggtcctcctgtttgctgtggacacaggactgtacttttccgtgaaa

SEQ ID NO: 1304 - DNA, 1059 bp, synthetic construct
  source 1..1059: mol_type = other DNA
atggccttaccagtgaccgccttgctcctgccgctggccttgctgctccacgccgccaggccggaagtgcagctggttgaatctggcggaggactggttcagcctggcggatctctgagactgtcttgtgccgccagcggcatcgacttcagcagatactggatgagctgggtccgacaggcccctggcaaaggacttgaatgggtcgccacaatcagccaggccggcagcgagaaggactacgtggactctgtgaagggcagattcaccatcagccgggacaacgccaagaagtccctgtacctccagatgaacagcctgagagccgaggacaccgccgtgtactattgtgcctctggcgtgtacagcttcgactacagaggccagggcaccctggtcacagtctcttctacgcgtggaatgaggactgaggatcttcccaaagctgtcgtctttctcgaaccccaatggtatcgggtgctcgaaaaagactctgtgacactgaaatgccaaggggcctactctcccgaggacaactccacacagtggtttcataatgagtccctcatcagctctcaggccagctcttatttcattgatgccgctacagtggacgactccggcgagtatcggtgtcagaccaatctgtctacactgtctgaccccgtgcagcttgaggtccacattggatggttgctcttgcaagccccacgctgggttttcaaagaggaagatccaatccatctgcggtgccacagctggaaaaacaccgctctccacaaagtcacatacctgcaaaatggcaaaggacgcaaatacttccatcacaattccgatttttacattccgaaggctaccctgaaagacagcggcagctatttctgccggggactcgtcggctccaagaatgtgtcctccgaaaccgtgaatatcacgattacccaaggactggctgtgcctacaatctctagcttctttccgcctggataccaagtctccttctgtcttgtgatggtcctcctgtttgctgtggacacaggactgtacttttccgtgaaa

SEQ ID NO: 1305 - DNA, 1059 bp, synthetic construct
  source 1..1059: mol_type = other DNA
atggccttaccagtgaccgccttgctcctgccgctggccttgctgctccacgccgccaggccggaagtgcagctggttgaatctggcggaggactggttcagcctggcggatctctgagactgtcttgtgccgccagcggcatcgacttcagcagatactggatgagctgggtccgacaggcccctggaaagggacaagaatgggtcgccaccatcaaccaggacggcagcgacaaggattacgtggacagcgtgaagggcagattcaccatcagccgggacaacgccaagaagtccctgtacctccagatgaacagcctgagagccgaggacaccgccgtgtactattgtgcctctggcgtgtacagcttcgactacagaggccagggcaccctggtcacagtctcttctacgcgtggaatgaggactgaggatcttcccaaagctgtcgtctttctcgaaccccaatggtatcgggtgctcgaaaaagactctgtgacactgaaatgccaaggggcctactctcccgaggacaactccacacagtggtttcataatgagtccctcatcagctctcaggccagctcttatttcattgatgccgctacagtggacgactccggcgagtatcggtgtcagaccaatctgtctacactgtctgaccccgtgcagcttgaggtccacattggatggttgctcttgcaagccccacgctgggttttcaaagaggaagatccaatccatctgcggtgccacagctggaaaaacaccgctctccacaaagtcacatacctgcaaaatggcaaaggacgcaaatacttccatcacaattccgatttttacattccgaaggctaccctgaaagacagcggcagctatttctgccggggactcgtcggctccaagaatgtgtcctccgaaaccgtgaatatcacgattacccaaggactggctgtgcctacaatctctagcttctttccgcctggataccaagtctccttctgtcttgtgatggtcctcctgtttgctgtggacacaggactgtacttttccgtgaaa

SEQ ID NO: 1306 - DNA, 1071 bp, synthetic construct
  source 1..1071: mol_type = other DNA
atggccttaccagtgaccgccttgctcctgccgctggccttgctgctccacgccgccaggccggaggtgcagctggttgaatctggcggaggactggttcagcctggcggatctctgagactgtcctgcacattttccggcggcaccttcagcagctacacaatgggctggttcagacaggcccctggcaaagaacgggaatttgtggccgaagtccgatggggcggagtgaccacatacagcaacagcctgaaggacagattcagcatcagcgaggacagcgtgaagaacgccgtgtacctccagatgaactccctgaagcctgaggacacagccgtgtactattgtgccgctgtgcggcagatgtacatgaccgtggtgcctgattattggggccagggcacactggtcacagtgtctagcacgcgtggaatgaggactgaggatcttcccaaagctgtcgtctttctcgaaccccaatggtatcgggtgctcgaaaaagactctgtgacactgaaatgccaaggggcctactctcccgaggacaactccacacagtggtttcataatgagtccctcatcagctctcaggccagctcttatttcattgatgccgctacagtggacgactccggcgagtatcggtgtcagaccaatctgtctacactgtctgaccccgtgcagcttgaggtccacattggatggttgctcttgcaagccccacgctgggttttcaaagaggaagatccaatccatctgcggtgccacagctggaaaaacaccgctctccacaaagtcacatacctgcaaaatggcaaaggacgcaaatacttccatcacaattccgatttttacattccgaaggctaccctgaaagacagcggcagctatttctgccggggactcgtcggctccaagaatgtgtcctccgaaaccgtgaatatcacgattacccaaggactggctgtgcctacaatctctagcttctttccgcctggataccaagtctccttctgtcttgtgatggtcctcctgtttgctgtggacacaggactgtacttttccgtgaaa

SEQ ID NO: 1307 - DNA, 1065 bp, synthetic construct
  source 1..1065: mol_type = other DNA
atggccttaccagtgaccgccttgctcctgccgctggccttgctgctccacgccgccaggccggaagtgcagctggttgaatctggcggaggactggttcaggctggcggatctctgagactgtcttgtgccgccagcggcagaacctttagcatgggctggtttagacaggcccctggcaaagagagagagttcgtcgccgccatcacatactctggcggcagcccttactacgccgactctgtgaagggcagattcaccatcagccgggacaacgccaagaacaccgtgtacctccagatgaacagcctgaagcctgaggacaccgccgtgtactactgcgccgccaatccaacatacggcagcgactggaacgccgagaattggggccagggaacccaagtgacagtgtctagcacgcgtggaatgaggactgaggatcttcccaaagctgtcgtctttctcgaaccccaatggtatcgggtgctcgaaaaagactctgtgacactgaaatgccaaggggcctactctcccgaggacaactccacacagtggtttcataatgagtccctcatcagctctcaggccagctcttatttcattgatgccgctacagtggacgactccggcgagtatcggtgtcagaccaatctgtctacactgtctgaccccgtgcagcttgaggtccacattggatggttgctcttgcaagccccacgctgggttttcaaagaggaagatccaatccatctgcggtgccacagctggaaaaacaccgctctccacaaagtcacatacctgcaaaatggcaaaggacgcaaatacttccatcacaattccgatttttacattccgaaggctaccctgaaagacagcggcagctatttctgccggggactcgtcggctccaagaatgtgtcctccgaaaccgtgaatatcacgattacccaaggactggctgtgcctacaatctctagcttctttccgcctggataccaagtctccttctgtcttgtgatggtcctcctgtttgctgtggacacaggactgtacttttccgtgaaa

SEQ ID NO: 1308 - DNA, 1065 bp, synthetic construct
  source 1..1065: mol_type = other DNA
atggccttaccagtgaccgccttgctcctgccgctggccttgctgctccacgccgccaggccgcagctccagttgcaagagagcggccctggcttggtaaaaccttccgagacccttagcctcacatgcacggttagtgggggcagcatttcctcaggtgattactattggggatggattcggcaacccccgggtaaaggattggagtggattggtcatatttattatagtggagcgacgtactacaacccaagtctcaaatccagggttacaatatccgtcgatacgagcaggaaccaattcagcttgaaactttctagtgtcaccgcagcagacacagccgtctattactgtacgcgggatgactccagtaattggcggtcccgagggcaagggacactggtcacggtctcctcaacgcgtggaatgaggactgaggatcttcccaaagctgtcgtctttctcgaaccccaatggtatcgggtgctcgaaaaagactctgtgacactgaaatgccaaggggcctactctcccgaggacaactccacacagtggtttcataatgagtccctcatcagctctcaggccagctcttatttcattgatgccgctacagtggacgactccggcgagtatcggtgtcagaccaatctgtctacactgtctgaccccgtgcagcttgaggtccacattggatggttgctcttgcaagccccacgctgggttttcaaagaggaagatccaatccatctgcggtgccacagctggaaaaacaccgctctccacaaagtcacatacctgcaaaatggcaaaggacgcaaatacttccatcacaattccgatttttacattccgaaggctaccctgaaagacagcggcagctatttctgccggggactcgtcggctccaagaatgtgtcctccgaaaccgtgaatatcacgattacccaaggactggctgtgcctacaatctctagcttctttccgcctggataccaagtctccttctgtcttgtgatggtcctcctgtttgctgtggacacaggactgtacttttccgtgaaa

SEQ ID NO: 1309 - DNA, 1065 bp, synthetic construct
  source 1..1065: mol_type = other DNA
atggccttaccagtgaccgccttgctcctgccgctggccttgctgctccacgccgccaggccgcagctccagctgcaagagtctggacctggcctggtcaagcctagcgagacactgagcctgacctgtaccgtgtccggcgatagcatcagcagcggcgattactactggggctggatcagacagcctcctggcaaaggactggaatggatcggccacatctactacagcggcgtgacctactacaaccccagcctgaagtccagagtgaccatcagcgtggacaccagccggaaccagttctccctgaagctgtctagcgtgacagccgccgataccgccgtgtactactgcaccagagaggacagcagcaactggcggagtagaggccagggaacactggtcacagttagctctacgcgtggaatgaggactgaggatcttcccaaagctgtcgtctttctcgaaccccaatggtatcgggtgctcgaaaaagactctgtgacactgaaatgccaaggggcctactctcccgaggacaactccacacagtggtttcataatgagtccctcatcagctctcaggccagctcttatttcattgatgccgctacagtggacgactccggcgagtatcggtgtcagaccaatctgtctacactgtctgaccccgtgcagcttgaggtccacattggatggttgctcttgcaagccccacgctgggttttcaaagaggaagatccaatccatctgcggtgccacagctggaaaaacaccgctctccacaaagtcacatacctgcaaaatggcaaaggacgcaaatacttccatcacaattccgatttttacattccgaaggctaccctgaaagacagcggcagctatttctgccggggactcgtcggctccaagaatgtgtcctccgaaaccgtgaatatcacgattacccaaggactggctgtgcctacaatctctagcttctttccgcctggataccaagtctccttctgtcttgtgatggtcctcctgtttgctgtggacacaggactgtacttttccgtgaaa

SEQ ID NO: 1310 - DNA, 1065 bp, synthetic construct
  source 1..1065: mol_type = other DNA
atggccttaccagtgaccgccttgctcctgccgctggccttgctgctccacgccgccaggccgcaactgcaactgcaagagtctggccctggcctggtcaagccttctgaaaccctgagcctgacctgtaccgtgtccggcggctctatcagcagcggcgattactactggggctggatcagacagcctccaggcaagggactcgaatggatcggcagcatcagctacagcggctccacctactacaacccaagcctgaagtccagagtgaccatcagcgtggacaccagcagaaaccagttctccctgaagctgagcagcgtgacagccgccgatacagccgtgtattattgcaccagagaggacagcagcaactggcggagtagaggacagggcacactggtcacagtgtcctctacgcgtggaatgaggactgaggatcttcccaaagctgtcgtctttctcgaaccccaatggtatcgggtgctcgaaaaagactctgtgacactgaaatgccaaggggcctactctcccgaggacaactccacacagtggtttcataatgagtccctcatcagctctcaggccagctcttatttcattgatgccgctacagtggacgactccggcgagtatcggtgtcagaccaatctgtctacactgtctgaccccgtgcagcttgaggtccacattggatggttgctcttgcaagccccacgctgggttttcaaagaggaagatccaatccatctgcggtgccacagctggaaaaacaccgctctccacaaagtcacatacctgcaaaatggcaaaggacgcaaatacttccatcacaattccgatttttacattccgaaggctaccctgaaagacagcggcagctatttctgccggggactcgtcggctccaagaatgtgtcctccgaaaccgtgaatatcacgattacccaaggactggctgtgcctacaatctctagcttctttccgcctggataccaagtctccttctgtcttgtgatggtcctcctgtttgctgtggacacaggactgtacttttccgtgaaa

SEQ ID NO: 1311 - DNA, 1083 bp, synthetic construct
  source 1..1083: mol_type = other DNA
atggccttaccagtgaccgccttgctcctgccgctggccttgctgctccacgccgccaggccgcagctgcaactgcaagagtctggccccggactggtcaagccttctgaaacactggccctgacctgcaatgtgtccggcggctctatcagcagcagctcctattactggggctggatcagacagcctccaggcaagagactggaatggatcggcagcatctactacagcggcagcacatacttcaaccccagcctgaagtccagagtgaccatcagcgtggacacctccaagaaccagttctccctgaagctgagcagcgtgacagccgccgatacagccgtgtattactgtgctggcggcgactactatggccccgttggacaatggcccagcgattacagaggacagggaacccttgtgaccgtgtcctctacgcgtggaatgaggactgaggatcttcccaaagctgtcgtctttctcgaaccccaatggtatcgggtgctcgaaaaagactctgtgacactgaaatgccaaggggcctactctcccgaggacaactccacacagtggtttcataatgagtccctcatcagctctcaggccagctcttatttcattgatgccgctacagtggacgactccggcgagtatcggtgtcagaccaatctgtctacactgtctgaccccgtgcagcttgaggtccacattggatggttgctcttgcaagccccacgctgggttttcaaagaggaagatccaatccatctgcggtgccacagctggaaaaacaccgctctccacaaagtcacatacctgcaaaatggcaaaggacgcaaatacttccatcacaattccgatttttacattccgaaggctaccctgaaagacagcggcagctatttctgccggggactcgtcggctccaagaatgtgtcctccgaaaccgtgaatatcacgattacccaaggactggctgtgcctacaatctctagcttctttccgcctggataccaagtctccttctgtcttgtgatggtcctcctgtttgctgtggacacaggactgtacttttccgtgaaa

SEQ ID NO: 1312 - DNA, 1101 bp, synthetic construct
  source 1..1101: mol_type = other DNA
atggccttaccagtgaccgccttgctcctgccgctggccttgctgctccacgccgccaggccggaagttcagctgcttgagtctggcggaggactggttcaacctggcggaagcctgagactgtcttgtgccgccagcggcttcatcttcagcagctacgccatgagctgggtccgacaggctcctggaaagggccaagaatgggtttccggcgttagcggcacaggcgtgaacacctactacgccgatagcgtgaagggcagattcaccatcagccgggacaacagcaagaacaccctgtacctccagatgaacagcctgagagccgaggacaccgccgtgtactattgtgcctctggcaaaggctgggacagcggctcttggtacgaggactatagaggccagggcaccctggtcacagtttcttcaacgcgtcctcgactgtgccttctaacgcgtggaatgaggactgaggatcttcccaaagctgtcgtctttctcgaaccccaatggtatcgggtgctcgaaaaagactctgtgacactgaaatgccaaggggcctactctcccgaggacaactccacacagtggtttcataatgagtccctcatcagctctcaggccagctcttatttcattgatgccgctacagtggacgactccggcgagtatcggtgtcagaccaatctgtctacactgtctgaccccgtgcagcttgaggtccacattggatggttgctcttgcaagccccacgctgggttttcaaagaggaagatccaatccatctgcggtgccacagctggaaaaacaccgctctccacaaagtcacatacctgcaaaatggcaaaggacgcaaatacttccatcacaattccgatttttacattccgaaggctaccctgaaagacagcggcagctatttctgccggggactcgtcggctccaagaatgtgtcctccgaaaccgtgaatatcacgattacccaaggactggctgtgcctacaatctctagcttctttccgcctggataccaagtctccttctgtcttgtgatggtcctcctgtttgctgtggacacaggactgtacttttccgtgaaa

SEQ ID NO: 1313 - DNA, 1083 bp, synthetic construct
  source 1..1083: mol_type = other DNA
atggccttaccagtgaccgccttgctcctgccgctggccttgctgctccacgccgccaggccgcagctccagctgcaagagtctggacctggcctggtcaagcctagcgagacactgagcctgacctgtacagttagcggcggctctgtgtccagcagcagctattactggggctggatcagacagcctcctggcaagagactggaactgatcggcagcatctactacggcggctccacctacttcaaccccagcctgaaaagcagagtgaccatcagcgtggacaccagcaagaaccagttcagcctgaagctgagcagcgtgacagccgccgatacagccgtgtactattgtgccggcggagacacatacggccctgttggacaatggcccagcgactatagaggccagggcacactggtcacagtgtctagcacgcgtggaatgaggactgaggatcttcccaaagctgtcgtctttctcgaaccccaatggtatcgggtgctcgaaaaagactctgtgacactgaaatgccaaggggcctactctcccgaggacaactccacacagtggtttcataatgagtccctcatcagctctcaggccagctcttatttcattgatgccgctacagtggacgactccggcgagtatcggtgtcagaccaatctgtctacactgtctgaccccgtgcagcttgaggtccacattggatggttgctcttgcaagccccacgctgggttttcaaagaggaagatccaatccatctgcggtgccacagctggaaaaacaccgctctccacaaagtcacatacctgcaaaatggcaaaggacgcaaatacttccatcacaattccgatttttacattccgaaggctaccctgaaagacagcggcagctatttctgccggggactcgtcggctccaagaatgtgtcctccgaaaccgtgaatatcacgattacccaaggactggctgtgcctacaatctctagcttctttccgcctggataccaagtctccttctgtcttgtgatggtcctcctgtttgctgtggacacaggactgtacttttccgtgaaa

SEQ ID NO: 1314 - DNA, 1077 bp, synthetic construct
  source 1..1077: mol_type = other DNA
atggccttaccagtgaccgccttgctcctgccgctggccttgctgctccacgccgccaggccggaagttcagctgcttgaaagcggtggcggcctggttcaacctggcggatctctgagactgagctgtgccgccagcggcttcatcttctccatctacgccatgtcctgggtccgacaggcccctggaaaaggactggaatgggtgtccggcatctctggcagcggcgtgaacacctactacgccgattctgtgaagggccgcttcatcatcagccgggacaacagcagaaacaccgtgtacctccagatgaacagcctgagagccgatgacaccgccgtgtaccactgcgccaatggcaaaggctgggacggcaacacttggtacgaggattacagaggacagggaaccctcgtgaccgtgtctagtacgcgtggaatgaggactgaggatcttcccaaagctgtcgtctttctcgaaccccaatggtatcgggtgctcgaaaaagactctgtgacactgaaatgccaaggggcctactctcccgaggacaactccacacagtggtttcataatgagtccctcatcagctctcaggccagctcttatttcattgatgccgctacagtggacgactccggcgagtatcggtgtcagaccaatctgtctacactgtctgaccccgtgcagcttgaggtccacattggatggttgctcttgcaagccccacgctgggttttcaaagaggaagatccaatccatctgcggtgccacagctggaaaaacaccgctctccacaaagtcacatacctgcaaaatggcaaaggacgcaaatacttccatcacaattccgatttttacattccgaaggctaccctgaaagacagcggcagctatttctgccggggactcgtcggctccaagaatgtgtcctccgaaaccgtgaatatcacgattacccaaggactggctgtgcctacaatctctagcttctttccgcctggataccaagtctccttctgtcttgtgatggtcctcctgtttgctgtggacacaggactgtacttttccgtgaaa

SEQ ID NO: 1315 - DNA, 1062 bp, synthetic construct
  source 1..1062: mol_type = other DNA
atggccttaccagtgaccgccttgctcctgccgctggccttgctgctccacgccgccaggccggaagtgcaggttttggagtctggcggaggactggttcagcctggcggatctctgagactgtcttgtgccgccagcggcttcaccttcagcaactttgccatgagctgggtccgacaggcccctggcaaaggacttgaatgggtgtccacaatcagcggcagcgccggcacaacagattacgccgattctgtgaagggcagattcaccatcagccgggacaacagcaagaaaaccctgtacctccagatgaacagcctgcgcgtggaagataccgccgtgtactactgtgccgatggcagaggccccttcttcgattatcgcggccagggcacactggtcaccgtttcttctacgcgtggaatgaggactgaggatcttcccaaagctgtcgtctttctcgaaccccaatggtatcgggtgctcgaaaaagactctgtgacactgaaatgccaaggggcctactctcccgaggacaactccacacagtggtttcataatgagtccctcatcagctctcaggccagctcttatttcattgatgccgctacagtggacgactccggcgagtatcggtgtcagaccaatctgtctacactgtctgaccccgtgcagcttgaggtccacattggatggttgctcttgcaagccccacgctgggttttcaaagaggaagatccaatccatctgcggtgccacagctggaaaaacaccgctctccacaaagtcacatacctgcaaaatggcaaaggacgcaaatacttccatcacaattccgatttttacattccgaaggctaccctgaaagacagcggcagctatttctgccggggactcgtcggctccaagaatgtgtcctccgaaaccgtgaatatcacgattacccaaggactggctgtgcctacaatctctagcttctttccgcctggataccaagtctccttctgtcttgtgatggtcctcctgtttgctgtggacacaggactgtacttttccgtgaaa

SEQ ID NO: 1316 - DNA, 1068 bp, synthetic construct
  source 1..1068: mol_type = other DNA
atggccttaccagtgaccgccttgctcctgccgctggccttgctgctccacgccgccaggccggaggtgcagctggttgaatctggcggaggactggttcagcctggcggatctctgagactgtcttgtgccgccagcggcttcaacatcaaggatacctgtatcggctgggttcgcagagcccctggcaaagaggaagaactggtcgccaaaatctgcaagtacagcggccacaccagatacgccgacagcgtgaagggcagattcaccatcagcgccgacaccagcaagaacaccgcctacctccagatgaacagcctgagagccgaggacaccgccgtgtactattgtgccgctgtgtccgtcagagatgggcactacaattactggggccagggcaccaccgtgaccgtttcttcaacgcgtggaatgaggactgaggatcttcccaaagctgtcgtctttctcgaaccccaatggtatcgggtgctcgaaaaagactctgtgacactgaaatgccaaggggcctactctcccgaggacaactccacacagtggtttcataatgagtccctcatcagctctcaggccagctcttatttcattgatgccgctacagtggacgactccggcgagtatcggtgtcagaccaatctgtctacactgtctgaccccgtgcagcttgaggtccacattggatggttgctcttgcaagccccacgctgggttttcaaagaggaagatccaatccatctgcggtgccacagctggaaaaacaccgctctccacaaagtcacatacctgcaaaatggcaaaggacgcaaatacttccatcacaattccgatttttacattccgaaggctaccctgaaagacagcggcagctatttctgccggggactcgtcggctccaagaatgtgtcctccgaaaccgtgaatatcacgattacccaaggactggctgtgcctacaatctctagcttctttccgcctggataccaagtctccttctgtcttgtgatggtcctcctgtttgctgtggacacaggactgtacttttccgtgaaa

SEQ ID NO: 1317 - DNA, 1068 bp, synthetic construct
  source 1..1068: mol_type = other DNA
atggccttaccagtgaccgccttgctcctgccgctggccttgctgctccacgccgccaggccggaagtgcaactggtggaaagcggaggcggacttgttcaaccaggcggaagcctgagactgagctgtgccgcttccggctttaatatcaaagacacatgcatcggatgggttcgccgcgctccagggaaagaagaggaactggttgccgacatctgtccctacaagggcagcacaagatatgccgactccgtgaaaggccggtttaccatctctgccgacacctctaagaatacggcctatctgcaaatgaactctctgcgggccgaagatacagccgtgtattactgcgccatcgtgtctgccagagatggctactataactattggggacagggaaccacagtcacagtgtcctctacgcgtggaatgaggactgaggatcttcccaaagctgtcgtctttctcgaaccccaatggtatcgggtgctcgaaaaagactctgtgacactgaaatgccaaggggcctactctcccgaggacaactccacacagtggtttcataatgagtccctcatcagctctcaggccagctcttatttcattgatgccgctacagtggacgactccggcgagtatcggtgtcagaccaatctgtctacactgtctgaccccgtgcagcttgaggtccacattggatggttgctcttgcaagccccacgctgggttttcaaagaggaagatccaatccatctgcggtgccacagctggaaaaacaccgctctccacaaagtcacatacctgcaaaatggcaaaggacgcaaatacttccatcacaattccgatttttacattccgaaggctaccctgaaagacagcggcagctatttctgccggggactcgtcggctccaagaatgtgtcctccgaaaccgtgaatatcacgattacccaaggactggctgtgcctacaatctctagcttctttccgcctggataccaagtctccttctgtcttgtgatggtcctcctgtttgctgtggacacaggactgtacttttccgtgaaa

SEQ ID NO: 1318 - DNA, 1068 bp, synthetic construct
  source 1..1068: mol_type = other DNA
atggccttaccagtgaccgccttgctcctgccgctggccttgctgctccacgccgccaggccggaagtgcagctgcttgagtctggcggaggactggttcaacctggcggaagcctgagactgtcttgtgccgccagcggcttcacctttagcagctacgccatgagctgggtccgacaggctcctggcaaaggactggaatgggtgtccgccatcacaggctctggcggcagcacatattacgccgactctgtgaagggcagattcaccatcagccgggacaacagcaagaacaccctgtacctccagatgaacagcctgagagccgaggacaccgccgtgtactactgtgccaaggatgaggatggcggctctctgctgggacacagaggacagggaacactggtcaccgtgtctagcacgcgtggaatgaggactgaggatcttcccaaagctgtcgtctttctcgaaccccaatggtatcgggtgctcgaaaaagactctgtgacactgaaatgccaaggggcctactctcccgaggacaactccacacagtggtttcataatgagtccctcatcagctctcaggccagctcttatttcattgatgccgctacagtggacgactccggcgagtatcggtgtcagaccaatctgtctacactgtctgaccccgtgcagcttgaggtccacattggatggttgctcttgcaagccccacgctgggttttcaaagaggaagatccaatccatctgcggtgccacagctggaaaaacaccgctctccacaaagtcacatacctgcaaaatggcaaaggacgcaaatacttccatcacaattccgatttttacattccgaaggctaccctgaaagacagcggcagctatttctgccggggactcgtcggctccaagaatgtgtcctccgaaaccgtgaatatcacgattacccaaggactggctgtgcctacaatctctagcttctttccgcctggataccaagtctccttctgtcttgtgatggtcctcctgtttgctgtggacacaggactgtacttttccgtgaaa

SEQ ID NO: 1319 - DNA, 1068 bp, synthetic construct
  source 1..1068: mol_type = other DNA
atggccttaccagtgaccgccttgctcctgccgctggccttgctgctccacgccgccaggccggaagtgcagctgcttgagtctggcggcggactgattcaacctggcggaagcctgagactgagctgtgccgcttccggcttcacctttagcagccacgccatgacctgggtccgacaggctcctggaaaaggactggaatgggtgtccgccatcagcagcggcggcagctacacatattacgccgacagcgtgaagggcagattcaccatctccagagacaacagcaagaacaccctgtacctccagatgaacagcctgagagccgaggacaccgccgtgtactactgtgccaaggatgaggatggcggctctctgctgggacacagaggacagggaacactggtcaccgtgtctagcacgcgtggaatgaggactgaggatcttcccaaagctgtcgtctttctcgaaccccaatggtatcgggtgctcgaaaaagactctgtgacactgaaatgccaaggggcctactctcccgaggacaactccacacagtggtttcataatgagtccctcatcagctctcaggccagctcttatttcattgatgccgctacagtggacgactccggcgagtatcggtgtcagaccaatctgtctacactgtctgaccccgtgcagcttgaggtccacattggatggttgctcttgcaagccccacgctgggttttcaaagaggaagatccaatccatctgcggtgccacagctggaaaaacaccgctctccacaaagtcacatacctgcaaaatggcaaaggacgcaaatacttccatcacaattccgatttttacattccgaaggctaccctgaaagacagcggcagctatttctgccggggactcgtcggctccaagaatgtgtcctccgaaaccgtgaatatcacgattacccaaggactggctgtgcctacaatctctagcttctttccgcctggataccaagtctccttctgtcttgtgatggtcctcctgtttgctgtggacacaggactgtacttttccgtgaaa

SEQ ID NO: 1320 - DNA, 1068 bp, synthetic construct
  source 1..1068: mol_type = other DNA
atggccttaccagtgaccgccttgctcctgccgctggccttgctgctccacgccgccaggccggaagtgcagctggttgaatctggcggaggactggttcagcctggcggatctctgagactgtcttgtgccgccagcggcttcagcttcagcgacttttggatgagctgggtccgacaggcccctggcaaaggacttgaatgggtgtccgccatcagcggcagcggcgattatacacactacgccgacagcgtgaagggcagattcaccatcagccgggacaacagcaagaacaccgtgtacctccagatgaacagcctgagagccgaggacagcgccgtgtactactgtgccaaggatgaggatggcggctctctgctgggacacagaggacagggaacactggtcaccgtgtctagcacgcgtggaatgaggactgaggatcttcccaaagctgtcgtctttctcgaaccccaatggtatcgggtgctcgaaaaagactctgtgacactgaaatgccaaggggcctactctcccgaggacaactccacacagtggtttcataatgagtccctcatcagctctcaggccagctcttatttcattgatgccgctacagtggacgactccggcgagtatcggtgtcagaccaatctgtctacactgtctgaccccgtgcagcttgaggtccacattggatggttgctcttgcaagccccacgctgggttttcaaagaggaagatccaatccatctgcggtgccacagctggaaaaacaccgctctccacaaagtcacatacctgcaaaatggcaaaggacgcaaatacttccatcacaattccgatttttacattccgaaggctaccctgaaagacagcggcagctatttctgccggggactcgtcggctccaagaatgtgtcctccgaaaccgtgaatatcacgattacccaaggactggctgtgcctacaatctctagcttctttccgcctggataccaagtctccttctgtcttgtgatggtcctcctgtttgctgtggacacaggactgtacttttccgtgaaa

SEQ ID NO: 1321 - DNA, 1074 bp, synthetic construct
  source 1..1074: mol_type = other DNA
atggccttaccagtgaccgccttgctcctgccgctggccttgctgctccacgccgccaggccggaagtgcagctgcttgagtctggcggaggactggttcaacctggcggaagcctgagactgtcttgtgccgcctctggcttcgccttcagcatctacgatatgagctgggtccgacaggcccctggcaaaggacttgaatgggtgtccagcatcagcggcagcggcgactacatctactacgccgatagcgtgaagggcagattcaccatcagccgggacatcagcaagaacaccctgtacctccagatgaacagcctgagagccgaggacaccgccgtgtactactgtgccaaagaaggcaccggcgctaacagcagcctggccgattatagaggccagggcacactggtcaccgtgtctagtacgcgtggaatgaggactgaggatcttcccaaagctgtcgtctttctcgaaccccaatggtatcgggtgctcgaaaaagactctgtgacactgaaatgccaaggggcctactctcccgaggacaactccacacagtggtttcataatgagtccctcatcagctctcaggccagctcttatttcattgatgccgctacagtggacgactccggcgagtatcggtgtcagaccaatctgtctacactgtctgaccccgtgcagcttgaggtccacattggatggttgctcttgcaagccccacgctgggttttcaaagaggaagatccaatccatctgcggtgccacagctggaaaaacaccgctctccacaaagtcacatacctgcaaaatggcaaaggacgcaaatacttccatcacaattccgatttttacattccgaaggctaccctgaaagacagcggcagctatttctgccggggactcgtcggctccaagaatgtgtcctccgaaaccgtgaatatcacgattacccaaggactggctgtgcctacaatctctagcttctttccgcctggataccaagtctccttctgtcttgtgatggtcctcctgtttgctgtggacacaggactgtacttttccgtgaaa

SEQ ID NO: 1322 - DNA, 1074 bp, synthetic construct
  source 1..1074: mol_type = other DNA
atggccttaccagtgaccgccttgctcctgccgctggccttgctgctccacgccgccaggccggaggttcagctgcttgagtctggcggaggactggttcaacctggcggaagcctgagactgtcttgtgccgccagcggcttcacctttagcagctacgccatgagctgggtccgacaggctcctggcaaaggactggaatgggtgtccagcatcagcggcagcggcgactacatctactacgccgatagcgtgaagggcagattcaccatcagccgggacatcagcaagaacaccctgtacctccagatgaacagcctgagagccgaggacaccgccgtgtactactgtgccaaagaaggcaccggcgctaacagcagcctggccgattatagaggccagggcacactggtcaccgtgtctagtacgcgtggaatgaggactgaggatcttcccaaagctgtcgtctttctcgaaccccaatggtatcgggtgctcgaaaaagactctgtgacactgaaatgccaaggggcctactctcccgaggacaactccacacagtggtttcataatgagtccctcatcagctctcaggccagctcttatttcattgatgccgctacagtggacgactccggcgagtatcggtgtcagaccaatctgtctacactgtctgaccccgtgcagcttgaggtccacattggatggttgctcttgcaagccccacgctgggttttcaaagaggaagatccaatccatctgcggtgccacagctggaaaaacaccgctctccacaaagtcacatacctgcaaaatggcaaaggacgcaaatacttccatcacaattccgatttttacattccgaaggctaccctgaaagacagcggcagctatttctgccggggactcgtcggctccaagaatgtgtcctccgaaaccgtgaatatcacgattacccaaggactggctgtgcctacaatctctagcttctttccgcctggataccaagtctccttctgtcttgtgatggtcctcctgtttgctgtggacacaggactgtacttttccgtgaaa

SEQ ID NO: 1323 - DNA, 1065 bp, synthetic construct
  source 1..1065: mol_type = other DNA
atggccttaccagtgaccgccttgctcctgccgctggccttgctgctccacgccgccaggccgcaggtgcagctggttgaatctggcggaggactggttcagcctggcggatctctgagactgtcttgtgccgccagcggcttcaccttcaccaatcacgccatgagctgggtccgacaggcccctggaaaaggactggaactggtgtctagcatcagcggcaacggcagaaccacctactacgccgatagcgtgaagggcagattcaccatcagccgggacatcagcaagaacaccctggacctccagatgaacagcctgagagccgaggataccgccgtgtactactgtgccaaggatggcggagagacactggtggatagcagaggccagggcacactggtcacagtgtcatctacgcgtggaatgaggactgaggatcttcccaaagctgtcgtctttctcgaaccccaatggtatcgggtgctcgaaaaagactctgtgacactgaaatgccaaggggcctactctcccgaggacaactccacacagtggtttcataatgagtccctcatcagctctcaggccagctcttatttcattgatgccgctacagtggacgactccggcgagtatcggtgtcagaccaatctgtctacactgtctgaccccgtgcagcttgaggtccacattggatggttgctcttgcaagccccacgctgggttttcaaagaggaagatccaatccatctgcggtgccacagctggaaaaacaccgctctccacaaagtcacatacctgcaaaatggcaaaggacgcaaatacttccatcacaattccgatttttacattccgaaggctaccctgaaagacagcggcagctatttctgccggggactcgtcggctccaagaatgtgtcctccgaaaccgtgaatatcacgattacccaaggactggctgtgcctacaatctctagcttctttccgcctggataccaagtctccttctgtcttgtgatggtcctcctgtttgctgtggacacaggactgtacttttccgtgaaa

SEQ ID NO: 1324 - DNA, 1068 bp, synthetic construct
  source 1..1068: mol_type = other DNA
atggccttaccagtgaccgccttgctcctgccgctggccttgctgctccacgccgccaggccggaagtgcagctgcttgaaagtggcggcggactgattcagcctggcggatctctgagactgagctgtgccgccagcggcttcaccttttctagccacgccatgacctgggtccgacaggcacctggaaaagggcttgaatgggtgtccgccatcagcggctctggcgattacacacactacgccgacagcgtgaagggcagattcaccatcagcagagacaacagcaagaacaccgtgtacctccagatgaacagcctgagagccgaggacagcgccgtgtattattgcgccaaggatgaggatggcggcagcctgcttggacacagaggacaaggcaccctggtcaccgtttcttccacgcgtggaatgaggactgaggatcttcccaaagctgtcgtctttctcgaaccccaatggtatcgggtgctcgaaaaagactctgtgacactgaaatgccaaggggcctactctcccgaggacaactccacacagtggtttcataatgagtccctcatcagctctcaggccagctcttatttcattgatgccgctacagtggacgactccggcgagtatcggtgtcagaccaatctgtctacactgtctgaccccgtgcagcttgaggtccacattggatggttgctcttgcaagccccacgctgggttttcaaagaggaagatccaatccatctgcggtgccacagctggaaaaacaccgctctccacaaagtcacatacctgcaaaatggcaaaggacgcaaatacttccatcacaattccgatttttacattccgaaggctaccctgaaagacagcggcagctatttctgccggggactcgtcggctccaagaatgtgtcctccgaaaccgtgaatatcacgattacccaaggactggctgtgcctacaatctctagcttctttccgcctggataccaagtctccttctgtcttgtgatggtcctcctgtttgctgtggacacaggactgtacttttccgtgaaa

SEQ ID NO: 1325 - DNA, 1071 bp, synthetic construct
  source 1..1071: mol_type = other DNA
atggccttaccagtgaccgccttgctcctgccgctggccttgctgctccacgccgccaggccgcaggttcagctgcaagagtctggcggaggactggttcaggctggcgatagcctgagactgtcttgtgccgcttctggcagagccgtgtccagcctgtttatgggctggtttcggagagcccctggcaaagagagagaactggttgccgccatcagccggtacagcctgtacacctactacgccgacagcgtgaagggcagattcaccatcagcgccgacaacgccaagaacgccgtgtacctccagatgaacagcctgaagcctgaggacacagccgtgtactactgcgccagcaaacttgagtacaccagcaacgactacgacagctggggccagggaacccaagtgacagtctcttctacgcgtggaatgaggactgaggatcttcccaaagctgtcgtctttctcgaaccccaatggtatcgggtgctcgaaaaagactctgtgacactgaaatgccaaggggcctactctcccgaggacaactccacacagtggtttcataatgagtccctcatcagctctcaggccagctcttatttcattgatgccgctacagtggacgactccggcgagtatcggtgtcagaccaatctgtctacactgtctgaccccgtgcagcttgaggtccacattggatggttgctcttgcaagccccacgctgggttttcaaagaggaagatccaatccatctgcggtgccacagctggaaaaacaccgctctccacaaagtcacatacctgcaaaatggcaaaggacgcaaatacttccatcacaattccgatttttacattccgaaggctaccctgaaagacagcggcagctatttctgccggggactcgtcggctccaagaatgtgtcctccgaaaccgtgaatatcacgattacccaaggactggctgtgcctacaatctctagcttctttccgcctggataccaagtctccttctgtcttgtgatggtcctcctgtttgctgtggacacaggactgtacttttccgtgaaa

SEQ ID NO: 1326 - DNA, 1071 bp, synthetic construct
  source 1..1071: mol_type = other DNA
atggccttaccagtgaccgccttgctcctgccgctggccttgctgctccacgccgccaggccggaagttcagctgcaagagtctggcggaggactggttcaacctggcggaagcctgagactgtcttgtgccgcctctggcagaaccttcagcagcctgttcatgggctggttcagacaggcccctggcaaagagagagaactggtcgccgccatcagccggtacagcctgtacacctactacgccgacagcgtgaagggcagattcaccatcagcgccgacaacgccaagaacgccgtgtacctccagatgaacagcctgaagccagaggacacagccgtgtactactgcgccagcaaacttgagtacaccagcaacgactacgacagctggggccagggaacccaagtgacagtctcttctacgcgtggaatgaggactgaggatcttcccaaagctgtcgtctttctcgaaccccaatggtatcgggtgctcgaaaaagactctgtgacactgaaatgccaaggggcctactctcccgaggacaactccacacagtggtttcataatgagtccctcatcagctctcaggccagctcttatttcattgatgccgctacagtggacgactccggcgagtatcggtgtcagaccaatctgtctacactgtctgaccccgtgcagcttgaggtccacattggatggttgctcttgcaagccccacgctgggttttcaaagaggaagatccaatccatctgcggtgccacagctggaaaaacaccgctctccacaaagtcacatacctgcaaaatggcaaaggacgcaaatacttccatcacaattccgatttttacattccgaaggctaccctgaaagacagcggcagctatttctgccggggactcgtcggctccaagaatgtgtcctccgaaaccgtgaatatcacgattacccaaggactggctgtgcctacaatctctagcttctttccgcctggataccaagtctccttctgtcttgtgatggtcctcctgtttgctgtggacacaggactgtacttttccgtgaaa

SEQ ID NO: 1327 - DNA, 1071 bp, synthetic construct
  source 1..1071: mol_type = other DNA
atggccttaccagtgaccgccttgctcctgccgctggccttgctgctccacgccgccaggccggaagttcagctgcaagagtctggcggaggactggttcaacctggcggaagcctgagactgtcttgtgccgcctctggcagaaccttcagcagcctgtttatgggctgggtccgacaggcccctggcaaaggactggaactggtgtctgccatcagccggtacagcctgtacacctactacgccgacagcgtgaagggcagattcaccatcagcagagacaacgccaagaacaccctgtacctccagatgaacagcctgcggcctgaggataccgccgtgtactactgcgccagcaaacttgagtacaccagcaacgactacgacagctggggccagggaacactggtcacagtctcttctacgcgtggaatgaggactgaggatcttcccaaagctgtcgtctttctcgaaccccaatggtatcgggtgctcgaaaaagactctgtgacactgaaatgccaaggggcctactctcccgaggacaactccacacagtggtttcataatgagtccctcatcagctctcaggccagctcttatttcattgatgccgctacagtggacgactccggcgagtatcggtgtcagaccaatctgtctacactgtctgaccccgtgcagcttgaggtccacattggatggttgctcttgcaagccccacgctgggttttcaaagaggaagatccaatccatctgcggtgccacagctggaaaaacaccgctctccacaaagtcacatacctgcaaaatggcaaaggacgcaaatacttccatcacaattccgatttttacattccgaaggctaccctgaaagacagcggcagctatttctgccggggactcgtcggctccaagaatgtgtcctccgaaaccgtgaatatcacgattacccaaggactggctgtgcctacaatctctagcttctttccgcctggataccaagtctccttctgtcttgtgatggtcctcctgtttgctgtggacacaggactgtacttttccgtgaaa

SEQ ID NO: 1328 - DNA, 1095 bp, synthetic construct
  source 1..1095: mol_type = other DNA
atggccttaccagtgaccgccttgctcctgccgctggccttgctgctccacgccgccaggccggaagtgcagctggttgaatctggcggaggactggttcagcctggcggatctctgagactgagctgtgaagccagcggcttcgccagcgacgattacatcatcggctggttcagacaggcccctggcaaagagagagagggcgtcagctgcatcagctctaagtacgccaacaccgtgtacaccgacagcgtgaagggcagattcagactgagcagaggcaccgccaagaataccgtgtacctccagatgagcgccctgaagcctgaggataccgccgtgtactactgcgctatggacagccgcagagtgacatgccctgagatcagcaccatgcaccggaacttcgattcttggggccagggcacactggtcacagtgtcatctacgcgtggaatgaggactgaggatcttcccaaagctgtcgtctttctcgaaccccaatggtatcgggtgctcgaaaaagactctgtgacactgaaatgccaaggggcctactctcccgaggacaactccacacagtggtttcataatgagtccctcatcagctctcaggccagctcttatttcattgatgccgctacagtggacgactccggcgagtatcggtgtcagaccaatctgtctacactgtctgaccccgtgcagcttgaggtccacattggatggttgctcttgcaagccccacgctgggttttcaaagaggaagatccaatccatctgcggtgccacagctggaaaaacaccgctctccacaaagtcacatacctgcaaaatggcaaaggacgcaaatacttccatcacaattccgatttttacattccgaaggctaccctgaaagacagcggcagctatttctgccggggactcgtcggctccaagaatgtgtcctccgaaaccgtgaatatcacgattacccaaggactggctgtgcctacaatctctagcttctttccgcctggataccaagtctccttctgtcttgtgatggtcctcctgtttgctgtggacacaggactgtacttttccgtgaaa

SEQ ID NO: 1329 - DNA, 1095 bp, synthetic construct
  source 1..1095: mol_type = other DNA
atggccttaccagtgaccgccttgctcctgccgctggccttgctgctccacgccgccaggccggaagtgcagctggttgaatctggcggaggactggttcagcctggcggatctctgagactgtcttgtgccgcctctggcttcgccagcgactactatatcatcggctggttcagacaggcccctggcaaagagagagagggcgtcagctgtatcagcagcagatacgccaacaccaactacgccgacagcgtgaagggcagattcaccatcagccgggacaacgccaagaacaccgtgtacctccagatgaacagcctgaagcctgaggacaccgccgtgtactactgtgccgccgacaccagaagatacacctgtcctgacattgccaccatgcaccggaacttcgattcttggggccagggcacactggtcaccgtttcttctacgcgtggaatgaggactgaggatcttcccaaagctgtcgtctttctcgaaccccaatggtatcgggtgctcgaaaaagactctgtgacactgaaatgccaaggggcctactctcccgaggacaactccacacagtggtttcataatgagtccctcatcagctctcaggccagctcttatttcattgatgccgctacagtggacgactccggcgagtatcggtgtcagaccaatctgtctacactgtctgaccccgtgcagcttgaggtccacattggatggttgctcttgcaagccccacgctgggttttcaaagaggaagatccaatccatctgcggtgccacagctggaaaaacaccgctctccacaaagtcacatacctgcaaaatggcaaaggacgcaaatacttccatcacaattccgatttttacattccgaaggctaccctgaaagacagcggcagctatttctgccggggactcgtcggctccaagaatgtgtcctccgaaaccgtgaatatcacgattacccaaggactggctgtgcctacaatctctagcttctttccgcctggataccaagtctccttctgtcttgtgatggtcctcctgtttgctgtggacacaggactgtacttttccgtgaaa

SEQ ID NO: 1330 - DNA, 1083 bp, synthetic construct
  source 1..1083: mol_type = other DNA
atggccttaccagtgaccgccttgctcctgccgctggccttgctgctccacgccgccaggccggaagtgcaactggtggaatctggaggctctctggtgcagccagggggaagcctgagactgtcttgtgccgcttccggcttcaccttcgacgactacgccatgagctgggtgcgccaggtgccaggcaaaggcctggaatgggtgtccagcatcaactggagcggcacccacaccgattacgccgactccgtgaaaggcagattcacaatcagcagaaacaacgccaacaataccctgtacctgcagatgaactccctgaagtctgaggatacagcagtgtattattgcgccaagaactggcgggacgccggcaccacttggtttgagaaaagcggctctgccggacagggaacccaagtgacagtgtcctccacgcgtggaatgaggactgaggatcttcccaaagctgtcgtctttctcgaaccccaatggtatcgggtgctcgaaaaagactctgtgacactgaaatgccaaggggcctactctcccgaggacaactccacacagtggtttcataatgagtccctcatcagctctcaggccagctcttatttcattgatgccgctacagtggacgactccggcgagtatcggtgtcagaccaatctgtctacactgtctgaccccgtgcagcttgaggtccacattggatggttgctcttgcaagccccacgctgggttttcaaagaggaagatccaatccatctgcggtgccacagctggaaaaacaccgctctccacaaagtcacatacctgcaaaatggcaaaggacgcaaatacttccatcacaattccgatttttacattccgaaggctaccctgaaagacagcggcagctatttctgccggggactcgtcggctccaagaatgtgtcctccgaaaccgtgaatatcacgattacccaaggactggctgtgcctacaatctctagcttctttccgcctggataccaagtctccttctgtcttgtgatggtcctcctgtttgctgtggacacaggactgtacttttccgtgaaa

SEQ ID NO: 1331 - DNA, 1065 bp, synthetic construct
  source 1..1065: mol_type = other DNA
atggccttaccagtgaccgccttgctcctgccgctggccttgctgctccacgccgccaggccggaggtgcaactggtggaaagcggcggaggcctggtgcaggctggcggatctctgagactgagctgtgccgccagcggcatcaccttcagcatcaacacaatgggctggtacagacaggcccctggcaagcagagggaactggtggccctgatctccagcatcggcgacacctactacgccgacagcgtgaagggccggttcaccatcagccgggacaacgccaagaacaccgtgtacctccagatgaacagcctgaagcccgaggacaccgccgtgtactactgcaagcggttcagaacagccgcccagggcaccgattattggggccagggaacacaagtgaccgtgtcctctacgcgtggaatgaggactgaggatcttcccaaagctgtcgtctttctcgaaccccaatggtatcgggtgctcgaaaaagactctgtgacactgaaatgccaaggggcctactctcccgaggacaactccacacagtggtttcataatgagtccctcatcagctctcaggccagctcttatttcattgatgccgctacagtggacgactccggcgagtatcggtgtcagaccaatctgtctacactgtctgaccccgtgcagcttgaggtccacattggatggttgctcttgcaagccccacgctgggttttcaaagaggaagatccaatccatctgcggtgccacagctggaaaaacaccgctctccacaaagtcacatacctgcaaaatggcaaaggacgcaaatacttccatcacaattccgatttttacattccgaaggctaccctgaaagacagcggcagctatttctgccggggactcgtcggctccaagaatgtgtcctccgaaaccgtgaatatcacgattacccaaggactggctgtgcctacaatctctagcttctttccgcctggataccaagtctccttctgtcttgtgatggtcctcctgtttgctgtggacacaggactgtacttttccgtgaaa

SEQ ID NO: 1332 - DNA, 1068 bp, synthetic construct
  source 1..1068: mol_type = other DNA
atggccttaccagtgaccgccttgctcctgccgctggccttgctgctccacgccgccaggccggaagtgcaactggtggaatctgggggcggactggtgcagccaggcggaagtctgaggctgtcttgtgccgcctccggcagcatcttcggcttcaacgacatggcctggtatcggcaggctcccggaaaacagcgcgagctggtggctctgattagcagagtgggcgtgaccagcagcgccgactctgtgaagggcagattcacaatctccagagtgaacgccaaggatacagtgtacctccagatgaactctctgaaacctgaggatacagcagtgtactattgctacatggaccagcggctggacggcagcacactggcctactggggacagggaactcaagtgacagtgtctagcacgcgtggaatgaggactgaggatcttcccaaagctgtcgtctttctcgaaccccaatggtatcgggtgctcgaaaaagactctgtgacactgaaatgccaaggggcctactctcccgaggacaactccacacagtggtttcataatgagtccctcatcagctctcaggccagctcttatttcattgatgccgctacagtggacgactccggcgagtatcggtgtcagaccaatctgtctacactgtctgaccccgtgcagcttgaggtccacattggatggttgctcttgcaagccccacgctgggttttcaaagaggaagatccaatccatctgcggtgccacagctggaaaaacaccgctctccacaaagtcacatacctgcaaaatggcaaaggacgcaaatacttccatcacaattccgatttttacattccgaaggctaccctgaaagacagcggcagctatttctgccggggactcgtcggctccaagaatgtgtcctccgaaaccgtgaatatcacgattacccaaggactggctgtgcctacaatctctagcttctttccgcctggataccaagtctccttctgtcttgtgatggtcctcctgtttgctgtggacacaggactgtacttttccgtgaaa

SEQ ID NO: 1333 - DNA, 1071 bp, synthetic construct
  source 1..1071: mol_type = other DNA
atggccttaccagtgaccgccttgctcctgccgctggccttgctgctccacgccgccaggccggacgtgcaactcgtggaatccggcggaggcctggtgcagcctggcggatctctgagactgagctgtgccgccagcggctctatcggcggactgaatgccatggcctggtacagacaggcccctggcaaagaacgggaactggtggccggcatctttggcgtgggcagcaccagatacgccgacagcgtgaagggccggttcaccatcagccgggacaacagcaagaacaccgtgtacctgcagatgaacagcctgcggcccgaggataccgccgtgtactactgcagaatgtccagcgtgaccagaggctccagcgactactggggccagggaacacttgtgaccgtgtccagtctcgagacgcgtggaatgaggactgaggatcttcccaaagctgtcgtctttctcgaaccccaatggtatcgggtgctcgaaaaagactctgtgacactgaaatgccaaggggcctactctcccgaggacaactccacacagtggtttcataatgagtccctcatcagctctcaggccagctcttatttcattgatgccgctacagtggacgactccggcgagtatcggtgtcagaccaatctgtctacactgtctgaccccgtgcagcttgaggtccacattggatggttgctcttgcaagccccacgctgggttttcaaagaggaagatccaatccatctgcggtgccacagctggaaaaacaccgctctccacaaagtcacatacctgcaaaatggcaaaggacgcaaatacttccatcacaattccgatttttacattccgaaggctaccctgaaagacagcggcagctatttctgccggggactcgtcggctccaagaatgtgtcctccgaaaccgtgaatatcacgattacccaaggactggctgtgcctacaatctctagcttctttccgcctggataccaagtctccttctgtcttgtgatggtcctcctgtttgctgtggacacaggactgtacttttccgtgaaa

SEQ ID NO: 1334 - DNA, 1086 bp, synthetic construct
  source 1..1086: mol_type = other DNA
atggccttaccagtgaccgccttgctcctgccgctggccttgctgctccacgccgccaggccggaagtgcaactggtggagtccggcggtggactggtacagcctgggggttcactgcgcctgtcctgcgccgccagcggaagaacctattacctcaatgctatgggttggttccgccaggccccaggaaaggagcgcgagttcgtggcggctattgactggtccgaggggaacaaggactatgctgattccgtgaagggcaggtttaccatcagccgggataattcaaaaaatactgtttatttgcagatgaactctcttagaccagaagacactgctgtctattactgcgccgctgacacccctccttggggaccactgatttatatcgaaagctatgattcctgggggcagggcacactcgtcaccgtgagtagcacgcgtggaatgaggactgaggatcttcccaaagctgtcgtctttctcgaaccccaatggtatcgggtgctcgaaaaagactctgtgacactgaaatgccaaggggcctactctcccgaggacaactccacacagtggtttcataatgagtccctcatcagctctcaggccagctcttatttcattgatgccgctacagtggacgactccggcgagtatcggtgtcagaccaatctgtctacactgtctgaccccgtgcagcttgaggtccacattggatggttgctcttgcaagccccacgctgggttttcaaagaggaagatccaatccatctgcggtgccacagctggaaaaacaccgctctccacaaagtcacatacctgcaaaatggcaaaggacgcaaatacttccatcacaattccgatttttacattccgaaggctaccctgaaagacagcggcagctatttctgccggggactcgtcggctccaagaatgtgtcctccgaaaccgtgaatatcacgattacccaaggactggctgtgcctacaatctctagcttctttccgcctggataccaagtctccttctgtcttgtgatggtcctcctgtttgctgtggacacaggactgtacttttccgtgaaa

SEQ ID NO: 1335 - DNA, 1080 bp, synthetic construct
  source 1..1080: mol_type = other DNA
atggccttaccagtgaccgccttgctcctgccgctggccttgctgctccacgccgccaggccggaggtgcaactggtggaatccgggggaggcagcgtgcaggctgggggatcactgagactgtcttgtgctgcctccggcgacacctacggcagctattggatgggatggtttcggcaggctcccggaaaagaacgggaaggcgtggccgccatcaacagaggcggcggatacaccgtgtacgccgactctgtgaagggcagattcacaatctccagagacacagccaagaatactgtgtacctgcagatgaactccctgcgccccgacgataccgccgactattattgcgccgcttccggcgtgctgggcggcctgcatgaggactggttcaattattggggacagggaacacttgtgacagtgtccagcacgcgtggaatgaggactgaggatcttcccaaagctgtcgtctttctcgaaccccaatggtatcgggtgctcgaaaaagactctgtgacactgaaatgccaaggggcctactctcccgaggacaactccacacagtggtttcataatgagtccctcatcagctctcaggccagctcttatttcattgatgccgctacagtggacgactccggcgagtatcggtgtcagaccaatctgtctacactgtctgaccccgtgcagcttgaggtccacattggatggttgctcttgcaagccccacgctgggttttcaaagaggaagatccaatccatctgcggtgccacagctggaaaaacaccgctctccacaaagtcacatacctgcaaaatggcaaaggacgcaaatacttccatcacaattccgatttttacattccgaaggctaccctgaaagacagcggcagctatttctgccggggactcgtcggctccaagaatgtgtcctccgaaaccgtgaatatcacgattacccaaggactggctgtgcctacaatctctagcttctttccgcctggataccaagtctccttctgtcttgtgatggtcctcctgtttgctgtggacacaggactgtacttttccgtgaaa

SEQ ID NO: 1336 - DNA, 1077 bp, synthetic construct
  source 1..1077: mol_type = other DNA
atggccttaccagtgaccgccttgctcctgccgctggccttgctgctccacgccgccaggccggttcagctcgtggaaagcggtggcggaagtgtgcaggccggaggcagtttgcgcctgagctgcgctgcttccggcgatacatacgggtcttactggatgggctggtttaggcaggcacctggacaagaaagagaagctgtggccgctattaacaggggaggtggctataccgtttatgctgattccgtgaagggccgattcacaatctcccgggataacgccaaaaacactctgtacctgcagatgaactcccttaggcccgatgacacagccgattactattgtgcggcctccggcgtgctgggtggtctgcatgaggattggttcaactactgggggcaaggcaccctcgtaaccgtgagtagcacgcgtggaatgaggactgaggatcttcccaaagctgtcgtctttctcgaaccccaatggtatcgggtgctcgaaaaagactctgtgacactgaaatgccaaggggcctactctcccgaggacaactccacacagtggtttcataatgagtccctcatcagctctcaggccagctcttatttcattgatgccgctacagtggacgactccggcgagtatcggtgtcagaccaatctgtctacactgtctgaccccgtgcagcttgaggtccacattggatggttgctcttgcaagccccacgctgggttttcaaagaggaagatccaatccatctgcggtgccacagctggaaaaacaccgctctccacaaagtcacatacctgcaaaatggcaaaggacgcaaatacttccatcacaattccgatttttacattccgaaggctaccctgaaagacagcggcagctatttctgccggggactcgtcggctccaagaatgtgtcctccgaaaccgtgaatatcacgattacccaaggactggctgtgcctacaatctctagcttctttccgcctggataccaagtctccttctgtcttgtgatggtcctcctgtttgctgtggacacaggactgtacttttccgtgaaa

SEQ ID NO: 1337 - DNA, 1083 bp, synthetic construct
  source 1..1083: mol_type = other DNA
atggccttaccagtgaccgccttgctcctgccgctggccttgctgctccacgccgccaggccggaggtgcaactggtggaaagcggcggaggctctgtgcagacaggcggctctctgagactgacctgtgccgccagcggcagaaccagcagatcctatggcatgggctggttcagacaggcccctggcaaagaacgcgagttcgtgtccggcatctcttggagaggcgacagcaccggctacgccgatagcgtgaagggccggttcaccatcagccgggacaacgccaagaacaccgtggacctgcagatgaacagcctgaagcccgaggacaccgccatctactactgtgccgctgccgccggatctgcttggtacggcacactgtacgagtacgactactggggccagggcacccttgtgaccgtgtcatctacgcgtggaatgaggactgaggatcttcccaaagctgtcgtctttctcgaaccccaatggtatcgggtgctcgaaaaagactctgtgacactgaaatgccaaggggcctactctcccgaggacaactccacacagtggtttcataatgagtccctcatcagctctcaggccagctcttatttcattgatgccgctacagtggacgactccggcgagtatcggtgtcagaccaatctgtctacactgtctgaccccgtgcagcttgaggtccacattggatggttgctcttgcaagccccacgctgggttttcaaagaggaagatccaatccatctgcggtgccacagctggaaaaacaccgctctccacaaagtcacatacctgcaaaatggcaaaggacgcaaatacttccatcacaattccgatttttacattccgaaggctaccctgaaagacagcggcagctatttctgccggggactcgtcggctccaagaatgtgtcctccgaaaccgtgaatatcacgattacccaaggactggctgtgcctacaatctctagcttctttccgcctggataccaagtctccttctgtcttgtgatggtcctcctgtttgctgtggacacaggactgtacttttccgtgaaa

SEQ ID NO: 1338 - DNA, 1083 bp, synthetic construct
  source 1..1083: mol_type = other DNA
atggccttaccagtgaccgccttgctcctgccgctggccttgctgctccacgccgccaggccggaggtgcagctcgtagaatctggaggtggttccgtgcaagccggaggatcattgcgactgacctgcgcagcgagcggatctacttctcgctcttacggtatgggatggttcagacaggctcctgggaaagagcgcgagttcgtttcaggcatctcctggaggggggacagcaccggctacgcagatagcgtgaagggcaggttcacgatcagccgagacaacgccaaaaacaccgtcgatctgcaaatgaatagtctgaagcccgaagatactgcgatctactactgtgccgccgcagcagggtccacctggtacggcacactctacgagtacgactactgggggcagggaaccctggtaaccgtgtcctctacgcgtggaatgaggactgaggatcttcccaaagctgtcgtctttctcgaaccccaatggtatcgggtgctcgaaaaagactctgtgacactgaaatgccaaggggcctactctcccgaggacaactccacacagtggtttcataatgagtccctcatcagctctcaggccagctcttatttcattgatgccgctacagtggacgactccggcgagtatcggtgtcagaccaatctgtctacactgtctgaccccgtgcagcttgaggtccacattggatggttgctcttgcaagccccacgctgggttttcaaagaggaagatccaatccatctgcggtgccacagctggaaaaacaccgctctccacaaagtcacatacctgcaaaatggcaaaggacgcaaatacttccatcacaattccgatttttacattccgaaggctaccctgaaagacagcggcagctatttctgccggggactcgtcggctccaagaatgtgtcctccgaaaccgtgaatatcacgattacccaaggactggctgtgcctacaatctctagcttctttccgcctggataccaagtctccttctgtcttgtgatggtcctcctgtttgctgtggacacaggactgtacttttccgtgaaa

SEQ ID NO: 1339 - DNA, 1086 bp, synthetic construct
  source 1..1086: mol_type = other DNA
atggccttaccagtgaccgccttgctcctgccgctggccttgctgctccacgccgccaggccggatgttcagttggtggagtctggtggcggtttggtgcagccaggtggctccctgcgactcagttgtgcagcctccgggttcattctggattactacgctattggttggtttcgacaggcccccggaaaggagagagagggcgtgctctgcattgatgccagcgacgacattacctactacgccgattctgtgaagggccgcttcaccatcagtagagacaatagcaagaatacagtctacctgcagatgaactccctgcgcccagaagacactgccgtctactactgtgctacccctatcgggctttcttcctcttgccttctcgaatatgactacgattactgggggcaggggacgctggtcaccgtgtctagcacgcgtggaatgaggactgaggatcttcccaaagctgtcgtctttctcgaaccccaatggtatcgggtgctcgaaaaagactctgtgacactgaaatgccaaggggcctactctcccgaggacaactccacacagtggtttcataatgagtccctcatcagctctcaggccagctcttatttcattgatgccgctacagtggacgactccggcgagtatcggtgtcagaccaatctgtctacactgtctgaccccgtgcagcttgaggtccacattggatggttgctcttgcaagccccacgctgggttttcaaagaggaagatccaatccatctgcggtgccacagctggaaaaacaccgctctccacaaagtcacatacctgcaaaatggcaaaggacgcaaatacttccatcacaattccgatttttacattccgaaggctaccctgaaagacagcggcagctatttctgccggggactcgtcggctccaagaatgtgtcctccgaaaccgtgaatatcacgattacccaaggactggctgtgcctacaatctctagcttctttccgcctggataccaagtctccttctgtcttgtgatggtcctcctgtttgctgtggacacaggactgtacttttccgtgaaa

SEQ ID NO: 1340 - DNA, 1089 bp, synthetic construct
  source 1..1089: mol_type = other DNA
atggccttaccagtgaccgccttgctcctgccgctggccttgctgctccacgccgccaggccggaggtgcaactggtggaaagcggcggaggactggtgcaggctggcgatagcctgagactgagctgtgccgcctccggcagagccttcagcagatatgccatgggctggttcagacaggcccctggcaaagaacgcgagttcgtggccgccatcggctggggacctagcaagaccaactacgccgacagcgtgaagggccggttcaccatcagccgggacaacgccaagaacaccgtgtacctgcagatgaacaccctgaagcccgaggacaccgccgtgtactcttgcgccgccaagttcgtgaacaccgacagcacctggtcccgcagcgagatgtacacctattggggccagggcaccctcgtgaccgtgtctagtacgcgtggaatgaggactgaggatcttcccaaagctgtcgtctttctcgaaccccaatggtatcgggtgctcgaaaaagactctgtgacactgaaatgccaaggggcctactctcccgaggacaactccacacagtggtttcataatgagtccctcatcagctctcaggccagctcttatttcattgatgccgctacagtggacgactccggcgagtatcggtgtcagaccaatctgtctacactgtctgaccccgtgcagcttgaggtccacattggatggttgctcttgcaagccccacgctgggttttcaaagaggaagatccaatccatctgcggtgccacagctggaaaaacaccgctctccacaaagtcacatacctgcaaaatggcaaaggacgcaaatacttccatcacaattccgatttttacattccgaaggctaccctgaaagacagcggcagctatttctgccggggactcgtcggctccaagaatgtgtcctccgaaaccgtgaatatcacgattacccaaggactggctgtgcctacaatctctagcttctttccgcctggataccaagtctccttctgtcttgtgatggtcctcctgtttgctgtggacacaggactgtacttttccgtgaaa

SEQ ID NO: 1341 - DNA, 1077 bp, synthetic construct
  source 1..1077: mol_type = other DNA
atggccttaccagtgaccgccttgctcctgccgctggccttgctgctccacgccgccaggccggaggtgcagctggtagaatccggcgggggacttgtacaggctggtggtagtctgagactgagctgtgtggcctccggcatcagcagcagcaagcggaacatgggatggtataggcaagcccctggtaagcagagggaatccgtggctacaatcagcagcggcggcaacaaggactacaccgacgccgtgaaggacaggttcaccatctccagggacaccaccaagaacaccgtgtacctgcagatgaactccctcaagcccgaggacaccgccgtgtactactgcaagatcgaggccggcacaggctgggccaccagaagaggctacacatactgggggcagggaacactggtgaccgtgagctccacgcgtggaatgaggactgaggatcttcccaaagctgtcgtctttctcgaaccccaatggtatcgggtgctcgaaaaagactctgtgacactgaaatgccaaggggcctactctcccgaggacaactccacacagtggtttcataatgagtccctcatcagctctcaggccagctcttatttcattgatgccgctacagtggacgactccggcgagtatcggtgtcagaccaatctgtctacactgtctgaccccgtgcagcttgaggtccacattggatggttgctcttgcaagccccacgctgggttttcaaagaggaagatccaatccatctgcggtgccacagctggaaaaacaccgctctccacaaagtcacatacctgcaaaatggcaaaggacgcaaatacttccatcacaattccgatttttacattccgaaggctaccctgaaagacagcggcagctatttctgccggggactcgtcggctccaagaatgtgtcctccgaaaccgtgaatatcacgattacccaaggactggctgtgcctacaatctctagcttctttccgcctggataccaagtctccttctgtcttgtgatggtcctcctgtttgctgtggacacaggactgtacttttccgtgaaa

SEQ ID NO: 1342 - DNA, 1047 bp, synthetic construct
  source 1..1047: mol_type = other DNA
atggccttaccagtgaccgccttgctcctgccgctggccttgctgctccacgccgccaggccgcaggtgcaactggtgcagtctggcggagggctggtgcagccagggggatctctgagactgagctgtgccgccagcgacttcgacttcgccgcctacgagatgagctgggtgcgccaggctcctggacagggactggaatgggtggccatcatcagccacgacggcatcgacaagtattacaccgacagcgtgaagggccggttcaccatcagccgggacaacagcaagaacaccctgtacctgcagatgaataccctgcgggccgaggacaccgccacctactattgcctgagactgggagccgtgggccagggcacacttgtgacagtgtctagcacgcgtggaatgaggactgaggatcttcccaaagctgtcgtctttctcgaaccccaatggtatcgggtgctcgaaaaagactctgtgacactgaaatgccaaggggcctactctcccgaggacaactccacacagtggtttcataatgagtccctcatcagctctcaggccagctcttatttcattgatgccgctacagtggacgactccggcgagtatcggtgtcagaccaatctgtctacactgtctgaccccgtgcagcttgaggtccacattggatggttgctcttgcaagccccacgctgggttttcaaagaggaagatccaatccatctgcggtgccacagctggaaaaacaccgctctccacaaagtcacatacctgcaaaatggcaaaggacgcaaatacttccatcacaattccgatttttacattccgaaggctaccctgaaagacagcggcagctatttctgccggggactcgtcggctccaagaatgtgtcctccgaaaccgtgaatatcacgattacccaaggactggctgtgcctacaatctctagcttctttccgcctggataccaagtctccttctgtcttgtgatggtcctcctgtttgctgtggacacaggactgtacttttccgtgaaa

SEQ ID NO: 1343 - DNA, 1071 bp, synthetic construct
  source 1..1071: mol_type = other DNA
atggccttaccagtgaccgccttgctcctgccgctggccttgctgctccacgccgccaggccgcaggtgcaactggtgcagagcggaggcggactggtgcagcctgggggcagtctgaggctgtcttgtgccgcctccgatttcgccttcgatgattacgagatgtcttgggtgcggcaggccccaggcaaagccctggaatggatcggcgacatcaaccacagcggcaccaccatctacaaccccagcctgaagtccagagtgaccatctccagagacaactccaagaatactctgtacctgcagatgaacacactgagagccgaagatacagccatctactactgcgccagaccccactacggcgactacagcgacgccttcgacatctggggccagggaaccatggtcaccgtgtcctctacgcgtggaatgaggactgaggatcttcccaaagctgtcgtctttctcgaaccccaatggtatcgggtgctcgaaaaagactctgtgacactgaaatgccaaggggcctactctcccgaggacaactccacacagtggtttcataatgagtccctcatcagctctcaggccagctcttatttcattgatgccgctacagtggacgactccggcgagtatcggtgtcagaccaatctgtctacactgtctgaccccgtgcagcttgaggtccacattggatggttgctcttgcaagccccacgctgggttttcaaagaggaagatccaatccatctgcggtgccacagctggaaaaacaccgctctccacaaagtcacatacctgcaaaatggcaaaggacgcaaatacttccatcacaattccgatttttacattccgaaggctaccctgaaagacagcggcagctatttctgccggggactcgtcggctccaagaatgtgtcctccgaaaccgtgaatatcacgattacccaaggactggctgtgcctacaatctctagcttctttccgcctggataccaagtctccttctgtcttgtgatggtcctcctgtttgctgtggacacaggactgtacttttccgtgaaa

SEQ ID NO: 1344 - DNA, 1056 bp, synthetic construct
  source 1..1056: mol_type = other DNA
atggccttaccagtgaccgccttgctcctgccgctggccttgctgctccacgccgccaggccggaggtgcagctcgtggaatcaggcggaggtcttgtacagccaggaaattctcttcggctgtcttgcgccgcgagcgggttcaccttcagcagcttcggaatgagctgggtaagacaggcaccggggaaaggcctggagtgggtgagctcaatcagtgggagcgggtcagataccctgtacgcggattccgtgaagggcagattcacaatctctcgggacaatgctaagacaacactttaccttcagatgaactctctgcgacccgaggataccgctgtctactactgtacaataggaggttctctgtccagaagttctcaagggacactggtgaccgtctccagcacgcgtggaatgaggactgaggatcttcccaaagctgtcgtctttctcgaaccccaatggtatcgggtgctcgaaaaagactctgtgacactgaaatgccaaggggcctactctcccgaggacaactccacacagtggtttcataatgagtccctcatcagctctcaggccagctcttatttcattgatgccgctacagtggacgactccggcgagtatcggtgtcagaccaatctgtctacactgtctgaccccgtgcagcttgaggtccacattggatggttgctcttgcaagccccacgctgggttttcaaagaggaagatccaatccatctgcggtgccacagctggaaaaacaccgctctccacaaagtcacatacctgcaaaatggcaaaggacgcaaatacttccatcacaattccgatttttacattccgaaggctaccctgaaagacagcggcagctatttctgccggggactcgtcggctccaagaatgtgtcctccgaaaccgtgaatatcacgattacccaaggactggctgtgcctacaatctctagcttctttccgcctggataccaagtctccttctgtcttgtgatggtcctcctgtttgctgtggacacaggactgtacttttccgtgaaa

SEQ ID NO: 1345 - DNA, 1059 bp, synthetic construct
  source 1..1059: mol_type = other DNA
atggccttaccagtgaccgccttgctcctgccgctggccttgctgctccacgccgccaggccggaagttcaactggtggaatccggtggaggactggtgcaagcgggcggctcactgcgccttagctgtgctgccagcggcagtatcttcagcggcaatgtaatgggttggtacaggcgacaagccccaggcaaggagcgagagtgggtagccgcgattgcaagtgggggcagcatctactacagagattctgtgaaaggccgcttcactattagtcgggacaacgcaaaaaacacggtgtatctccaaatgaacagcttgaagccagaggacactgctgtctactattgtaacagtcatcccccaactctcccctattgggggctgggcactcaggtcaccgtgagttccacgcgtggaatgaggactgaggatcttcccaaagctgtcgtctttctcgaaccccaatggtatcgggtgctcgaaaaagactctgtgacactgaaatgccaaggggcctactctcccgaggacaactccacacagtggtttcataatgagtccctcatcagctctcaggccagctcttatttcattgatgccgctacagtggacgactccggcgagtatcggtgtcagaccaatctgtctacactgtctgaccccgtgcagcttgaggtccacattggatggttgctcttgcaagccccacgctgggttttcaaagaggaagatccaatccatctgcggtgccacagctggaaaaacaccgctctccacaaagtcacatacctgcaaaatggcaaaggacgcaaatacttccatcacaattccgatttttacattccgaaggctaccctgaaagacagcggcagctatttctgccggggactcgtcggctccaagaatgtgtcctccgaaaccgtgaatatcacgattacccaaggactggctgtgcctacaatctctagcttctttccgcctggataccaagtctccttctgtcttgtgatggtcctcctgtttgctgtggacacaggactgtacttttccgtgaaa

SEQ ID NO: 1346 - DNA, 1089 bp, synthetic construct
  source 1..1089: mol_type = other DNA
atggccttaccagtgaccgccttgctcctgccgctggccttgctgctccacgccgccaggccggaagtgcaactggtggaatctggagggggaagcgtgcaggcaggcggatctctgagactgtcctgcaccacatctggcagagccctgaatatgtacgtgatgggatggtttcggcaggctcccggcaacgagcgggaatttgtggccgctacaagcagcagcggcggcagcacaagctaccccgattctgtgaagggcagattcacaatctcccgcgataatgccaagaatactgtgtacctgcagatgaatagtctgaagcctgaagatacagccgcctacagatgtgccgccagcccctacgtgtccacccccaccatgaacatcctggaagagtacagatactggggcctgggaacacaagtgacagtgtccagcacgcgtggaatgaggactgaggatcttcccaaagctgtcgtctttctcgaaccccaatggtatcgggtgctcgaaaaagactctgtgacactgaaatgccaaggggcctactctcccgaggacaactccacacagtggtttcataatgagtccctcatcagctctcaggccagctcttatttcattgatgccgctacagtggacgactccggcgagtatcggtgtcagaccaatctgtctacactgtctgaccccgtgcagcttgaggtccacattggatggttgctcttgcaagccccacgctgggttttcaaagaggaagatccaatccatctgcggtgccacagctggaaaaacaccgctctccacaaagtcacatacctgcaaaatggcaaaggacgcaaatacttccatcacaattccgatttttacattccgaaggctaccctgaaagacagcggcagctatttctgccggggactcgtcggctccaagaatgtgtcctccgaaaccgtgaatatcacgattacccaaggactggctgtgcctacaatctctagcttctttccgcctggataccaagtctccttctgtcttgtgatggtcctcctgtttgctgtggacacaggactgtacttttccgtgaaa

SEQ ID NO: 1347 - DNA, 1074 bp, synthetic construct
  source 1..1074: mol_type = other DNA
atggccttaccagtgaccgccttgctcctgccgctggccttgctgctccacgccgccaggccggaggttcagttggtcgaatcaggcgggggcctcgtccaacccggcggaagcctgcggctgtcttgcgcagcaagtggtagtgtgttcaagatcaacgttatggcctggtatcgccaggctccgggaaaagggagagagctggttgcggggatcattagcggtggctccaccagctacgctgacagtgtgaagggaaggttcactatatcacgcgacaacgcaaagaatacattgtacctccagatgaatagcttgcggcccgaagacacggcagtctactattgtgcctttatcacaacagagagcgactatgacctgggccgccggtattgggggcagggaacccttgtgaccgtttcatccacgcgtggaatgaggactgaggatcttcccaaagctgtcgtctttctcgaaccccaatggtatcgggtgctcgaaaaagactctgtgacactgaaatgccaaggggcctactctcccgaggacaactccacacagtggtttcataatgagtccctcatcagctctcaggccagctcttatttcattgatgccgctacagtggacgactccggcgagtatcggtgtcagaccaatctgtctacactgtctgaccccgtgcagcttgaggtccacattggatggttgctcttgcaagccccacgctgggttttcaaagaggaagatccaatccatctgcggtgccacagctggaaaaacaccgctctccacaaagtcacatacctgcaaaatggcaaaggacgcaaatacttccatcacaattccgatttttacattccgaaggctaccctgaaagacagcggcagctatttctgccggggactcgtcggctccaagaatgtgtcctccgaaaccgtgaatatcacgattacccaaggactggctgtgcctacaatctctagcttctttccgcctggataccaagtctccttctgtcttgtgatggtcctcctgtttgctgtggacacaggactgtacttttccgtgaaa

SEQ ID NO: 1348 - DNA, 1509 bp, synthetic construct
  source 1..1509: mol_type = other DNA
atggccttaccagtgaccgccttgctcctgccgctggccttgctgctccacgccgccaggccggaggtgcaactggtggaaagcggcggaggctctgtgcagacaggcggctctctgagactgacctgtgccgccagcggcagaaccagcagatcctatggcatgggctggttcagacaggcccctggcaaagaacgcgagttcgtgtccggcatctcttggagaggcgacagcaccggctacgccgatagcgtgaagggccggttcaccatcagccgggacaacgccaagaacaccgtggacctgcagatgaacagcctgaagcccgaggacaccgccatctactactgtgccgctgccgccggatctgcttggtacggcacactgtacgagtacgactactggggccagggcacccttgtgaccgtgtcatctctcgagggcggaggcggaagtggaggcggaggatctggcggcggaggctctttcgaagaggtgcaactggtggaatccgggggaggcagcgtgcaggctgggggatcactgagactgtcttgtgctgcctccggcgacacctacggcagctattggatgggatggtttcggcaggctcccggaaaagaacgggaaggcgtggccgccatcaacagaggcggcggatacaccgtgtacgccgactctgtgaagggcagattcacaatctccagagacacagccaagaatactgtgtacctgcagatgaactccctgcgccccgacgataccgccgactattattgcgccgcttccggcgtgctgggcggcctgcatgaggactggttcaattattggggacagggaacacttgtgacagtgtccagcacgcgtggaatgaggactgaggatcttcccaaagctgtcgtctttctcgaaccccaatggtatcgggtgctcgaaaaagactctgtgacactgaaatgccaaggggcctactctcccgaggacaactccacacagtggtttcataatgagtccctcatcagctctcaggccagctcttatttcattgatgccgctacagtggacgactccggcgagtatcggtgtcagaccaatctgtctacactgtctgaccccgtgcagcttgaggtccacattggatggttgctcttgcaagccccacgctgggttttcaaagaggaagatccaatccatctgcggtgccacagctggaaaaacaccgctctccacaaagtcacatacctgcaaaatggcaaaggacgcaaatacttccatcacaattccgatttttacattccgaaggctaccctgaaagacagcggcagctatttctgccggggactcgtcggctccaagaatgtgtcctccgaaaccgtgaatatcacgattacccaaggactggctgtgcctacaatctctagcttctttccgcctggataccaagtctccttctgtcttgtgatggtcctcctgtttgctgtggacacaggactgtacttttccgtgaaa

SEQ ID NO: 1349 - DNA, 1566 bp, synthetic construct
  source 1..1566: mol_type = other DNA
atggccttaccagtgaccgccttgctcctgccgctggccttgctgctccacgccgccaggccggaggtgcagctcgtagaatctggaggtggttccgtgcaagccggaggatcattgcgactgacctgcgcagcgagcggatctacttctcgctcttacggtatgggatggttcagacaggctcctgggaaagagcgcgagttcgtttcaggcatctcctggaggggggacagcaccggctacgcagatagcgtgaagggcaggttcacgatcagccgagacaacgccaaaaacaccgtcgatctgcaaatgaatagtctgaagcccgaagatactgcgatctactactgtgccgccgcagcagggtccacctggtacggcacactctacgagtacgactactgggggcagggaaccctggtaaccgtgtcctctctcgagggaggaggcggctccgggggaggcggaagtggaggcggaggatctgggtctggaggaagcggatctggaggctcagggtcagggggctcaggcagtggaggctctttcgaagttcagctcgtggaaagcggtggcggaagtgtgcaggccggaggcagtttgcgcctgagctgcgctgcttccggcgatacatacgggtcttactggatgggctggtttaggcaggcacctggacaagaaagagaagctgtggccgctattaacaggggaggtggctataccgtttatgctgattccgtgaagggccgattcacaatctcccgggataacgccaaaaacactctgtacctgcagatgaactcccttaggcccgatgacacagccgattactattgtgcggcctccggcgtgctgggtggtctgcatgaggattggttcaactactgggggcaaggcaccctcgtaaccgtgagtagcacgcgtggaatgaggactgaggatcttcccaaagctgtcgtctttctcgaaccccaatggtatcgggtgctcgaaaaagactctgtgacactgaaatgccaaggggcctactctcccgaggacaactccacacagtggtttcataatgagtccctcatcagctctcaggccagctcttatttcattgatgccgctacagtggacgactccggcgagtatcggtgtcagaccaatctgtctacactgtctgaccccgtgcagcttgaggtccacattggatggttgctcttgcaagccccacgctgggttttcaaagaggaagatccaatccatctgcggtgccacagctggaaaaacaccgctctccacaaagtcacatacctgcaaaatggcaaaggacgcaaatacttccatcacaattccgatttttacattccgaaggctaccctgaaagacagcggcagctatttctgccggggactcgtcggctccaagaatgtgtcctccgaaaccgtgaatatcacgattacccaaggactggctgtgcctacaatctctagcttctttccgcctggataccaagtctccttctgtcttgtgatggtcctcctgtttgctgtggacacaggactgtacttttccgtgaaa

SEQ ID NO: 1350 - DNA, 1536 bp, synthetic construct
  source 1..1536: mol_type = other DNA
atggccttaccagtgaccgccttgctcctgccgctggccttgctgctccacgccgccaggccggaggtgcaactggtggaaagcggcggaggcctggtgcaggctggcggatctctgagactgagctgtgccgccagcggcatcaccttcagcatcaacacaatgggctggtacagacaggcccctggcaagcagagggaactggtggccctgatctccagcatcggcgacacctactacgccgacagcgtgaagggccggttcaccatcagccgggacaacgccaagaacaccgtgtacctccagatgaacagcctgaagcccgaggacaccgccgtgtactactgcaagcggttcagaacagccgcccagggcaccgattattggggccagggaacacaagtgaccgtgtcctctctcgagggaggaggcggctccgggggaggcggaagtggaggcggaggatctgggtctggaggaagcggatctggaggctcagggtcagggggctcaggcagtggaggctctttcgaagtgcaactggtggaatctgggggcggactggtgcagccaggcggaagtctgaggctgtcttgtgccgcctccggcagcatcttcggcttcaacgacatggcctggtatcggcaggctcccggaaaacagcgcgagctggtggctctgattagcagagtgggcgtgaccagcagcgccgactctgtgaagggcagattcacaatctccagagtgaacgccaaggatacagtgtacctccagatgaactctctgaaacctgaggatacagcagtgtactattgctacatggaccagcggctggacggcagcacactggcctactggggacagggaactcaagtgacagtgtctagcacgcgtggaatgaggactgaggatcttcccaaagctgtcgtctttctcgaaccccaatggtatcgggtgctcgaaaaagactctgtgacactgaaatgccaaggggcctactctcccgaggacaactccacacagtggtttcataatgagtccctcatcagctctcaggccagctcttatttcattgatgccgctacagtggacgactccggcgagtatcggtgtcagaccaatctgtctacactgtctgaccccgtgcagcttgaggtccacattggatggttgctcttgcaagccccacgctgggttttcaaagaggaagatccaatccatctgcggtgccacagctggaaaaacaccgctctccacaaagtcacatacctgcaaaatggcaaaggacgcaaatacttccatcacaattccgatttttacattccgaaggctaccctgaaagacagcggcagctatttctgccggggactcgtcggctccaagaatgtgtcctccgaaaccgtgaatatcacgattacccaaggactggctgtgcctacaatctctagcttctttccgcctggataccaagtctccttctgtcttgtgatggtcctcctgtttgctgtggacacaggactgtacttttccgtgaaa

SEQ ID NO: 1351 - DNA, 1437 bp, synthetic construct; identical to SEQ ID NO: 1166
  source 1..1437: mol_type = other DNA

SEQ ID NO: 1352 - DNA, 1551 bp, synthetic construct
  source 1..1551: mol_type = other DNA
atggccttaccagtgaccgccttgctcctgccgctggccttgctgctccacgccgccaggccggacgtgcaactcgtggaatccggcggaggcctggtgcagcctggcggatctctgagactgagctgtgccgccagcggctctatcggcggactgaatgccatggcctggtacagacaggcccctggcaaagaacgggaactggtggccggcatctttggcgtgggcagcaccagatacgccgacagcgtgaagggccggttcaccatcagccgggacaacagcaagaacaccgtgtacctgcagatgaacagcctgcggcccgaggataccgccgtgtactactgcagaatgtccagcgtgaccagaggctccagcgactactggggccagggaacacttgtgaccgtgtccagtctcgagggaggaggcggctccgggggaggcggaagtggaggcggaggatctgggtctggaggaagcggatctggaggctcagggtcagggggctcaggcagtggaggctctttcgaagtgcaactggtggaatctggaggctctctggtgcagccagggggaagcctgagactgtcttgtgccgcttccggcttcaccttcgacgactacgccatgagctgggtgcgccaggtgccaggcaaaggcctggaatgggtgtccagcatcaactggagcggcacccacaccgattacgccgactccgtgaaaggcagattcacaatcagcagaaacaacgccaacaataccctgtacctgcagatgaactccctgaagtctgaggatacagcagtgtattattgcgccaagaactggcgggacgccggcaccacttggtttgagaaaagcggctctgccggacagggaacccaagtgacagtgtcctccacgcgtggaatgaggactgaggatcttcccaaagctgtcgtctttctcgaaccccaatggtatcgggtgctcgaaaaagactctgtgacactgaaatgccaaggggcctactctcccgaggacaactccacacagtggtttcataatgagtccctcatcagctctcaggccagctcttatttcattgatgccgctacagtggacgactccggcgagtatcggtgtcagaccaatctgtctacactgtctgaccccgtgcagcttgaggtccacattggatggttgctcttgcaagccccacgctgggttttcaaagaggaagatccaatccatctgcggtgccacagctggaaaaacaccgctctccacaaagtcacatacctgcaaaatggcaaaggacgcaaatacttccatcacaattccgatttttacattccgaaggctaccctgaaagacagcggcagctatttctgccggggactcgtcggctccaagaatgtgtcctccgaaaccgtgaatatcacgattacccaaggactggctgtgcctacaatctctagcttctttccgcctggataccaagtctccttctgtcttgtgatggtcctcctgtttgctgtggacacaggactgtacttttccgtgaaa

SEQ ID NO: 1353 - DNA, 1575 bp, synthetic construct
  source 1..1575: mol_type = other DNA
atggccttaccagtgaccgccttgctcctgccgctggccttgctgctccacgccgccaggccggatgttcagttggtggagtctggtggcggtttggtgcagccaggtggctccctgcgactcagttgtgcagcctccgggttcattctggattactacgctattggttggtttcgacaggcccccggaaaggagagagagggcgtgctctgcattgatgccagcgacgacattacctactacgccgattctgtgaagggccgcttcaccatcagtagagacaatagcaagaatacagtctacctgcagatgaactccctgcgcccagaagacactgccgtctactactgtgctacccctatcgggctttcttcctcttgccttctcgaatatgactacgattactgggggcaggggacgctggtcaccgtgtctagcctcgagggaggtagcggctccgggggaggcggaagtggaggcggaggatctgggtctggaggaagcggatctggaggctcagggtcagggggctcaggcagtggaggctctttcgaagtgcaactggtggagtccggcggtggactggtacagcctgggggttcactgcgcctgtcctgcgccgccagcggaagaacctattacctcaatgctatgggttggttccgccaggccccaggaaaggagcgcgagttcgtggcggctattgactggtccgaggggaacaaggactatgctgattccgtgaagggcaggtttaccatcagccgggataattcaaaaaatactgtttatttgcagatgaactctcttagaccagaagacactgctgtctattactgcgccgctgacacccctccttggggaccactgatttatatcgaaagctatgattcctgggggcagggcacactcgtcaccgtgagtagcacgcgtggaatgaggactgaggatcttcccaaagctgtcgtctttctcgaaccccaatggtatcgggtgctcgaaaaagactctgtgacactgaaatgccaaggggcctactctcccgaggacaactccacacagtggtttcataatgagtccctcatcagctctcaggccagctcttatttcattgatgccgctacagtggacgactccggcgagtatcggtgtcagaccaatctgtctacactgtctgaccccgtgcagcttgaggtccacattggatggttgctcttgcaagccccacgctgggttttcaaagaggaagatccaatccatctgcggtgccacagctggaaaaacaccgctctccacaaagtcacatacctgcaaaatggcaaaggacgcaaatacttccatcacaattccgatttttacattccgaaggctaccctgaaagacagcggcagctatttctgccggggactcgtcggctccaagaatgtgtcctccgaaaccgtgaatatcacgattacccaaggactggctgtgcctacaatctctagcttctttccgcctggataccaagtctccttctgtcttgtgatggtcctcctgtttgctgtggacacaggactgtacttttccgtgaaa

SEQ ID NO: 1354 - DNA, 1524 bp, synthetic construct
  source 1..1524: mol_type = other DNA
atggccttaccagtgaccgccttgctcctgccgctggccttgctgctccacgccgccaggccgcaggtgcaactggtgcagtctggcggagggctggtgcagccagggggatctctgagactgagctgtgccgccagcgacttcgacttcgccgcctacgagatgagctgggtgcgccaggctcctggacagggactggaatgggtggccatcatcagccacgacggcatcgacaagtattacaccgacagcgtgaagggccggttcaccatcagccgggacaacagcaagaacaccctgtacctgcagatgaataccctgcgggccgaggacaccgccacctactattgcctgagactgggagccgtgggccagggcacacttgtgacagtgtctagcctcgagggaggaggcggctccgggggaggcggaagtggaggcggaggatctgggtctggaggaagcggatctggaggctcagggtcagggggctcaggcagtggaggcagcttcgaacaggtgcaactggtgcagagcggaggcggactggtgcagcctgggggcagtctgaggctgtcttgtgccgcctccgatttcgccttcgatgattacgagatgtcttgggtgcggcaggccccaggcaaagccctggaatggatcggcgacatcaaccacagcggcaccaccatctacaaccccagcctgaagtccagagtgaccatctccagagacaactccaagaatactctgtacctgcagatgaacacactgagagccgaagatacagccatctactactgcgccagaccccactacggcgactacagcgacgccttcgacatctggggccagggaaccatggtcaccgtgtcctctacgcgtggaatgaggactgaggatcttcccaaagctgtcgtctttctcgaaccccaatggtatcgggtgctcgaaaaagactctgtgacactgaaatgccaaggggcctactctcccgaggacaactccacacagtggtttcataatgagtccctcatcagctctcaggccagctcttatttcattgatgccgctacagtggacgactccggcgagtatcggtgtcagaccaatctgtctacactgtctgaccccgtgcagcttgaggtccacattggatggttgctcttgcaagccccacgctgggttttcaaagaggaagatccaatccatctgcggtgccacagctggaaaaacaccgctctccacaaagtcacatacctgcaaaatggcaaaggacgcaaatacttccatcacaattccgatttttacattccgaaggctaccctgaaagacagcggcagctatttctgccggggactcgtcggctccaagaatgtgtcctccgaaaccgtgaatatcacgattacccaaggactggctgtgcctacaatctctagcttctttccgcctggataccaagtctccttctgtcttgtgatggtcctcctgtttgctgtggacacaggactgtacttttccgtgaaa

SEQ ID NO: 1355 - DNA, 1068 bp, synthetic construct
  source 1..1068: mol_type = other DNA
atggccttaccagtgaccgccttgctcctgccgctggccttgctgctccacgccgccaggccgcaagtgaagctggaagagtctggcggaggactggtgcaggctggaagaagcctgagactgtcttgtgccgccagcgagcacacctttagctctcacgtgatgggctggttcagacaggcccctggcaaagaaagggaaagcgtggccgttatcggctggcgggatattagcaccagctacgccgatagcgtgaagggcagattcaccatcagccgggacaacgccaagaaaaccctgtacctccagatgaacagcctgaagccagaggacaccgccgtgtactactgcgccgccagaagaattgacgccgccgactttgattcttggggccagggaacccaagtgaccgtttctagcacgcgtggaatgaggactgaggatcttcccaaagctgtcgtctttctcgaaccccaatggtatcgggtgctcgaaaaagactctgtgacactgaaatgccaaggggcctactctcccgaggacaactccacacagtggtttcataatgagtccctcatcagctctcaggccagctcttatttcattgatgccgctacagtggacgactccggcgagtatcggtgtcagaccaatctgtctacactgtctgaccccgtgcagcttgaggtccacattggatggttgctcttgcaagccccacgctgggttttcaaagaggaagatccaatccatctgcggtgccacagctggaaaaacaccgctctccacaaagtcacatacctgcaaaatggcaaaggacgcaaatacttccatcacaattccgatttttacattccgaaggctaccctgaaagacagcggcagctatttctgccggggactcgtcggctccaagaatgtgtcctccgaaaccgtgaatatcacgattacccaaggactggctgtgcctacaatctctagcttctttccgcctggataccaagtctccttctgtcttgtgatggtcctcctgtttgctgtggacacaggactgtacttttccgtgaaa

SEQ ID NO: 1356 - DNA, 1065 bp, synthetic construct
  source 1..1065: mol_type = other DNA
atggccttaccagtgaccgccttgctcctgccgctggccttgctgctccacgccgccaggccggaagtgcaactggttgaatccggtggcggcctggtgcaagcaggcggatctctcagacttagctgtgccgcctccggcagaaccttcacaatgggatggtttaggcaggctccagggaaagagagagagttcgtcgccgccatctctctgtctcccacactggcctactacgccgagtctgtgaaaggccggttcaccatctccagagataatgccaagaacaccgtggtgctgcaaatgaactctctgaaacccgaggatacagccctgtactattgtgccgctgaccggaagtccgtgatgagcatcagacccgattactggggacagggcacacaagtcacagtgtcctctacgcgtggaatgaggactgaggatcttcccaaagctgtcgtctttctcgaaccccaatggtatcgggtgctcgaaaaagactctgtgacactgaaatgccaaggggcctactctcccgaggacaactccacacagtggtttcataatgagtccctcatcagctctcaggccagctcttatttcattgatgccgctacagtggacgactccggcgagtatcggtgtcagaccaatctgtctacactgtctgaccccgtgcagcttgaggtccacattggatggttgctcttgcaagccccacgctgggttttcaaagaggaagatccaatccatctgcggtgccacagctggaaaaacaccgctctccacaaagtcacatacctgcaaaatggcaaaggacgcaaatacttccatcacaattccgatttttacattccgaaggctaccctgaaagacagcggcagctatttctgccggggactcgtcggctccaagaatgtgtcctccgaaaccgtgaatatcacgattacccaaggactggctgtgcctacaatctctagcttctttccgcctggataccaagtctccttctgtcttgtgatggtcctcctgtttgctgtggacacaggactgtacttttccgtgaaa

SEQ ID NO: 1357 - DNA, 1467 bp, synthetic construct
  source 1..1467: mol_type = other DNA
atggccttaccagtgaccgccttgctcctgccgctggccttgctgctccacgccgccaggccgcaagtgaagctggaagagtctggcggaggactggtgcaggctggaagaagcctgagactgtcttgtgccgccagcgagcacacctttagctctcacgtgatgggctggttcagacaggcccctggcaaagaaagggaaagcgtggccgttatcggctggcgggatattagcaccagctacgccgatagcgtgaagggcagattcaccatcagccgggacaacgccaagaaaaccctgtacctccagatgaacagcctgaagccagaggacaccgccgtgtactactgcgccgccagaagaattgacgccgccgactttgattcttggggccagggaacccaagtgaccgtttctagcggaggcggtggaagtggcggcggtggttcaggcggcggaggatctgaagtgcaactggttgaatccggtggcggcctggtgcaagcaggcggatctctcagacttagctgtgccgcctccggcagaaccttcacaatgggatggtttaggcaggctccagggaaagagagagagttcgtcgccgccatctctctgtctcccacactggcctactacgccgagtctgtgaaaggccggttcaccatctccagagataatgccaagaacaccgtggtgctgcaaatgaactctctgaaacccgaggatacagccctgtactattgtgccgctgaccggaagtccgtgatgagcatcagacccgattactggggacagggcacacaagtcacagtgtcctctacgcgtggaatgaggactgaggatcttcccaaagctgtcgtctttctcgaaccccaatggtatcgggtgctcgaaaaagactctgtgacactgaaatgccaaggggcctactctcccgaggacaactccacacagtggtttcataatgagtccctcatcagctctcaggccagctcttatttcattgatgccgctacagtggacgactccggcgagtatcggtgtcagaccaatctgtctacactgtctgaccccgtgcagcttgaggtccacattggatggttgctcttgcaagccccacgctgggttttcaaagaggaagatccaatccatctgcggtgccacagctggaaaaacaccgctctccacaaagtcacatacctgcaaaatggcaaaggacgcaaatacttccatcacaattccgatttttacattccgaaggctaccctgaaagacagcggcagctatttctgccggggactcgtcggctccaagaatgtgtcctccgaaaccgtgaatatcacgattacccaaggactggctgtgcctacaatctctagcttctttccgcctggataccaagtctccttctgtcttgtgatggtcctcctgtttgctgtggacacaggactgtacttttccgtgaaa

SEQ ID NO: 1358 - DNA, 1059 bp, synthetic construct
  source 1..1059: mol_type = other DNA
atggccttaccagtgaccgccttgctcctgccgctggccttgctgctccacgccgccaggccggaggtgcaactggttgagtctggcggaggactggttcaggcaggcggatctctgagactgagctgtatcgccaccggcaaggtgttcagcatctacgacatgggctggtacagacaggcccctggcaagcagagagagctggttgccgagatcacaagcagcggcaccacacactacgacgacttcgtgtccggcagattcaccatcagccgggacaacgccaagaacaccgtgtacctccagatgaacaccctgaaggccgaggacaccgccgtgtactactgtagagccaaccacgtgttcggcggcagctattggggacagggaacccaagtgacagtgtctagtacgcgtggaatgaggactgaggatcttcccaaagctgtcgtctttctcgaaccccaatggtatcgggtgctcgaaaaagactctgtgacactgaaatgccaaggggcctactctcccgaggacaactccacacagtggtttcataatgagtccctcatcagctctcaggccagctcttatttcattgatgccgctacagtggacgactccggcgagtatcggtgtcagaccaatctgtctacactgtctgaccccgtgcagcttgaggtccacattggatggttgctcttgcaagccccacgctgggttttcaaagaggaagatccaatccatctgcggtgccacagctggaaaaacaccgctctccacaaagtcacatacctgcaaaatggcaaaggacgcaaatacttccatcacaattccgatttttacattccgaaggctaccctgaaagacagcggcagctatttctgccggggactcgtcggctccaagaatgtgtcctccgaaaccgtgaatatcacgattacccaaggactggctgtgcctacaatctctagcttctttccgcctggataccaagtctccttctgtcttgtgatggtcctcctgtttgctgtggacacaggactgtacttttccgtgaaa

SEQ ID NO: 1359 - DNA, 1077 bp, synthetic construct
  source 1..1077: mol_type = other DNA
atggccttaccagtgaccgccttgctcctgccgctggccttgctgctccacgccgccaggccgcaggtgcagcttgttgaaagcggaggtggcctggttcaacctggcggaagcctgagactgtcctgtgaagccagcggctttaccctggactactacgccatcggctggtttagacaagctcccggcaaagagagagagggcgtcatctgcatcagcagatccgacggcagcacctactatgccgacagcgtgaagggacgcttcaccatctccagagacaatgccaaaaagacggtctacctgcaaatgatctccctcaagcctgaggataccgccgcctactattgtgccgctggcgctgattgcagcggctacctgagagactacgagttcagaggccagggcacacaagtgaccgtcagctctacgcgtggaatgaggactgaggatcttcccaaagctgtcgtctttctcgaaccccaatggtatcgggtgctcgaaaaagactctgtgacactgaaatgccaaggggcctactctcccgaggacaactccacacagtggtttcataatgagtccctcatcagctctcaggccagctcttatttcattgatgccgctacagtggacgactccggcgagtatcggtgtcagaccaatctgtctacactgtctgaccccgtgcagcttgaggtccacattggatggttgctcttgcaagccccacgctgggttttcaaagaggaagatccaatccatctgcggtgccacagctggaaaaacaccgctctccacaaagtcacatacctgcaaaatggcaaaggacgcaaatacttccatcacaattccgatttttacattccgaaggctaccctgaaagacagcggcagctatttctgccggggactcgtcggctccaagaatgtgtcctccgaaaccgtgaatatcacgattacccaaggactggctgtgcctacaatctctagcttctttccgcctggataccaagtctccttctgtcttgtgatggtcctcctgtttgctgtggacacaggactgtacttttccgtgaaa

SEQ ID NO: 1360 - DNA, 1446 bp, synthetic construct
  source 1..1446: mol_type = other DNA
atggccttaccagtgaccgccttgctcctgccgctggccttgctgctccacgccgccaggccggaggtgcaactggttgagtctggcggaggactggttcaggcaggcggatctctgagactgagctgtatcgccaccggcaaggtgttcagcatctacgacatgggctggtacagacaggcccctggcaagcagagagagctggttgccgagatcacaagcagcggcaccacacactacgacgacttcgtgtccggcagattcaccatcagccgggacaacgccaagaacaccgtgtacctccagatgaacaccctgaaggccgaggacaccgccgtgtactactgtagagccaaccacgtgttcggcggcagctattggggacagggaacccaagtgacagtgtctagtgaggtggccgctttggagaaacaggtgcagcttgttgaaagcggaggtggcctggttcaacctggcggaagcctgagactgtcctgtgaagccagcggctttaccctggactactacgccatcggctggtttagacaagctcccggcaaagagagagagggcgtcatctgcatcagcagatccgacggcagcacctactatgccgacagcgtgaagggacgcttcaccatctccagagacaatgccaaaaagacggtctacctgcaaatgatctccctcaagcctgaggataccgccgcctactattgtgccgctggcgctgattgcagcggctacctgagagactacgagttcagaggccagggcacacaagtgaccgtcagctctacgcgtggaatgaggactgaggatcttcccaaagctgtcgtctttctcgaaccccaatggtatcgggtgctcgaaaaagactctgtgacactgaaatgccaaggggcctactctcccgaggacaactccacacagtggtttcataatgagtccctcatcagctctcaggccagctcttatttcattgatgccgctacagtggacgactccggcgagtatcggtgtcagaccaatctgtctacactgtctgaccccgtgcagcttgaggtccacattggatggttgctcttgcaagccccacgctgggttttcaaagaggaagatccaatccatctgcggtgccacagctggaaaaacaccgctctccacaaagtcacatacctgcaaaatggcaaaggacgcaaatacttccatcacaattccgatttttacattccgaaggctaccctgaaagacagcggcagctatttctgccggggactcgtcggctccaagaatgtgtcctccgaaaccgtgaatatcacgattacccaaggactggctgtgcctacaatctctagcttctttccgcctggataccaagtctccttctgtcttgtgatggtcctcctgtttgctgtggacacaggactgtacttttccgtgaaa

SEQ ID NO: 1361 - DNA, 1095 bp, synthetic construct
  source 1..1095: mol_type = other DNA
atggccttaccagtgaccgccttgctcctgccgctggccttgctgctccacgccgccaggccgcaagtgaagctggaagagtctggcggcagactggtgcagcctagaggaagcctgagactgtcttgtgccggcagcggcagaacctttagcacatacggcatggcctggttcagacaggcccctggaaaagagagagagttcgtcgccagcaaggccagcatgaactactccggcaggacctactacgccgacagcgtgaagggcagattcacaatcgccagagacaacgccaagaacatggtgttcctccagatgaacaatctgaagcccgaggacaccgccgtgtactattgtgccgctggcacaggctgtagcacctacggctgtttcgacgcccagatcatcgactactggggcaagggcacactggtcacagtttctagcacgcgtggaatgaggactgaggatcttcccaaagctgtcgtctttctcgaaccccaatggtatcgggtgctcgaaaaagactctgtgacactgaaatgccaaggggcctactctcccgaggacaactccacacagtggtttcataatgagtccctcatcagctctcaggccagctcttatttcattgatgccgctacagtggacgactccggcgagtatcggtgtcagaccaatctgtctacactgtctgaccccgtgcagcttgaggtccacattggatggttgctcttgcaagccccacgctgggttttcaaagaggaagatccaatccatctgcggtgccacagctggaaaaacaccgctctccacaaagtcacatacctgcaaaatggcaaaggacgcaaatacttccatcacaattccgatttttacattccgaaggctaccctgaaagacagcggcagctatttctgccggggactcgtcggctccaagaatgtgtcctccgaaaccgtgaatatcacgattacccaaggactggctgtgcctacaatctctagcttctttccgcctggataccaagtctccttctgtcttgtgatggtcctcctgtttgctgtggacacaggactgtacttttccgtgaaa

SEQ ID NO: 1362 - DNA, 1068 bp, synthetic construct
  source 1..1068: mol_type = other DNA
atggccttaccagtgaccgccttgctcctgccgctggccttgctgctccacgccgccaggccgcaagtcaaactggaagaaagcggtggcggcctggtgcaacctggcgaatctctgagactgagctgtagcgccagcggctccatcttcaaggtgttcagagtgttcgccatgagctggtacaggcaaggccctggcaagcagagagagctggtcgcctctatcagcagcggcgagacaaccacatacgccgactctgtgaaaggccggttcaccatcagccgggataatgccaagaataccgcctatctccagatggactccctgaagcctgaagatacagctgtgtactactgcaacgccgaccataccttcaccggcgatttttggggccagggaacccaagtgaccgtgtctagtacgcgtggaatgaggactgaggatcttcccaaagctgtcgtctttctcgaaccccaatggtatcgggtgctcgaaaaagactctgtgacactgaaatgccaaggggcctactctcccgaggacaactccacacagtggtttcataatgagtccctcatcagctctcaggccagctcttatttcattgatgccgctacagtggacgactccggcgagtatcggtgtcagaccaatctgtctacactgtctgaccccgtgcagcttgaggtccacattggatggttgctcttgcaagccccacgctgggttttcaaagaggaagatccaatccatctgcggtgccacagctggaaaaacaccgctctccacaaagtcacatacctgcaaaatggcaaaggacgcaaatacttccatcacaattccgatttttacattccgaaggctaccctgaaagacagcggcagctatttctgccggggactcgtcggctccaagaatgtgtcctccgaaaccgtgaatatcacgattacccaaggactggctgtgcctacaatctctagcttctttccgcctggataccaagtctccttctgtcttgtgatggtcctcctgtttgctgtggacacaggactgtacttttccgtgaaa

SEQ ID NO: 1363 - DNA, 1473 bp, synthetic construct
  source 1..1473: mol_type = other DNA
atggccttaccagtgaccgccttgctcctgccgctggccttgctgctccacgccgccaggccgcaagtgaagctggaagagtctggcggcagactggtgcagcctagaggaagcctgagactgtcttgtgccggcagcggcagaacctttagcacatacggcatggcctggttcagacaggcccctggaaaagagagagagttcgtcgccagcaaggccagcatgaactactccggcaggacctactacgccgacagcgtgaagggcagattcacaatcgccagagacaacgccaagaacatggtgttcctccagatgaacaatctgaagcccgaggacaccgccgtgtactattgtgccgctggcacaggctgtagcacctacggctgtttcgacgcccagatcatcgactactggggcaagggcacactggtcacagtttctagcgaggtggccgctttggagaaacaagtcaaactggaagaaagcggtggcggcctggtgcaacctggcgaatctctgagactgagctgtagcgccagcggctccatcttcaaggtgttcagagtgttcgccatgagctggtacaggcaaggccctggcaagcagagagagctggtcgcctctatcagcagcggcgagacaaccacatacgccgactctgtgaaaggccggttcaccatcagccgggataatgccaagaataccgcctatctccagatggactccctgaagcctgaagatacagctgtgtactactgcaacgccgaccataccttcaccggcgatttttggggccagggaacccaagtgaccgtgtctagtacgcgtggaatgaggactgaggatcttcccaaagctgtcgtctttctcgaaccccaatggtatcgggtgctcgaaaaagactctgtgacactgaaatgccaaggggcctactctcccgaggacaactccacacagtggtttcataatgagtccctcatcagctctcaggccagctcttatttcattgatgccgctacagtggacgactccggcgagtatcggtgtcagaccaatctgtctacactgtctgaccccgtgcagcttgaggtccacattggatggttgctcttgcaagccccacgctgggttttcaaagaggaagatccaatccatctgcggtgccacagctggaaaaacaccgctctccacaaagtcacatacctgcaaaatggcaaaggacgcaaatacttccatcacaattccgatttttacattccgaaggctaccctgaaagacagcggcagctatttctgccggggactcgtcggctccaagaatgtgtcctccgaaaccgtgaatatcacgattacccaaggactggctgtgcctacaatctctagcttctttccgcctggataccaagtctccttctgtcttgtgatggtcctcctgtttgctgtggacacaggactgtacttttccgtgaaa

SEQ ID NO: 1364 - DNA, 1062 bp, synthetic construct
  source 1..1062: mol_type = other DNA
atggccttaccagtgaccgccttgctcctgccgctggccttgctgctccacgccgccaggccgcaagtgaagctggaagagtctggcggagagctggttcaacctggcggacctctgagactgtcttgtgccgccagcggcaacatcttcagcatcaaccggatgggctggtacagacaggcccctggaaaacagagagccttcgtcgcctctatcaccgtgcggggcatcaccaattacgccgactctgtgaagggcagattcaccatcagcgtggacaagagcaagaacaccatctacctccagatgaacgccctgaagcctgaggacaccgccgtgtactactgcaatgccgtgtccagcaacagggaccccgattattggggccagggcacccaagtgacagtgtctagtacgcgtggaatgaggactgaggatcttcccaaagctgtcgtctttctcgaaccccaatggtatcgggtgctcgaaaaagactctgtgacactgaaatgccaaggggcctactctcccgaggacaactccacacagtggtttcataatgagtccctcatcagctctcaggccagctcttatttcattgatgccgctacagtggacgactccggcgagtatcggtgtcagaccaatctgtctacactgtctgaccccgtgcagcttgaggtccacattggatggttgctcttgcaagccccacgctgggttttcaaagaggaagatccaatccatctgcggtgccacagctggaaaaacaccgctctccacaaagtcacatacctgcaaaatggcaaaggacgcaaatacttccatcacaattccgatttttacattccgaaggctaccctgaaagacagcggcagctatttctgccggggactcgtcggctccaagaatgtgtcctccgaaaccgtgaatatcacgattacccaaggactggctgtgcctacaatctctagcttctttccgcctggataccaagtctccttctgtcttgtgatggtcctcctgtttgctgtggacacaggactgtacttttccgtgaaa

SEQ ID NO: 1365 - DNA, 1098 bp, synthetic construct
  source 1..1098: mol_type = other DNA
atggccttaccagtgaccgccttgctcctgccgctggccttgctgctccacgccgccaggccgcctgttcaactggttgaatctggcggcggactggtgcaggctggcgatagtctcagactgagctgtgccgcctccggcagaacatttggcatcggcacaatgggatggttccggcagcctcctggaaaagaacgcgaatttgtggccgccatcagatggtctacaggcggcaccagatacgccgacagcgtgaaaggccggtttaccatcagcagagacaacgccaagctgaccgtggatctccagatggatagcctgaaaccagaggatacagccgtctattactgcgccgctgacaggctgagcctggatctgtctggcagataccactacaaccctgccgtgtacgactactggggacagggaacacaagtcaccgtgtcctctacgcgtggaatgaggactgaggatcttcccaaagctgtcgtctttctcgaaccccaatggtatcgggtgctcgaaaaagactctgtgacactgaaatgccaaggggcctactctcccgaggacaactccacacagtggtttcataatgagtccctcatcagctctcaggccagctcttatttcattgatgccgctacagtggacgactccggcgagtatcggtgtcagaccaatctgtctacactgtctgaccccgtgcagcttgaggtccacattggatggttgctcttgcaagccccacgctgggttttcaaagaggaagatccaatccatctgcggtgccacagctggaaaaacaccgctctccacaaagtcacatacctgcaaaatggcaaaggacgcaaatacttccatcacaattccgatttttacattccgaaggctaccctgaaagacagcggcagctatttctgccggggactcgtcggctccaagaatgtgtcctccgaaaccgtgaatatcacgattacccaaggactggctgtgcctacaatctctagcttctttccgcctggataccaagtctccttctgtcttgtgatggtcctcctgtttgctgtggacacaggactgtacttttccgtgaaa

SEQ ID NO: 1366 - DNA, 1494 bp, synthetic construct
  source 1..1494: mol_type = other DNA
atggccttaccagtgaccgccttgctcctgccgctggccttgctgctccacgccgccaggccgcaagtgaagctggaagagtctggcggagagctggttcaacctggcggacctctgagactgtcttgtgccgccagcggcaacatcttcagcatcaaccggatgggctggtacagacaggcccctggaaaacagagagccttcgtcgcctctatcaccgtgcggggcatcaccaattacgccgactctgtgaagggcagattcaccatcagcgtggacaagagcaagaacaccatctacctccagatgaacgccctgaagcctgaggacaccgccgtgtactactgcaatgccgtgtccagcaacagggaccccgattattggggccagggcacccaagtgacagtgtctagtggaggcggtggaagtggcggcggtggttcaggcggcggaggatctcctgttcaactggttgaatctggcggcggactggtgcaggctggcgatagtctcagactgagctgtgccgcctccggcagaacatttggcatcggcacaatgggatggttccggcagcctcctggaaaagaacgcgaatttgtggccgccatcagatggtctacaggcggcaccagatacgccgacagcgtgaaaggccggtttaccatcagcagagacaacgccaagctgaccgtggatctccagatggatagcctgaaaccagaggatacagccgtctattactgcgccgctgacaggctgagcctggatctgtctggcagataccactacaaccctgccgtgtacgactactggggacagggaacacaagtcaccgtgtcctctacgcgtggaatgaggactgaggatcttcccaaagctgtcgtctttctcgaaccccaatggtatcgggtgctcgaaaaagactctgtgacactgaaatgccaaggggcctactctcccgaggacaactccacacagtggtttcataatgagtccctcatcagctctcaggccagctcttatttcattgatgccgctacagtggacgactccggcgagtatcggtgtcagaccaatctgtctacactgtctgaccccgtgcagcttgaggtccacattggatggttgctcttgcaagccccacgctgggttttcaaagaggaagatccaatccatctgcggtgccacagctggaaaaacaccgctctccacaaagtcacatacctgcaaaatggcaaaggacgcaaatacttccatcacaattccgatttttacattccgaaggctaccctgaaagacagcggcagctatttctgccggggactcgtcggctccaagaatgtgtcctccgaaaccgtgaatatcacgattacccaaggactggctgtgcctacaatctctagcttctttccgcctggataccaagtctccttctgtcttgtgatggtcctcctgtttgctgtggacacaggactgtacttttccgtgaaa

SEQ ID NO: 1367 - DNA, 1068 bp, synthetic construct
  source 1..1068: mol_type = other DNA
atggccttaccagtgaccgccttgctcctgccgctggccttgctgctccacgccgccaggccggccgtgcaactggttgaatctggcggaggactggtgcaggctggcgattctctgagactgacctgtacagccagcggcagagccttcagcacctacttcatggcctggttcagacaggcccctggcaaagagagagagttcgtcgccggaatcgcttggagcggaggctctacagcctacgccgattctgtgaagggcagattcaccatcagccgggacaacgccaagaacaccgtgtacctccagatgaacagcctgaagtccgaggacaccgccgtgtactactgtgccagcagaggcatcgaggtggaagagtttggagcctggggccagggaacccaagtgacagtttcttctacgcgtggaatgaggactgaggatcttcccaaagctgtcgtctttctcgaaccccaatggtatcgggtgctcgaaaaagactctgtgacactgaaatgccaaggggcctactctcccgaggacaactccacacagtggtttcataatgagtccctcatcagctctcaggccagctcttatttcattgatgccgctacagtggacgactccggcgagtatcggtgtcagaccaatctgtctacactgtctgaccccgtgcagcttgaggtccacattggatggttgctcttgcaagccccacgctgggttttcaaagaggaagatccaatccatctgcggtgccacagctggaaaaacaccgctctccacaaagtcacatacctgcaaaatggcaaaggacgcaaatacttccatcacaattccgatttttacattccgaaggctaccctgaaagacagcggcagctatttctgccggggactcgtcggctccaagaatgtgtcctccgaaaccgtgaatatcacgattacccaaggactggctgtgcctacaatctctagcttctttccgcctggataccaagtctccttctgtcttgtgatggtcctcctgtttgctgtggacacaggactgtacttttccgtgaaa

SEQ ID NO: 1368 - DNA, 1071 bp, synthetic construct
  source 1..1071: mol_type = other DNA
atggccttaccagtgaccgccttgctcctgccgctggccttgctgctccacgccgccaggccgcaggttcaactggtggaaagtggcggtggcttggtgcaagcaggcggctctcttagactgtcttgtgctgcctctggcggcaccctgagcaagaataccgtggcatggtttaggcaggctcccggaaaagagcggggctttgtcgccagcatcacctgggatggcagaaccacctactacgccgacagcgtgaaaggccggttcaccatctccagagataatgccaagaatacggtctacttgcaaatgaactccctgaagcctgaagatacagccgtgtacgtgtgcgccgatctcggcaaatggcctgctggacctgccgattattggggacagggcacacaagtcaccgtgtcctctacgcgtggaatgaggactgaggatcttcccaaagctgtcgtctttctcgaaccccaatggtatcgggtgctcgaaaaagactctgtgacactgaaatgccaaggggcctactctcccgaggacaactccacacagtggtttcataatgagtccctcatcagctctcaggccagctcttatttcattgatgccgctacagtggacgactccggcgagtatcggtgtcagaccaatctgtctacactgtctgaccccgtgcagcttgaggtccacattggatggttgctcttgcaagccccacgctgggttttcaaagaggaagatccaatccatctgcggtgccacagctggaaaaacaccgctctccacaaagtcacatacctgcaaaatggcaaaggacgcaaatacttccatcacaattccgatttttacattccgaaggctaccctgaaagacagcggcagctatttctgccggggactcgtcggctccaagaatgtgtcctccgaaaccgtgaatatcacgattacccaaggactggctgtgcctacaatctctagcttctttccgcctggataccaagtctccttctgtcttgtgatggtcctcctgtttgctgtggacacaggactgtacttttccgtgaaa

SEQ ID NO: 1369 - DNA, 1083 bp, synthetic construct
  source 1..1083: mol_type = other DNA
atggccttaccagtgaccgccttgctcctgccgctggccttgctgctccacgccgccaggccgggctctgacctgggcatcaagctgctgttcgccgctgccaagggccaggacgacgaagtgcggattctgctggctgctggggccgacgtgaacgccaaggatttcgagggctacacccccctgcacgtggccgcctatgatggacacctggaaatcgtggaagtgctgctgaaggctggcgctgatgtgaatgccaaagacagccagggccggacccctctgcatgaagccgcctacagcggccatctggaaattgtggaagtgctgctgaaagccggggcagacgtgaacgctcaggacgacgctggcgagacaccagccgatctggctgcagcttggggccacgaagatatcgccgaggtgctgcagaagacgcgtggaatgaggactgaggatcttcccaaagctgtcgtctttctcgaaccccaatggtatcgggtgctcgaaaaagactctgtgacactgaaatgccaaggggcctactctcccgaggacaactccacacagtggtttcataatgagtccctcatcagctctcaggccagctcttatttcattgatgccgctacagtggacgactccggcgagtatcggtgtcagaccaatctgtctacactgtctgaccccgtgcagcttgaggtccacattggatggttgctcttgcaagccccacgctgggttttcaaagaggaagatccaatccatctgcggtgccacagctggaaaaacaccgctctccacaaagtcacatacctgcaaaatggcaaaggacgcaaatacttccatcacaattccgatttttacattccgaaggctaccctgaaagacagcggcagctatttctgccggggactcgtcggctccaagaatgtgtcctccgaaaccgtgaatatcacgattacccaaggactggctgtgcctacaatctctagcttctttccgcctggataccaagtctccttctgtcttgtgatggtcctcctgtttgctgtggacacaggactgtacttttccgtgaaa

SEQ ID NO: 1370 - DNA, 1089 bp, synthetic construct
  source 1..1089: mol_type = other DNA
atggccttaccagtgaccgccttgctcctgccgctggccttgctgctccacgccgccaggccgagaagcgatctgggaaagaagctgctggaagctgccagagccggacaggatgatgaagtgcgcatcctgatggcaaacggcgcagatgtgaacgcaaaggacgagtacggcctgacccccctgtacctggctacagcccacgggcacctggaaattgtggaagtgctgctgaagaacggcgctgacgtgaacgccgtggacgccatcggctttaccccactgcatctggccgctttcatcgggcatctcgaaatcgcagaggtgctgctgaaacacggggccgatgtgaatgcccaggacaagttcggcaagaccgccttcgacatcagcatcggcaacggcaacgaggacctggccgagatcctgcagaaactgaacacgcgtggaatgaggactgaggatcttcccaaagctgtcgtctttctcgaaccccaatggtatcgggtgctcgaaaaagactctgtgacactgaaatgccaaggggcctactctcccgaggacaactccacacagtggtttcataatgagtccctcatcagctctcaggccagctcttatttcattgatgccgctacagtggacgactccggcgagtatcggtgtcagaccaatctgtctacactgtctgaccccgtgcagcttgaggtccacattggatggttgctcttgcaagccccacgctgggttttcaaagaggaagatccaatccatctgcggtgccacagctggaaaaacaccgctctccacaaagtcacatacctgcaaaatggcaaaggacgcaaatacttccatcacaattccgatttttacattccgaaggctaccctgaaagacagcggcagctatttctgccggggactcgtcggctccaagaatgtgtcctccgaaaccgtgaatatcacgattacccaaggactggctgtgcctacaatctctagcttctttccgcctggataccaagtctccttctgtcttgtgatggtcctcctgtttgctgtggacacaggactgtacttttccgtgaaa

SEQ ID NO: 1371 - DNA, 885 bp, synthetic construct
  source 1..885: mol_type = other DNA
atggccttaccagtgaccgccttgctcctgccgctggccttgctgctccacgccgccaggccggtggacaacaagttcaacaaagagcggtacagcgcctactacgagatttggcaactgcccaacctgaacgtgcggcagaaggccgccttcatcggatctctgcaggacgaccctagccagagcgccaatctgctggccgaggccaagaagctgaacgacgcccaggcccctaaaacgcgtggaatgaggactgaggatcttcccaaagctgtcgtctttctcgaaccccaatggtatcgggtgctcgaaaaagactctgtgacactgaaatgccaaggggcctactctcccgaggacaactccacacagtggtttcataatgagtccctcatcagctctcaggccagctcttatttcattgatgccgctacagtggacgactccggcgagtatcggtgtcagaccaatctgtctacactgtctgaccccgtgcagcttgaggtccacattggatggttgctcttgcaagccccacgctgggttttcaaagaggaagatccaatccatctgcggtgccacagctggaaaaacaccgctctccacaaagtcacatacctgcaaaatggcaaaggacgcaaatacttccatcacaattccgatttttacattccgaaggctaccctgaaagacagcggcagctatttctgccggggactcgtcggctccaagaatgtgtcctccgaaaccgtgaatatcacgattacccaaggactggctgtgcctacaatctctagcttctttccgcctggataccaagtctccttctgtcttgtgatggtcctcctgtttgctgtggacacaggactgtacttttccgtgaaa

SEQ ID NO: 1372 - DNA, 864 bp, synthetic construct
  source 1..864: mol_type = other DNA
atggccttaccagtgaccgccttgctcctgccgctggccttgctgctccacgccgccaggccgtacgccaaagagatgcggaacgcctactgggagatcgccctgctgcccaatctgaccaaccagcagaagagagcccccatcagaaagctgtacgacgacccctcccagagcagcgagctgctgtctgaggctaaaaaactgaacgatagccagacgcgtggaatgaggactgaggatcttcccaaagctgtcgtctttctcgaaccccaatggtatcgggtgctcgaaaaagactctgtgacactgaaatgccaaggggcctactctcccgaggacaactccacacagtggtttcataatgagtccctcatcagctctcaggccagctcttatttcattgatgccgctacagtggacgactccggcgagtatcggtgtcagaccaatctgtctacactgtctgaccccgtgcagcttgaggtccacattggatggttgctcttgcaagccccacgctgggttttcaaagaggaagatccaatccatctgcggtgccacagctggaaaaacaccgctctccacaaagtcacatacctgcaaaatggcaaaggacgcaaatacttccatcacaattccgatttttacattccgaaggctaccctgaaagacagcggcagctatttctgccggggactcgtcggctccaagaatgtgtcctccgaaaccgtgaatatcacgattacccaaggactggctgtgcctacaatctctagcttctttccgcctggataccaagtctccttctgtcttgtgatggtcctcctgtttgctgtggacacaggactgtacttttccgtgaaa

SEQ ID NO: 1373 - DNA, 864 bp, synthetic construct
  source 1..864: mol_type = other DNA
atggccttaccagtgaccgccttgctcctgccgctggccttgctgctccacgccgccaggccgtatgccaaagaaatgtggattgcctgggaggaaatccgcaacctgcctaatctgaatggctggcagatgaccgcctttatcgctaagctgctggatgaccccagccagtcctctgagctgctgagcgaagcaaagaaactgaatgactcccagacgcgtggaatgaggactgaggatcttcccaaagctgtcgtctttctcgaaccccaatggtatcgggtgctcgaaaaagactctgtgacactgaaatgccaaggggcctactctcccgaggacaactccacacagtggtttcataatgagtccctcatcagctctcaggccagctcttatttcattgatgccgctacagtggacgactccggcgagtatcggtgtcagaccaatctgtctacactgtctgaccccgtgcagcttgaggtccacattggatggttgctcttgcaagccccacgctgggttttcaaagaggaagatccaatccatctgcggtgccacagctggaaaaacaccgctctccacaaagtcacatacctgcaaaatggcaaaggacgcaaatacttccatcacaattccgatttttacattccgaaggctaccctgaaagacagcggcagctatttctgccggggactcgtcggctccaagaatgtgtcctccgaaaccgtgaatatcacgattacccaaggactggctgtgcctacaatctctagcttctttccgcctggataccaagtctccttctgtcttgtgatggtcctcctgtttgctgtggacacaggactgtacttttccgtgaaa

SEQ ID NO: 1374 - DNA, 978 bp, synthetic construct
  source 1..978: mol_type = other DNA
atggccttaccagtgaccgccttgctcctgccgctggccttgctgctccacgccgccaggccgctgccagccccgaagaatttggtcgtttcccgtgtcactgaggactctgcacgtctgagctggaccgcaccggacgcggcgttcgacagctttgcaatcggctactgggagtgggatgatgacggcgaggccattgtgctgaccgttccgggtagcgagcgcagctacgatctgaccggtctgaagccgggtacggaatatccggtgtatattgcgggcgtgaagggtggccagtggagcttcccgctgagcgcgatctttaccaccacgcgtggaatgaggactgaggatcttcccaaagctgtcgtctttctcgaaccccaatggtatcgggtgctcgaaaaagactctgtgacactgaaatgccaaggggcctactctcccgaggacaactccacacagtggtttcataatgagtccctcatcagctctcaggccagctcttatttcattgatgccgctacagtggacgactccggcgagtatcggtgtcagaccaatctgtctacactgtctgaccccgtgcagcttgaggtccacattggatggttgctcttgcaagccccacgctgggttttcaaagaggaagatccaatccatctgcggtgccacagctggaaaaacaccgctctccacaaagtcacatacctgcaaaatggcaaaggacgcaaatacttccatcacaattccgatttttacattccgaaggctaccctgaaagacagcggcagctatttctgccggggactcgtcggctccaagaatgtgtcctccgaaaccgtgaatatcacgattacccaaggactggctgtgcctacaatctctagcttctttccgcctggataccaagtctccttctgtcttgtgatggtcctcctgtttgctgtggacacaggactgtacttttccgtgaaa

SEQ ID NO: 1375 - DNA, 984 bp, synthetic construct
  source 1..984: mol_type = other DNA
atggccttaccagtgaccgccttgctcctgccgctggccttgctgctccacgccgccaggccgctgccggctccgaaaaacctggtcgtttcccgtgtcactgaagattctgcacgcttgagctgggcgatcgacgagcagcgtgactggtttgagagcttcctgattcagtatcaagaatcggaaaaagttggcgaggccatcgtgctgaccgttccgggtagcgagcgcagctatgatctgacgggtctgaagccaggcaccgagtatacggtgagcatttacggtgtctaccatgtgtaccgtagcaatccgctgagcgcgatcttcaccaccacgcgtggaatgaggactgaggatcttcccaaagctgtcgtctttctcgaaccccaatggtatcgggtgctcgaaaaagactctgtgacactgaaatgccaaggggcctactctcccgaggacaactccacacagtggtttcataatgagtccctcatcagctctcaggccagctcttatttcattgatgccgctacagtggacgactccggcgagtatcggtgtcagaccaatctgtctacactgtctgaccccgtgcagcttgaggtccacattggatggttgctcttgcaagccccacgctgggttttcaaagaggaagatccaatccatctgcggtgccacagctggaaaaacaccgctctccacaaagtcacatacctgcaaaatggcaaaggacgcaaatacttccatcacaattccgatttttacattccgaaggctaccctgaaagacagcggcagctatttctgccggggactcgtcggctccaagaatgtgtcctccgaaaccgtgaatatcacgattacccaaggactggctgtgcctacaatctctagcttctttccgcctggataccaagtctccttctgtcttgtgatggtcctcctgtttgctgtggacacaggactgtacttttccgtgaaa

SEQ ID NO: 1376 - DNA, 978 bp, synthetic construct
  source 1..978: mol_type = other DNA
atggccttaccagtgaccgccttgctcctgccgctggccttgctgctccacgccgccaggccgctgccagccccgaaaaacttagttgtctcccgcgtgaccgaagattctgctcgtctgagctggactgcaccggacgcggcgttcgacagctttccgattggctactgggagtgggatgatgacggtgaagcgatcgtgctgaccgttccgggtagcgagcgtagctatgacctgacgggtttgaaacctggtaccgagtatcacgtttacattgcgggcgtcaagggtggccagtggtcgttcccgctgagcgcaatctttacgaccacgcgtggaatgaggactgaggatcttcccaaagctgtcgtctttctcgaaccccaatggtatcgggtgctcgaaaaagactctgtgacactgaaatgccaaggggcctactctcccgaggacaactccacacagtggtttcataatgagtccctcatcagctctcaggccagctcttatttcattgatgccgctacagtggacgactccggcgagtatcggtgtcagaccaatctgtctacactgtctgaccccgtgcagcttgaggtccacattggatggttgctcttgcaagccccacgctgggttttcaaagaggaagatccaatccatctgcggtgccacagctggaaaaacaccgctctccacaaagtcacatacctgcaaaatggcaaaggacgcaaatacttccatcacaattccgatttttacattccgaaggctaccctgaaagacagcggcagctatttctgccggggactcgtcggctccaagaatgtgtcctccgaaaccgtgaatatcacgattacccaaggactggctgtgcctacaatctctagcttctttccgcctggataccaagtctccttctgtcttgtgatggtcctcctgtttgctgtggacacaggactgtacttttccgtgaaa

SEQ ID NO: 1377 - DNA, 993 bp, synthetic construct
  source 1..993: mol_type = other DNA
atggccttaccagtgaccgccttgctcctgccgctggccttgctgctccacgccgccaggccgctgcccgctcctaagaatctggtggtgtccgaagtgaccgaggacagcgctagactgagctgggatgatccctgggccttctacgagagcttcctgatccagtaccaagagagcgagaaagtcggcgaggccatcgtgcttacagtgcctggaagcgagagaagctacgacctgacaggcctgaagcctggcaccgagtacaccgtgtctatctacggcgtgcacaacgtgtacaaggacaccaacatgcggggcctgcctctgagcgccatctttacaacaacgcgtggaatgaggactgaggatcttcccaaagctgtcgtctttctcgaaccccaatggtatcgggtgctcgaaaaagactctgtgacactgaaatgccaaggggcctactctcccgaggacaactccacacagtggtttcataatgagtccctcatcagctctcaggccagctcttatttcattgatgccgctacagtggacgactccggcgagtatcggtgtcagaccaatctgtctacactgtctgaccccgtgcagcttgaggtccacattggatggttgctcttgcaagccccacgctgggttttcaaagaggaagatccaatccatctgcggtgccacagctggaaaaacaccgctctccacaaagtcacatacctgcaaaatggcaaaggacgcaaatacttccatcacaattccgatttttacattccgaaggctaccctgaaagacagcggcagctatttctgccggggactcgtcggctccaagaatgtgtcctccgaaaccgtgaatatcacgattacccaaggactggctgtgcctacaatctctagcttctttccgcctggataccaagtctccttctgtcttgtgatggtcctcctgtttgctgtggacacaggactgtacttttccgtgaaa

SEQ ID NO: 1378 - DNA, 978 bp, synthetic construct
  source 1..978: mol_type = other DNA
atggccttaccagtgaccgccttgctcctgccgctggccttgctgctccacgccgccaggccgttgcctgctccaaaaaacctggtcgtcagcagagtgacagaggactccgccagactgtcttggacagcccctgatgccgccttcgacagcttctggatcagatacttcgagttcctcggcagcggagaagccattgtgctgaccgttccaggcagcgagagatcctatgatctgaccggactgaagcccggaacagagtatgtggtcaacatcatgggcgtgaaaggcggcaagatcagccctcctctgtccgccattttcaccaccacgcgtggaatgaggactgaggatcttcccaaagctgtcgtctttctcgaaccccaatggtatcgggtgctcgaaaaagactctgtgacactgaaatgccaaggggcctactctcccgaggacaactccacacagtggtttcataatgagtccctcatcagctctcaggccagctcttatttcattgatgccgctacagtggacgactccggcgagtatcggtgtcagaccaatctgtctacactgtctgaccccgtgcagcttgaggtccacattggatggttgctcttgcaagccccacgctgggttttcaaagaggaagatccaatccatctgcggtgccacagctggaaaaacaccgctctccacaaagtcacatacctgcaaaatggcaaaggacgcaaatacttccatcacaattccgatttttacattccgaaggctaccctgaaagacagcggcagctatttctgccggggactcgtcggctccaagaatgtgtcctccgaaaccgtgaatatcacgattacccaaggactggctgtgcctacaatctctagcttctttccgcctggataccaagtctccttctgtcttgtgatggtcctcctgtttgctgtggacacaggactgtacttttccgtgaaa

SEQ ID NO: 1379 - DNA, 1290 bp, synthetic construct
  source 1..1290: mol_type = other DNA
atggccttaccagtgaccgccttgctcctgccgctggccttgctgctccacgccgccaggccgctgcccgctcctaagaatctggtggtgtccgaagtgaccgaggacagcgctagactgagctgggatgatccctgggccttctacgagagcttcctgatccagtaccaagagagcgagaaagtcggcgaggccatcgtgcttacagtgcctggaagcgagagaagctacgacctgacaggcctgaagcctggcaccgagtacaccgtgtctatctacggcgtgcacaacgtgtacaaggacaccaacatgcggggcctgcctctgagcgccatctttacaacagctcccgctcctgctccagcaccagctccattgcctgctccaaaaaacctggtcgtcagcagagtgacagaggactccgccagactgtcttggacagcccctgatgccgccttcgacagcttctggatcagatacttcgagttcctcggcagcggagaagccattgtgctgaccgttccaggcagcgagagatcctatgatctgaccggactgaagcccggaacagagtatgtggtcaacatcatgggcgtgaaaggcggcaagatcagccctcctctgtccgccattttcaccaccacgcgtggaatgaggactgaggatcttcccaaagctgtcgtctttctcgaaccccaatggtatcgggtgctcgaaaaagactctgtgacactgaaatgccaaggggcctactctcccgaggacaactccacacagtggtttcataatgagtccctcatcagctctcaggccagctcttatttcattgatgccgctacagtggacgactccggcgagtatcggtgtcagaccaatctgtctacactgtctgaccccgtgcagcttgaggtccacattggatggttgctcttgcaagccccacgctgggttttcaaagaggaagatccaatccatctgcggtgccacagctggaaaaacaccgctctccacaaagtcacatacctgcaaaatggcaaaggacgcaaatacttccatcacaattccgatttttacattccgaaggctaccctgaaagacagcggcagctatttctgccggggactcgtcggctccaagaatgtgtcctccgaaaccgtgaatatcacgattacccaaggactggctgtgcctacaatctctagcttctttccgcctggataccaagtctccttctgtcttgtgatggtcctcctgtttgctgtggacacaggactgtacttttccgtgaaa

SEQ ID NO: 1380 - DNA, 981 bp, synthetic construct
  source 1..981: mol_type = other DNA
atggccttaccagtgaccgccttgctcctgccgctggccttgctgctccacgccgccaggccgatgctgcccgctcctaagaatctggtggtgtccagaatcaccgaggacagcgccagactgtcttggacagctcctgatgccgccttcgacagcttccccatccggtacatcgagacactgatctggggcgaagccatctggctggatgtgcctggaagcgagagaagctacgacctgaccggactgaagcctggcacagagtatgccgtggtcatcaccggcgtgaaaggcggcagattctctagccctctggtggcctctttcaccaccacgcgtggaatgaggactgaggatcttcccaaagctgtcgtctttctcgaaccccaatggtatcgggtgctcgaaaaagactctgtgacactgaaatgccaaggggcctactctcccgaggacaactccacacagtggtttcataatgagtccctcatcagctctcaggccagctcttatttcattgatgccgctacagtggacgactccggcgagtatcggtgtcagaccaatctgtctacactgtctgaccccgtgcagcttgaggtccacattggatggttgctcttgcaagccccacgctgggttttcaaagaggaagatccaatccatctgcggtgccacagctggaaaaacaccgctctccacaaagtcacatacctgcaaaatggcaaaggacgcaaatacttccatcacaattccgatttttacattccgaaggctaccctgaaagacagcggcagctatttctgccggggactcgtcggctccaagaatgtgtcctccgaaaccgtgaatatcacgattacccaaggactggctgtgcctacaatctctagcttctttccgcctggataccaagtctccttctgtcttgtgatggtcctcctgtttgctgtggacacaggactgtacttttccgtgaaa

SEQ ID NO: 1381 - DNA, 2409 bp, synthetic construct
  source 1..2409: mol_type = other DNA
atggccttaccagtgaccgccttgctcctgccgctggccttgctgctccacgccgccaggccggagtgggtcaagttcgccaagccttgcagagaaggcgaggacaacagcaagcggaaccctatcgccaagatcaccagcgactaccaggccacacagaagatcacctaccggatctctggcgtgggcatcgaccagcctccattcggcatcttcgtggtggacaagaacaccggcgacatcaacatcaccgccatcgtggacagagaggaaacccctagcttcctgattacctgtagagccctgaacgcccagggcctcgatgtggaaaagcctctgatcctgaccgtgaagatcctggacatcaacgacaaccctccagtgttcagccagcagattttcatgggcgagatcgaggaaaacagcgccagcaacagcctggtcatgatcctgaatgccaccgacgccgacgagcccaaccacctgaatagcaagatcgccttcaagatcgtgtcccaagagcctgccggcacacccatgtttctgctgtccagaaataccggcgaagtgcggaccctgaccaatagcctggatagagagcaggccagcagctacagactggtggtgtctggcgctgacaaggatggcgagggactgagcacccagtgcgagtgcaacatcaaagtgaaggacgtgaacgacaacttccccatgttccgggacagccagtatagcgcccggatcgaagagaacatcctgagcagcgagctgctgcggttccaagtgaccgacctggacgaagagtacaccgacaactggctggccgtgtacttcttcaccagcggcaacgaaggcaactggttcgagatccagacagaccccaggaccaacgagggcatcctgaaggttgtgaaggccctggactacgagcagctccagagcgtgaagctgtctatcgccgtgaagaacaaggccgagttccaccagtccgtgatctcccggtacagagtgcagagcacccctgtgaccatccaagtgattaacgtgcgcgagggcattgccttcagacccgccagcaagaccttcaccgtgcagaagggcatcagcagcaagaaactggtggactacatcctgggcacctatcaggccatcgacgaggacacaaacaaagccgcctccaacgtgaaatacgtgatgggcagaaacgacggcggctacctgatgatcgactccaagaccgccgagatcaagttcgtgaagaatatgaaccgggactccaccttcatcgtgaacaagaccatcacagccgaggtgctggctatcgacgagtataccggcaagaccagcaccggcacagtgtatgtgcgggtgcccgacttcaacgataactgccctacagccgtgctggaaaaggacgccgtgtgtagctctagccctagcgtggtcgtgtccgccagaacactgaacaacagatacacaggcccctacacattcgccctggaagatcagcctgtgaagctgcctgccgtgtggtccatcaccacactgaatgctacaagcgccctgctgagagcccaagagcaaattcctcctggcgtgtaccacatcagcctggtgctgacagacagccagaacaatagatgcgagatgcctcggagcctgacactggaagtgtgccagtgcgacaacagaggcatctgcggcacaagctaccccacaacaagccccggcacaagatacggcagacctcactctggaagaacgcgtggaatgaggactgaggatcttcccaaagctgtcgtctttctcgaaccccaatggtatcgggtgctcgaaaaagactctgtgacactgaaatgccaaggggcctactctcccgaggacaactccacacagtggtttcataatgagtccctcatcagctctcaggccagctcttatttcattgatgccgctacagtggacgactccggcgagtatcggtgtcagaccaatctgtctacactgtctgaccccgtgcagcttgaggtccacattggatggttgctcttgcaagccccacgctgggttttcaaagaggaagatccaatccatctgcggtgccacagctggaaaaacaccgctctccacaaagtcacatacctgcaaaatggcaaaggacgcaaatacttccatcacaattccgatttttacattccgaaggctaccctgaaagacagcggcagctatttctgccggggactcgtcggctccaagaatgtgtcctccgaaaccgtgaatatcacgattacccaaggactggctgtgcctacaatctctagcttctttccgcctggataccaagtctccttctgtcttgtgatggtcctcctgtttgctgtggacacaggactgtacttttccgtgaaa

SEQ ID NO: 1382 - DNA, 1632 bp, synthetic construct
  source 1..1632: mol_type = other DNA
atggccttaccagtgaccgccttgctcctgccgctggccttgctgctccacgccgccaggccgatggccttaccagtgaccgccttgctcctgccgctggccttgctgctccacgccgccaggccgctgttcaatcaagaggtgcagatccctctgaccgagagctactgtggcccctgtcctaagaactggatctgctacaagaacaactgctaccagttcttcgacgagagcaagaattggtacgagagccaggccagctgcatgagccagaatgccagcctgctgaaggtgtacagcaaagaggaccaggacctgctgaaactggtcaagagctaccactggatgggccttgtgcacatccccaccaatggctcttggcagtgggaggacggcagcattctgagccctaacctgctgaccatcatcgagatgcagaagggcgactgcgccctgtacgccagcagctttaagggctacatcgagaattgcagcaccccgaacacctacatctgtatgcagagaaccgttggcggaggcggaagtggaggcggaggatctggcggcggaggctctgacctctttaatcaagaagtccagattccactcaccgaatcctactgcggaccttgtccaaaaaattggatttgttataagaacaactgttatcaattctttgatgagtctaaaaattggtatgagtcccaggcttcctgcatgtctcagaacgcttctctgctgaaagtctactctaaagaagatcaggatctcctgaagctcgtcaagtcttatcattggatggggctcgtccacattcctaccaacggaagctggcaatgggaagatggctccatcctgtctccaaatctgctcacgattattgaaatgcagaaaggggattgtgctctctacgccagctccttcaagggatatattgagaactgtagcacgcccaatacttatatctgtatgcaacggaccgtgacgcgtggaatgaggactgaggatcttcccaaagctgtcgtctttctcgaaccccaatggtatcgggtgctcgaaaaagactctgtgacactgaaatgccaaggggcctactctcccgaggacaactccacacagtggtttcataatgagtccctcatcagctctcaggccagctcttatttcattgatgccgctacagtggacgactccggcgagtatcggtgtcagaccaatctgtctacactgtctgaccccgtgcagcttgaggtccacattggatggttgctcttgcaagccccacgctgggttttcaaagaggaagatccaatccatctgcggtgccacagctggaaaaacaccgctctccacaaagtcacatacctgcaaaatggcaaaggacgcaaatacttccatcacaattccgatttttacattccgaaggctaccctgaaagacagcggcagctatttctgccggggactcgtcggctccaagaatgtgtcctccgaaaccgtgaatatcacgattacccaaggactggctgtgcctacaatctctagcttctttccgcctggataccaagtctccttctgtcttgtgatggtcctcctgtttgctgtggacacaggactgtacttttccgtgaaa

SEQ ID NO: 1383 - DNA, 1272 bp, synthetic construct
  source 1..1272: mol_type = other DNA
atggccttaccagtgaccgccttgctcctgccgctggccttgctgctccacgccgccaggccgatggagctgactgatttgctcctggcggccatgcttcttgcagtggcaagactaactctgtccagccccgtagctcctgcctgtgaccccagactcctaaataaactgctgcgtgactcccacctccttcacagccgactgagtcagtgtcccgacgtggaccctttgtctatccctgttctgctgcctgctgtggactttagcctgggagaatggaaaacccagacggaacagagcaaggcacaggacattctaggggcagtgtcccttctactggagggagtgatggcagcacgaggacagttggaaccctcctgcctctcatccctcctgggacagctttctgggcaggttcgcctcctcttgggggccctgcagggcctcctaggaacccagcttcctctacagggcaggaccacagctcacaaggaccccaatgccctcttcttgagcttgcaacaactgcttcggggaaaggtgcgcttcctgcttctggtagaaggtcccaccctctgtgtcagacggaccctgccaaccacagctgtcccaagcagtacttctacgcgtggaatgaggactgaggatcttcccaaagctgtcgtctttctcgaaccccaatggtatcgggtgctcgaaaaagactctgtgacactgaaatgccaaggggcctactctcccgaggacaactccacacagtggtttcataatgagtccctcatcagctctcaggccagctcttatttcattgatgccgctacagtggacgactccggcgagtatcggtgtcagaccaatctgtctacactgtctgaccccgtgcagcttgaggtccacattggatggttgctcttgcaagccccacgctgggttttcaaagaggaagatccaatccatctgcggtgccacagctggaaaaacaccgctctccacaaagtcacatacctgcaaaatggcaaaggacgcaaatacttccatcacaattccgatttttacattccgaaggctaccctgaaagacagcggcagctatttctgccggggactcgtcggctccaagaatgtgtcctccgaaaccgtgaatatcacgattacccaaggactggctgtgcctacaatctctagcttctttccgcctggataccaagtctccttctgtcttgtgatggtcctcctgtttgctgtggacacaggactgtacttttccgtgaaa

SEQ ID NO: 1384 - DNA, 870 bp, synthetic construct
  source 1..870: mol_type = other DNA
atggccttaccagtgaccgccttgctcctgccgctggccttgctgctccacgccgccaggccgatggaccccgacctggaaatcagagccgccttcctgcggcagagaaacacagccctgagaacagaggtggccgagctggaacaagaggtgcagcggctggaaaacgaggtgtcccagtacgagacaagatacggccctctcggaggcggaaaaacgcgtacgcgtggaatgaggactgaggatcttcccaaagctgtcgtctttctcgaaccccaatggtatcgggtgctcgaaaaagactctgtgacactgaaatgccaaggggcctactctcccgaggacaactccacacagtggtttcataatgagtccctcatcagctctcaggccagctcttatttcattgatgccgctacagtggacgactccggcgagtatcggtgtcagaccaatctgtctacactgtctgaccccgtgcagcttgaggtccacattggatggttgctcttgcaagccccacgctgggttttcaaagaggaagatccaatccatctgcggtgccacagctggaaaaacaccgctctccacaaagtcacatacctgcaaaatggcaaaggacgcaaatacttccatcacaattccgatttttacattccgaaggctaccctgaaagacagcggcagctatttctgccggggactcgtcggctccaagaatgtgtcctccgaaaccgtgaatatcacgattacccaaggactggctgtgcctacaatctctagcttctttccgcctggataccaagtctccttctgtcttgtgatggtcctcctgtttgctgtggacacaggactgtacttttccgtgaaa

SEQ ID NO: 1385 - DNA, 795 bp, synthetic construct
  source 1..795: mol_type = other DNA
atggccttaccagtgaccgccttgctcctgccgctggccttgctgctccacgccgccaggccggaagttgctgccctcgagaaggaggtagcagctttggaaaaagaagtcgcagcccttgagaaagaagttgcggctctggagaagacgcgtggaatgaggactgaggatcttcccaaagctgtcgtctttctcgaaccccaatggtatcgggtgctcgaaaaagactctgtgacactgaaatgccaaggggcctactctcccgaggacaactccacacagtggtttcataatgagtccctcatcagctctcaggccagctcttatttcattgatgccgctacagtggacgactccggcgagtatcggtgtcagaccaatctgtctacactgtctgaccccgtgcagcttgaggtccacattggatggttgctcttgcaagccccacgctgggttttcaaagaggaagatccaatccatctgcggtgccacagctggaaaaacaccgctctccacaaagtcacatacctgcaaaatggcaaaggacgcaaatacttccatcacaattccgatttttacattccgaaggctaccctgaaagacagcggcagctatttctgccggggactcgtcggctccaagaatgtgtcctccgaaaccgtgaatatcacgattacccaaggactggctgtgcctacaatctctagcttctttccgcctggataccaagtctccttctgtcttgtgatggtcctcctgtttgctgtggacacaggactgtacttttccgtgaaa

SEQ ID NO: 1386 - DNA, 1569 bp, synthetic construct
  source 1..1569: mol_type = other DNA
atggccttaccagtgaccgccttgctcctgccgctggccttgctgctccacgccgccaggccgctgttcaatcaagaggtgcagatccctctgaccgagagctactgtggcccctgtcctaagaactggatctgctacaagaacaactgctaccagttcttcgacgagagcaagaattggtacgagagccaggccagctgcatgagccagaatgccagcctgctgaaggtgtacagcaaagaggaccaggacctgctgaaactggtcaagagcgcccactggatgggccttgtgcacatccccaccaatggctcttggcagtgggaggacggcagcattctgagccctaacctgctgaccatcatcgagatgcagaagggcgactgcgccctgtacgccagcagctttaagggcttcatcgagaattgcagcaccccgaacacctacatctgtatgcagagaaccgttggcggaggcggaagtggaggcggaggatctggcggcggaggctctgacctctttaatcaagaagtccagattccactcaccgaatcctactgcggaccttgtccaaaaaattggatttgttataagaacaactgttatcaattctttgatgagtctaaaaattggtatgagtcccaggcttcctgcatgtctcagaacgcttctctgctgaaagtctactctaaagaagatcaggatctcctgaagctcgtcaagtctgcccattggatggggctcgtccacattcctaccaacggaagctggcaatgggaagatggctccatcctgtctccaaatctgctcacgattattgaaatgcagaaaggggattgtgctctctacgccagctccttcaagggatttattgagaactgtagcacgcccaatacttatatctgtatgcaacggaccgtgacgcgtggaatgaggactgaggatcttcccaaagctgtcgtctttctcgaaccccaatggtatcgggtgctcgaaaaagactctgtgacactgaaatgccaaggggcctactctcccgaggacaactccacacagtggtttcataatgagtccctcatcagctctcaggccagctcttatttcattgatgccgctacagtggacgactccggcgagtatcggtgtcagaccaatctgtctacactgtctgaccccgtgcagcttgaggtccacattggatggttgctcttgcaagccccacgctgggttttcaaagaggaagatccaatccatctgcggtgccacagctggaaaaacaccgctctccacaaagtcacatacctgcaaaatggcaaaggacgcaaatacttccatcacaattccgatttttacattccgaaggctaccctgaaagacagcggcagctatttctgccggggactcgtcggctccaagaatgtgtcctccgaaaccgtgaatatcacgattacccaaggactggctgtgcctacaatctctagcttctttccgcctggataccaagtctccttctgtcttgtgatggtcctcctgtttgctgtggacacaggactgtacttttccgtgaaa

SEQ ID NO: 1387 - DNA, 1569 bp, synthetic construct
  source 1..1569: mol_type = other DNA
atggccttaccagtgaccgccttgctcctgccgctggccttgctgctccacgccgccaggccgctgttcaatcaagaggtgcagatccctctgaccgagagctactgtggcccctgtcctaagaactggatctgctacaagaacaactgctaccagttcttcgacgagagcaagaattggtacgagagccaggccagctgcatgagccagaatgccagcctgctgaaggtgtacagcaaagaggaccaggacctgctgaaactggtcaagagcgcccactggatgggccttgtgcacatccccaccaatggctcttggcagtgggaggacggcagcattctgagccctaacctgctgaccatcatcgagatgcagaagggcgactgcgccctgtacgccagcagctttaagggctacatcgagaattgcagcaccccgaacacctacatctgtatgcagagaaccgtttctggcggaggcggctctggaggaggcggaagtggcggcggaggcgacctctttaatcaagaagtccagattccactcaccgaatcctactgcggaccttgtccaaaaaattggatttgttataagaacaactgttatcaattctttgatgagtctaaaaattggtatgagtcccaggcttcctgcatgtctcagaacgcttctctgctgaaagtctactctaaagaagatcaggatctcctgaagctcgtcaagtctgcccattggatggggctcgtccacattcctaccaacggaagctggcaatgggaagatggctccatcctgtctccaaatctgctcacgattattgaaatgcagaaaggggattgtgctctctacgccagctccttcaagggatatattgagaactgtagcacgcccaatacttatatctgtatgcaacggaccgtgacgcgtggaatgaggactgaggatcttcccaaagctgtcgtctttctcgaaccccaatggtatcgggtgctcgaaaaagactctgtgacactgaaatgccaaggggcctactctcccgaggacaactccacacagtggtttcataatgagtccctcatcagctctcaggccagctcttatttcattgatgccgctacagtggacgactccggcgagtatcggtgtcagaccaatctgtctacactgtctgaccccgtgcagcttgaggtccacattggatggttgctcttgcaagccccacgctgggttttcaaagaggaagatccaatccatctgcggtgccacagctggaaaaacaccgctctccacaaagtcacatacctgcaaaatggcaaaggacgcaaatacttccatcacaattccgatttttacattccgaaggctaccctgaaagacagcggcagctatttctgccggggactcgtcggctccaagaatgtgtcctccgaaaccgtgaatatcacgattacccaaggactggctgtgcctacaatctctagcttctttccgcctggataccaagtctccttctgtcttgtgatggtcctcctgtttgctgtggacacaggactgtacttttccgtgaaa

SEQ ID NO: 1388 - DNA, 2127 bp, synthetic construct
  source 1..2127: mol_type = other DNA
atggccttaccagtgaccgccttgctcctgccgctggccttgctgctccacgccgccaggccggacatccagatgacacagagccctagcagcctgtctgccagcgtgggagacagagtgaccatcacatgcaaggccagccaggatgtgggcacagccgtggattggtatcagcagaagcctggcaaggcccctaagctgctgatctactgggccagcacaagacacacaggcgtgcccagcagattttctggcagcggctctggcaccgacttcaccctgacaatatccagcctccagcctgaggacttcgccacctactactgccagcagtacaacagctaccctctgaccttcggccagggcaccaaggtggaaatcaaaagactcgaggacctgaagaacgtgttcccacctgaggtggccgtgttcgagcctagcgaggccgagatcagccacacccagaaagccaccctcgtgtgcctggctaccggcttctaccccgaccatgtggaactgtcttggtgggtcaacggcaaagaggtgcacagcggcgtgtctaccgacccccagccactgaaagaacagcccgccctgaacgacagccggtactgcctgagcagcagactgagagtgtccgccaccttctggcagaacccccggaaccacttcagatgccaggtgcagttctacggcctgagcgagaacgacgagtggacccaggacagagccaagcccgtgacccagatcgtgtctgccgaagcctggggcagagccgattgcggatcccagagcttcggcctgctggaccccaagctgtgctacctgctggatggcatcctgttcatctacggcgtgatcctgaccgccctgttcctgagagtgaagttcagcagaagcgccgacgcccctgcctaccagcagggacagaaccaactgtacaacgagctgaacctgggcagacgggaagagtacgacgtgctggacaagcggagaggcagggaccctgagatgggcggaaagccccagcggagaaagaacccccaggaaggactgtataacgaactccagaaagacaagatggccgaagcctacagcgagatcggcatgaagggcgagcggagaagaggcaagggccacgatggcctgtaccagggcctgagcaccgccaccaaggacacctatgacgccctgcacatgcaggccctgcctccaagaagggccaagcgatctggatctggagcaacaaacttctcactactcaaacaagcaggtgacgtggaggagaatcccgggcctactagtatggactggatttggcgcatccttttccttgtcggcgctgctaccggcgcgcattccttcgaagtgcagctggttgaatcaggtggcggcctggttcaacctggcggatctctgagactgagctgtgccgccagcggctacacctttaccgagtacacaatccactgggtccgacaggcccctggcaaaggacttgagtgggtcgccaacatcaaccccaacaatggcggcaccacctacaaccagaagttcgaggacagattcaccatcagccgggacaacagcaagaacaccctgtacctccagatgaactccctgagagccgaggacaccgccgtgtactattgtgccagaggctggaacttcgactactggggccagggaacactggtcaccgttagctctacgcgtatccagaaccctgatcctgccgtgtaccagctgcgggatagcaagagcagcgacaagagcgtgtgtctgttcaccgacttcgacagccagaccaacgtgtcccagagcaaggactccgacgtgtacatcaccgataagaccgtgctggacatgcggagcatggacttcaagagcaactccgccgtggcctggtccaacaagtccgatttcgcctgcgccaacgccttcaacaacagcattatccccgaggacacattcttcccaagccccgagagcagctgcggtaccattacccaaggactggctgtgcctacaatctctagcttctttccgcctggataccaagtctccttctgtcttgtgatggtcctcctgtttgctgtggacacaggactgtacttttccgtgaaa

SEQ ID NO: 1389 - DNA, 1902 bp, synthetic construct
  source 1..1902: mol_type = other DNA
atggccttaccagtgaccgccttgctcctgccgctggccttgctgctccacgccgccaggccggacatccagatgacacagagccctagcagcctgtctgccagcgtgggagacagagtgaccatcacatgcaaggccagccaggatgtgggcacagccgtggattggtatcagcagaagcctggcaaggcccctaagctgctgatctactgggccagcacaagacacacaggcgtgcccagcagattttctggcagcggctctggcaccgacttcaccctgacaatatccagcctccagcctgaggacttcgccacctactactgccagcagtacaacagctaccctctgaccttcggccagggcaccaaggtggaaatcaaaagactcgaggacctgaagaacgtgttcccacctgaggtggccgtgttcgagcctagcgaggccgagatcagccacacccagaaagccaccctcgtgtgcctggctaccggcttctaccccgaccatgtggaactgtcttggtgggtcaacggcaaagaggtgcacagcggcgtgtctaccgacccccagccactgaaagaacagcccgccctgaacgacagccggtactgcctgagcagcagactgagagtgtccgccaccttctggcagaacccccggaaccacttcagatgccaggtgcagttctacggcctgagcgagaacgacgagtggacccaggacagagccaagcccgtgacccagatcgtgtctgccgaagcctggggcagagccgattgcggatccctgggagagcctcagctgtgctatatcctggacgccatcctgtttctgtacggcatcgtgctgaccctgctgtactgccggctgaagatccaagtgcggaaggccgccatcaccagctacgagaaatccgacggcgtgtacaccggcctgagcaccagaaatcaagagacatacgagacactgaagcacgaaaagcctccacaaagggccaagcgatctggatctggagcaacaaacttctcactactcaaacaagcaggtgacgtggaggagaatcccgggcctactagtatggactggatttggcgcatccttttccttgtcggcgctgctaccggcgcgcattccttcgaagtgcagctggttgaatcaggtggcggcctggttcaacctggcggatctctgagactgagctgtgccgccagcggctacacctttaccgagtacacaatccactgggtccgacaggcccctggcaaaggacttgagtgggtcgccaacatcaaccccaacaatggcggcaccacctacaaccagaagttcgaggacagattcaccatcagccgggacaacagcaagaacaccctgtacctccagatgaactccctgagagccgaggacaccgccgtgtactattgtgccagaggctggaacttcgactactggggccagggaacactggtcaccgttagctctacgcgtatccagaaccctgatcctgccgtgtaccagctgcgggatagcaagagcagcgacaagagcgtgtgtctgttcaccgacttcgacagccagaccaacgtgtcccagagcaaggactccgacgtgtacatcaccgataagaccgtgctggacatgcggagcatggacttcaagagcaactccgccgtggcctggtccaacaagtccgatttcgcctgcgccaacgccttcaacaacagcattatccccgaggacacattcttcccaagccccgagagcagctgcggtaccattacccaaggactggctgtgcctacaatctctagcttctttccgcctggataccaagtctccttctgtcttgtgatggtcctcctgtttgctgtggacacaggactgtacttttccgtgaaa

SEQ ID NO: 1390 - DNA, 1830 bp, synthetic construct
  source 1..1830: mol_type = other DNA
atggccttaccagtgaccgccttgctcctgccgctggccttgctgctccacgccgccaggccggacatccagatgacacagagccctagcagcctgtctgccagcgtgggagacagagtgaccatcacatgcaaggccagccaggatgtgggcacagccgtggattggtatcagcagaagcctggcaaggcccctaagctgctgatctactgggccagcacaagacacacaggcgtgcccagcagattttctggcagcggctctggcaccgacttcaccctgacaatatccagcctccagcctgaggacttcgccacctactactgccagcagtacaacagctaccctctgaccttcggccagggcaccaaggtggaaatcaaaagactcgagggacagcctaaggccaatcctaccgtgacactgttccctccaagcagcgaagaactccaggccaacaaggccacacttgtgtgcctgatctccgacttctaccctggggctgtgacagtggcttggaaggccgatggatctcctgtgaaagccggcgtggaaaccaccaagccatccaagcagagcaacaacaaatacgccgccagctcctacctgagcctgacacctgagcagtggaagtcccacagatcctacagctgccaagtgacccacgaaggcagcaccgtggaaaagacagtggcccctacagagtgcagcggatccctgggagagcctcagctgtgctatatcctggacgccatcctgtttctgtacggcatcgtgctgaccctgctgtactgccggctgaagatccaagtgcggaaggccgccatcaccagctacgagaaatccgacggcgtgtacaccggcctgagcaccagaaatcaagagacatacgagacactgaagcacgaaaagcctccacaaagggccaagcgatctggatctggagcaacaaacttctcactactcaaacaagcaggtgacgtggaggagaatcccgggcctactagtatggactggatttggcgcatccttttccttgtcggcgctgctaccggcgcgcattccttcgaagtgcagctggttgaatcaggtggcggcctggttcaacctggcggatctctgagactgagctgtgccgccagcggctacacctttaccgagtacacaatccactgggtccgacaggcccctggcaaaggacttgagtgggtcgccaacatcaaccccaacaatggcggcaccacctacaaccagaagttcgaggacagattcaccatcagccgggacaacagcaagaacaccctgtacctccagatgaactccctgagagccgaggacaccgccgtgtactattgtgccagaggctggaacttcgactactggggccagggaacactggtcaccgttagctctacgcgtatccagaaccctgatcctgccgtgtaccagctgcgggatagcaagagcagcgacaagagcgtgtgtctgttcaccgacttcgacagccagaccaacgtgtcccagagcaaggactccgacgtgtacatcaccgataagaccgtgctggacatgcggagcatggacttcaagagcaactccgccgtggcctggtccaacaagtccgatttcgcctgcgccaacgccttcaacaacagcattatccccgaggacacattcttcccaagccccgagagcagctgcggtaccattacccaaggactggctgtgcctacaatctctagcttctttccgcctggataccaagtctccttctgtcttgtgatggtcctcctgtttgctgtggacacaggactgtacttttccgtgaaa

SEQ ID NO: 1391 - DNA, 1857 bp, synthetic construct
  source 1..1857: mol_type = other DNA
atggccttaccagtgaccgccttgctcctgccgctggccttgctgctccacgccgccaggccggacatccagatgacacagagccctagcagcctgtctgccagcgtgggagacagagtgaccatcacatgcaaggccagccaggatgtgggcacagccgtggattggtatcagcagaagcctggcaaggcccctaagctgctgatctactgggccagcacaagacacacaggcgtgcccagcagattttctggcagcggctctggcaccgacttcaccctgacaatatccagcctccagcctgaggacttcgccacctactactgccagcagtacaacagctaccctctgaccttcggccagggcaccaaggtggaaatcaaaagactcgagggacagcctaaggccaatcctaccgtgacactgttccctccaagcagcgaagaactccaggccaacaaggccacacttgtgtgcctgatctccgacttctaccctggggctgtgacagtggcttggaaggccgatggatctcctgtgaaagccggcgtggaaaccaccaagccatccaagcagagcaacaacaaatacgccgccagctcctacctgagcctgacacctgagcagtggaagtcccacagatcctacagctgccaagtgacccacgaaggcagcaccgtggaaaagacagtggcccctacagagtgcagcggatccctgggagagcctcagctgtgctatatcctggacgccatcctgtttctgtacggcatcgtgctgaccctgctgtactgccggctgaagatccaagtgcggaaggccgccatcaccagctacgagaaatccgacggcgtgtacaccggcctgagcaccagaaatcaagagacatacgagacactgaagcacgaaaagcctccacaaagggccaagcgatctggatctggagcaacaaacttctcactactcaaacaagcaggtgacgtggaggagaatcccgggcctactagtatggactggatttggcgcatccttttccttgtcggcgctgctaccggcgcgcattccttcgaagtgcagctggttgaatcaggtggcggcctggttcaacctggcggatctctgagactgagctgtgccgccagcggctacacctttaccgagtacacaatccactgggtccgacaggcccctggcaaaggacttgagtgggtcgccaacatcaaccccaacaatggcggcaccacctacaaccagaagttcgaggacagattcaccatcagccgggacaacagcaagaacaccctgtacctccagatgaactccctgagagccgaggacaccgccgtgtactattgtgccagaggctggaacttcgactactggggccagggaacactggtcaccgttagctctacgcgtgcctctacaaagggaccctccgtgtttcctctggctcccagcagcaagtctacaagcggaggaacagccgctctgggctgcctggtcaaggattactttcccgagcctgtgaccgtgtcctggaatagcggagcactgacaagcggcgtgcacacctttccagccgtgctgcaaagcagcggcctgtactctctgagcagcgtggtcacagtgcctagctctagcctgggcacccagacctacatctgcaatgtgaaccacaagcctagcaacaccaaggtggacaagagagtggaacccaagagctgtggtaccattacccaaggactggctgtgcctacaatctctagcttctttccgcctggataccaagtctccttctgtcttgtgatggtcctcctgtttgctgtggacacaggactgtacttttccgtgaaa

SEQ ID NO: 1392 - DNA, 1461 bp, synthetic construct
  source 1..1461: mol_type = other DNA
atggccttaccagtgaccgccttgctcctgccgctggccttgctgctccacgccgccaggccggacgtgcagatgatccagacccccgatagcctggccgtgtccctgggacagagagccaccatctcttgcagagccagcgagagcgtggacaactacggcatcagcttcatgcactggtatcagcagaagcccggccagagccccaagctgctgatctacagagcctccaacctggaaagcggcatccccgccagattttccggcagcggcagcagaaccgacttcaccctgaccatcaaccccgtggaaaccgacgacgtggcaacctactactgccagcagaacaacaaggacccccccacctttggcggaggcaccaagctggaaatcaagggcggaggcggaagtggaggcggaggatctggcggcggaggctctgggggaggcggctctcaggtgcaactccagcagtctggcgctgagcttgtgaagcctggggccagcgtgaagattagctgcaaggccagcggctacgccttcagcagctactggatgaactgggtcaagcagcggcctggcaagggcctggaatggatcggccaaatctaccccggcgacggcgacaccacctacaacggcaagttcaagggcaaggccaccctgacagccgacaagagcagcagcaccgtgtacatgcaactgaacagcctgaccagcgaggacagcgccgtgtacttctgcgtgcggtactactacggcagctccggctacttcgactattggggccagggcaccacactgaccgtgtcctctacgcgtggaatgaggactgaggatcttcccaaagctgtcgtctttctcgaaccccaatggtatcgggtgctcgaaaaagactctgtgacactgaaatgccaaggggcctactctcccgaggacaactccacacagtggtttcataatgagtccctcatcagctctcaggccagctcttatttcattgatgccgctacagtggacgactccggcgagtatcggtgtcagaccaatctgtctacactgtctgaccccgtgcagcttgaggtccacattggatggttgctcttgcaagccccacgctgggttttcaaagaggaagatccaatccatctgcggtgccacagctggaaaaacaccgctctccacaaagtcacatacctgcaaaatggcaaaggacgcaaatacttccatcacaattccgatttttacattccgaaggctaccctgaaagacagcggcagctatttctgccggggactcgtcggctccaagaatgtgtcctccgaaaccgtgaatatcacgattacccaaggactggctgtgcctacaatctctagcttctttccgcctggataccaagtctccttctgtcttgtgatggtcctcctgtttgctgtggacacaggactgtacttttccgtg

SEQ ID NO: 1393 - DNA, 1434 bp, synthetic construct
  source 1..1434: mol_type = other DNA
atggccttaccagtgaccgccttgctcctgccgctggccttgctgctccacgccgccaggccggacgtgcagatgatccagacccccagcagcctgtctgccagcctgggcgatagagtgaccatcagctgtcgggccagccaggacatcggcaactacctgaactggtatcagcagaaacccgacggcaccgtgaagctgctgatctactacaccagcagactgcacagcggcgtgcccagcagattttctggcagcggctctggcaccgagtacagcctgaccatctccaacctggaacaggaagatattgctacctacttctgtcagcaaggcagcgccctgccccctacatttggcggcggaacaaagctggaaatcaacggcggaggcggaagtggaggcggaggatctggcggcggaggctctgctctccagctccagcagtctggcgcagaactcgtgcggcctggcgcttctgtgaccctgagctgtaaagccagcggctacaccttcaccgactacgagatgcactgggtcaagcagacccctgtgcacggcctggaatggatcggagccatcgaccctgagacaggcggcaccgcctacaaccagaagttcgagggcaaggccatcctgaccgccgacaagagcagcagcacagcctacatggaactgcggagcctgacctccgaggacagccccgtgtactactgtgccagacggcggtactacggcagcagctccttcgactattggggccagggcaccaccctgaccgtgtctagtacgcgtggaatgaggactgaggatcttcccaaagctgtcgtctttctcgaaccccaatggtatcgggtgctcgaaaaagactctgtgacactgaaatgccaaggggcctactctcccgaggacaactccacacagtggtttcataatgagtccctcatcagctctcaggccagctcttatttcattgatgccgctacagtggacgactccggcgagtatcggtgtcagaccaatctgtctacactgtctgaccccgtgcagcttgaggtccacattggatggttgctcttgcaagccccacgctgggttttcaaagaggaagatccaatccatctgcggtgccacagctggaaaaacaccgctctccacaaagtcacatacctgcaaaatggcaaaggacgcaaatacttccatcacaattccgatttttacattccgaaggctaccctgaaagacagcggcagctatttctgccggggactcgtcggctccaagaatgtgtcctccgaaaccgtgaatatcacgattacccaaggactggctgtgcctacaatctctagcttctttccgcctggataccaagtctccttctgtcttgtgatggtcctcctgtttgctgtggacacaggactgtacttttccgtg

SEQ ID NO: 1394 - DNA, 1440 bp, synthetic construct
  source 1..1440: mol_type = other DNA
atggccttaccagtgaccgccttgctcctgccgctggccttgctgctccacgccgccaggccggacatcgtgctgacacagagccctgccaccctgtctctgagccctggcgatagagccaccatcagctgtagagccagcgagagcgtgaccatcctgggcagccacctgatctactggtatcagcagaagcccggccagccccccagactgctgattcagctggcctccaatgtgcagaccggcgtgccagccagattttccggcagcggcagcagaaccgacttcaccctgaccatcagcagcgtggaacccgaggacttcgccgtgtactactgcctccagagccggaccatccccagaacattcggccagggcaccaagctggaaatcaagagaggcggaggcggaagtggaggcggaggatctggcggcggaggctctcaggtgcagctggtgcagtctggccccgaagtgaagaaacccggcgagtccgtgaagatcagctgcaaggccagcggctacaccttccggcactacagcatgaactgggtcaagcaggccccaggccagggcctgaagtggatgggcagaatcaacaccgagagcggcgtgcccatctacgccgacgacttcaagggccggttcagcttcaccgtggacaccagcgccagcaccgcctacctggaaatctccagcctgaccagcgaggataccgccgtgtatttctgctccaacgactacctgtacagcctggatttctggggccagggaaccaccctgacagtgtcctctacgcgtggaatgaggactgaggatcttcccaaagctgtcgtctttctcgaaccccaatggtatcgggtgctcgaaaaagactctgtgacactgaaatgccaaggggcctactctcccgaggacaactccacacagtggtttcataatgagtccctcatcagctctcaggccagctcttatttcattgatgccgctacagtggacgactccggcgagtatcggtgtcagaccaatctgtctacactgtctgaccccgtgcagcttgaggtccacattggatggttgctcttgcaagccccacgctgggttttcaaagaggaagatccaatccatctgcggtgccacagctggaaaaacaccgctctccacaaagtcacatacctgcaaaatggcaaaggacgcaaatacttccatcacaattccgatttttacattccgaaggctaccctgaaagacagcggcagctatttctgccggggactcgtcggctccaagaatgtgtcctccgaaaccgtgaatatcacgattacccaaggactggctgtgcctacaatctctagcttctttccgcctggataccaagtctccttctgtcttgtgatggtcctcctgtttgctgtggacacaggactgtacttttccgtg

SEQ ID NO: 1395 - DNA, 1440 bp, synthetic construct
  source 1..1440: mol_type = other DNA
atggccttaccagtgaccgccttgctcctgccgctggccttgctgctccacgccgccaggccggacatccagatgacccagagccctagctcactgagcgccagcgtgggcgacagggtgaccattacctgctccgccagccaggacatcagcaactacctgaactggtaccagcagaagcccggcaaggcccccaagctgctgatctactacacctccaacctgcactccggcgtgcccagcaggttcagcggaagcggcagcggcaccgatttcaccctgaccatctccagcctgcagcccgaggacttcgccacctactactgccagcagtacaggaagctcccctggactttcggccagggcaccaaactggagatcaagcgtggcggaggcggaagtggaggcggaggatctggcggcggaggctctcaggtgcagctggtccagagcggcgccgaagtgaagaagcccggcagctccgtgaaagtgagctgcaaggccagcggcggcaccttcagcaactactggatgcactgggtgaggcaggcccccggacagggcctggagtggatgggcgccacctacaggggccacagcgacacctactacaaccagaagttcaagggccgggtgaccatcaccgccgacaagagcaccagcaccgcctacatggaactgagcagcctcaggagcgaggacaccgctgtgtattactgcgccaggggcgccatctacgacggctacgacgtgctggacaactggggccagggcacactggtgaccgtgtccagcacgcgtggaatgaggactgaggatcttcccaaagctgtcgtctttctcgaaccccaatggtatcgggtgctcgaaaaagactctgtgacactgaaatgccaaggggcctactctcccgaggacaactccacacagtggtttcataatgagtccctcatcagctctcaggccagctcttatttcattgatgccgctacagtggacgactccggcgagtatcggtgtcagaccaatctgtctacactgtctgaccccgtgcagcttgaggtccacattggatggttgctcttgcaagccccacgctgggttttcaaagaggaagatccaatccatctgcggtgccacagctggaaaaacaccgctctccacaaagtcacatacctgcaaaatggcaaaggacgcaaatacttccatcacaattccgatttttacattccgaaggctaccctgaaagacagcggcagctatttctgccggggactcgtcggctccaagaatgtgtcctccgaaaccgtgaatatcacgattacccaaggactggctgtgcctacaatctctagcttctttccgcctggataccaagtctccttctgtcttgtgatggtcctcctgtttgctgtggacacaggactgtacttttccgtg

SEQ ID NO: 1396 - DNA, 1455 bp, synthetic construct
  source 1..1455: mol_type = other DNA
atggccttaccagtgaccgccttgctcctgccgctggccttgctgctccacgccgccaggccggacatcgtgatgacccagagccccgatagcctggccgtgtctctgggagagagagccaccatcaactgcgagagcagccagagcctgctgaacagcggcaaccagaagaactacctgacctggtatcagcagaagcccggccagccccccaagcccctgatctattgggccagcaccagagaaagcggcgtgcccgatagattcagcggcagcggaagcggcaccgacttcaccctgaccatcagttctcttcaggccgaggacgtggccgtgtactactgccagaacgactacagctacccctacaccttcggccagggcaccaagctggaaatcaagagaggcggaggcggaagtggaggcggaggatctggcggcggaggctctgaagtgcagctggtgcagtctggggccgaagtgaagaagcctggcgagagcctgaagatcagctgcaagggcagcggctacagcttcaccgactactacatgaagtgggccagacagatgcccggcaagggcctggaatggatgggcgacatcatccccagcaacggggccaccttctacaaccagaaattcaagggccaagtgaccatctccgccgacaagagcatcagcaccacctacctccagtggtccagcctgaaggccagcgacaccgccatgtactattgcgccagaagccatctgctgcgggccagttggttcgcctattggggccagggaacaatggtcacagtgtccagcacgcgtggaatgaggactgaggatcttcccaaagctgtcgtctttctcgaaccccaatggtatcgggtgctcgaaaaagactctgtgacactgaaatgccaaggggcctactctcccgaggacaactccacacagtggtttcataatgagtccctcatcagctctcaggccagctcttatttcattgatgccgctacagtggacgactccggcgagtatcggtgtcagaccaatctgtctacactgtctgaccccgtgcagcttgaggtccacattggatggttgctcttgcaagccccacgctgggttttcaaagaggaagatccaatccatctgcggtgccacagctggaaaaacaccgctctccacaaagtcacatacctgcaaaatggcaaaggacgcaaatacttccatcacaattccgatttttacattccgaaggctaccctgaaagacagcggcagctatttctgccggggactcgtcggctccaagaatgtgtcctccgaaaccgtgaatatcacgattacccaaggactggctgtgcctacaatctctagcttctttccgcctggataccaagtctccttctgtcttgtgatggtcctcctgtttgctgtggacacaggactgtacttttccgtg

SEQ ID NO: 1397 - DNA, 1440 bp, synthetic construct
  source 1..1440: mol_type = other DNA
atggccttaccagtgaccgccttgctcctgccgctggccttgctgctccacgccgccaggccggacatccagatgacccagtctaccagttccctgagtgcatccctcggagacagggtgacgatcagttgcagcgcaagccaagggatcaataactatctgaactggtatcagcagaaaccggacggaacagtcgaactcctgatttattacaccagcacccttcagagtggcgtcccttcccggttcagtggctccggaagcgggaccgattactccctgaccatttctaatctggagccagaggacataggaacgtattattgccagcagtatagtaaactgccacgaacttttggaggggggacgaaactggagatcaaaggcggaggcggaagtggaggcggaggatctggcggcggaggctctcaggtgcaactccagcagtccggaagcgagcttatgatgccaggggcatcagtgaagatcagctgcaaggctactggctacaccttctctaattactggatagagtgggttaaacaaaggccagggcacggcctggaatggatcggcgagatcctgcctgggacaggccgaaccatttataacgagaagttcaaaggcaaggctactttcaccgcagatataagctctaatacagtgcaaatgcagctctcttccctgacaagtgaggatagtgccgtgtattattgcgcacgaagagattactatggaaatttttattacgctatggattattggggtcaaggaacaagtgtgaccgttagcagcacgcgtggaatgaggactgaggatcttcccaaagctgtcgtctttctcgaaccccaatggtatcgggtgctcgaaaaagactctgtgacactgaaatgccaaggggcctactctcccgaggacaactccacacagtggtttcataatgagtccctcatcagctctcaggccagctcttatttcattgatgccgctacagtggacgactccggcgagtatcggtgtcagaccaatctgtctacactgtctgaccccgtgcagcttgaggtccacattggatggttgctcttgcaagccccacgctgggttttcaaagaggaagatccaatccatctgcggtgccacagctggaaaaacaccgctctccacaaagtcacatacctgcaaaatggcaaaggacgcaaatacttccatcacaattccgatttttacattccgaaggctaccctgaaagacagcggcagctatttctgccggggactcgtcggctccaagaatgtgtcctccgaaaccgtgaatatcacgattacccaaggactggctgtgcctacaatctctagcttctttccgcctggataccaagtctccttctgtcttgtgatggtcctcctgtttgctgtggacacaggactgtacttttccgtg

SEQ ID NO: 1398 - DNA, 1425 bp, synthetic construct
  source 1..1425: mol_type = other DNA
atggccttaccagtgaccgccttgctcctgccgctggccttgctgctccacgccgccaggccggacatccagatgacccagagccctgccagcctgtccgtgtctgtgggcgagacagtgaccatcacctgtcgggccagcgagaacatctacagcaacctggcctggtatcagcagaagcagggcaagagcccccaactgctggtgtacgccgccaccaatctggccgatggcgtgcccagcagattttccggctctggcagcggcacccagtacagcctgaagatcaacagcctccagagcgaggacttcggcagctactactgccagcacttctggggcacctggacctttggaggaggcaccaccctggaaatcaagggcggaggcggaagtggaggcggaggatctggcggcggaggctctgaagtgcaactccagcagagcggccctgagcttgtgaagcctggcgcttccgtgaagatgagctgcaaggccagcggctacaccttcaccgactactacatgaagtggatgaagcagagccacggcaagtccctggaatggatcggcgacatcaaccccaacaacggcggcaccacctacaaccagaagttcaagggcaaggccaccctgaccgtggacaagagcagcagcaccgcctacatgcaactgaacagcctgaccagcgaggacagcgccgtgtactactgcgccagagactacggctacggctatttcgactactggggccagggcacaaccctgacagtgtcctctacgcgtggaatgaggactgaggatcttcccaaagctgtcgtctttctcgaaccccaatggtatcgggtgctcgaaaaagactctgtgacactgaaatgccaaggggcctactctcccgaggacaactccacacagtggtttcataatgagtccctcatcagctctcaggccagctcttatttcattgatgccgctacagtggacgactccggcgagtatcggtgtcagaccaatctgtctacactgtctgaccccgtgcagcttgaggtccacattggatggttgctcttgcaagccccacgctgggttttcaaagaggaagatccaatccatctgcggtgccacagctggaaaaacaccgctctccacaaagtcacatacctgcaaaatggcaaaggacgcaaatacttccatcacaattccgatttttacattccgaaggctaccctgaaagacagcggcagctatttctgccggggactcgtcggctccaagaatgtgtcctccgaaaccgtgaatatcacgattacccaaggactggctgtgcctacaatctctagcttctttccgcctggataccaagtctccttctgtcttgtgatggtcctcctgtttgctgtggacacaggactgtacttttccgtg

SEQ ID NO: 1399 - DNA, 1437 bp, synthetic construct
  source 1..1437: mol_type = other DNA
atggccttaccagtgaccgccttgctcctgccgctggccttgctgctccacgccgccaggccggacgagatcgtgctgacacagagccccgccaccctgtcactgtctccaggcgaaagagccaccctgagctgtagcgccagcagcagcgtgtcctacatgcactggtatcagcagaagcccggccaggcccccagactgctgatctacgataccagcaagctggcctccggcatccccgccagattttctggcagcggctccggcaccgacttcaccctgacaatcagcagcctggaacccgaggacgtggccgtgtactactgttttcaaggcagcgtgtaccccttcaccttcggccagggcaccaagctggaaatcaagagaggtggcggtggctcgggcggtggtgggtcgggtggcggcggatctcaggtgcagctccaggaatctggccctggcctcgtgaagcctagccagaccctgagcctgacctgtaccgtgtctggcggcagcatcagcacaagcggcatgggcgtgggctggatcagacagcaccctggcaagggcctggaatggatcggccacatttggtgggacgacgacaagcggtacaaccccgccctgaagtccagagtgaccatcagcgtggacaccagcaagaaccagttcagcctgaagctgagcagcgtgacagccgccgataccgccgtgtattattgcgcccggatggaactgtggtcctactacttcgactactggggccagggaaccctcgtgaccgtgtctagtacgcgtggaatgaggactgaggatcttcccaaagctgtcgtctttctcgaaccccaatggtatcgggtgctcgaaaaagactctgtgacactgaaatgccaaggggcctactctcccgaggacaactccacacagtggtttcataatgagtccctcatcagctctcaggccagctcttatttcattgatgccgctacagtggacgactccggcgagtatcggtgtcagaccaatctgtctacactgtctgaccccgtgcagcttgaggtccacattggatggttgctcttgcaagccccacgctgggttttcaaagaggaagatccaatccatctgcggtgccacagctggaaaaacaccgctctccacaaagtcacatacctgcaaaatggcaaaggacgcaaatacttccatcacaattccgatttttacattccgaaggctaccctgaaagacagcggcagctatttctgccggggactcgtcggctccaagaatgtgtcctccgaaaccgtgaatatcacgattacccaaggactggctgtgcctacaatctctagcttctttccgcctggataccaagtctccttctgtcttgtgatggtcctcctgtttgctgtggacacaggactgtacttttccgtg

SEQ ID NO: 1400 - DNA, 1434 bp, synthetic construct
  source 1..1434: mol_type = other DNA
atggccttaccagtgaccgccttgctcctgccgctggccttgctgctccacgccgccaggccggacatccagatgacacagactacatcctccctgtctgcctctctgggagacagagtcaccatcagttgcagggcaagtcaggacattagtaaatatttaaattggtatcagcagaaaccagatggaactgttaaactcctgatctaccatacatcaagattacactcaggagtcccatcaaggttcagtggcagtgggtctggaacagattattctctcaccattagcaacctggagcaagaagatattgccacttacttttgccaacagggtaatacgcttccgtacacgttcggaggggggaccaagctggagatcacaggtggcggtggctcgggcggtggtgggtcgggtggcggcggatctgaggtgaaactgcaggagtcaggacctggcctggtggcgccctcacagagcctgtccgtcacatgcactgtctcaggggtctcattacccgactatggtgtaagctggattcgccagcctccacgaaagggtctggagtggctgggagtaatatggggtagtgaaaccacatactataattcagctctcaaatccagactgaccatcatcaaggacaactccaagagccaagttttcttaaaaatgaacagtctgcaaactgatgacacagccatttactactgtgccaaacattattactacggtggtagctatgctatggactactggggtcaaggaacctcagtcaccgtctcctcaacgcgtggaatgaggactgaggatcttcccaaagctgtcgtctttctcgaaccccaatggtatcgggtgctcgaaaaagactctgtgacactgaaatgccaaggggcctactctcccgaggacaactccacacagtggtttcataatgagtccctcatcagctctcaggccagctcttatttcattgatgccgctacagtggacgactccggcgagtatcggtgtcagaccaatctgtctacactgtctgaccccgtgcagcttgaggtccacattggatggttgctcttgcaagccccacgctgggttttcaaagaggaagatccaatccatctgcggtgccacagctggaaaaacaccgctctccacaaagtcacatacctgcaaaatggcaaaggacgcaaatacttccatcacaattccgatttttacattccgaaggctaccctgaaagacagcggcagctatttctgccggggactcgtcggctccaagaatgtgtcctccgaaaccgtgaatatcacgattacccaaggactggctgtgcctacaatctctagcttctttccgcctggataccaagtctccttctgtcttgtgatggtcctcctgtttgctgtggacacaggactgtacttttccgtg

SEQ ID NO: 1401 - DNA, 1434 bp, synthetic construct
  source 1..1434: mol_type = other DNA
atggccttaccagtgaccgccttgctcctgccgctggccttgctgctccacgccgccaggccggagatcgtgatgacccagagccctgccaccctgtctctgagccctggcgaaagagccaccctgagctgtagagccagccaggacatcagcaagtacctgaactggtatcagcagaagcccggccaggcccccagactgctgatctaccacaccagcagactgcacagcggcatccccgccagattttctggctctggcagcggcaccgactacaccctgacaatcagcagcctccagcccgaggacttcgccgtgtacttctgtcagcaaggcaacaccctgccctacaccttcggccagggcaccaagctggaaatcaagggcggaggcggaagtggaggcggaggatctggcggcggaggctctcaggtgcaactccaggaatctggccctggcctcgtgaagcccagcgagacactgagcctgacctgtaccgtgtccggcgtgtccctgcctgactatggcgtgtcctggatcagacagccccctggcaagggcctggaatggatcggagtgatttggggcagcgaaaccacctactacaacagctccctgaagtccagagtgaccatctccaaggacaactccaagaaccaggtgtccctgaagctgagcagcgtgacagccgccgacaccgccgtgtattactgcgccaagcactactactacggcggcagctacgctatggactactggggccagggaaccctcgtgaccgtgtctagtacgcgtggaatgaggactgaggatcttcccaaagctgtcgtctttctcgaaccccaatggtatcgggtgctcgaaaaagactctgtgacactgaaatgccaaggggcctactctcccgaggacaactccacacagtggtttcataatgagtccctcatcagctctcaggccagctcttatttcattgatgccgctacagtggacgactccggcgagtatcggtgtcagaccaatctgtctacactgtctgaccccgtgcagcttgaggtccacattggatggttgctcttgcaagccccacgctgggttttcaaagaggaagatccaatccatctgcggtgccacagctggaaaaacaccgctctccacaaagtcacatacctgcaaaatggcaaaggacgcaaatacttccatcacaattccgatttttacattccgaaggctaccctgaaagacagcggcagctatttctgccggggactcgtcggctccaagaatgtgtcctccgaaaccgtgaatatcacgattacccaaggactggctgtgcctacaatctctagcttctttccgcctggataccaagtctccttctgtcttgtgatggtcctcctgtttgctgtggacacaggactgtacttttccgtg

SEQ ID NO: 1402 - DNA, 1440 bp, synthetic construct
  source 1..1440: mol_type = other DNA
atggccttaccagtgaccgccttgctcctgccgctggccttgctgctccacgccgccaggccggagatcgtgctgacacagagccctgccaccctgtctctgagccctggcgaaagagccaccctgagctgtagagccagccagagcgtgtccagctacctggcctggtatcagcagaagcccggccaggctccccggctgctgatctacgatgccagcaatagagccaccggcatccccgccagattttccggctctggcagcggcaccgacttcaccctgaccatcagctccctggaacccgaggacttcgccgtgtactactgccagcagcggagcaactggcccatcacattcggccagggcacccggctggaaatcaaaggcggaggcggaagtggaggcggaggatctggcggcggaggctctgaagtgcagctggtggaatcaggcggcggactggtgcagcctggcagaagcctgagactgagctgtgccgccagcggcttcaccttcaacgactacgccatgcactgggtgcgccaggcccctggaaaaggactggaatgggtgtccacaatcagctggaacagcggcagcatcggctacgccgatagcgtgaagggccggttcaccatcagccgggacaacgccaagaagtccctgtacctccagatgaacagcctgcgggccgaggacacagccctgtactattgcgccaaggacatccagtacggcaactactactacggcatggacgtgtggggccagggaaccaccgtgaccgtgtcatctacgcgtggaatgaggactgaggatcttcccaaagctgtcgtctttctcgaaccccaatggtatcgggtgctcgaaaaagactctgtgacactgaaatgccaaggggcctactctcccgaggacaactccacacagtggtttcataatgagtccctcatcagctctcaggccagctcttatttcattgatgccgctacagtggacgactccggcgagtatcggtgtcagaccaatctgtctacactgtctgaccccgtgcagcttgaggtccacattggatggttgctcttgcaagccccacgctgggttttcaaagaggaagatccaatccatctgcggtgccacagctggaaaaacaccgctctccacaaagtcacatacctgcaaaatggcaaaggacgcaaatacttccatcacaattccgatttttacattccgaaggctaccctgaaagacagcggcagctatttctgccggggactcgtcggctccaagaatgtgtcctccgaaaccgtgaatatcacgattacccaaggactggctgtgcctacaatctctagcttctttccgcctggataccaagtctccttctgtcttgtgatggtcctcctgtttgctgtggacacaggactgtacttttccgtg

SEQ ID NO: 1403 - DNA, 1449 bp, synthetic construct
  source 1..1449: mol_type = other DNA
atggccttaccagtgaccgccttgctcctgccgctggccttgctgctccacgccgccaggccggacatcgtgatgacccagacccccctgagcctgcctgtgacacctggcgagcctgccagcatctcctgcagaagcagcaagagcctgctgcacagcaacggcatcacctacctgtactggtatctgcagaaacccggccagagcccccaactgctgatctaccagatgagcaacctggtgtccggcgtgcccgacagattttctggcagcggctccggcaccgacttcaccctgaagatcagccgggtggaagccgaggacgtgggcgtgtactactgcgcccagaacctggaactgccctacacctttggcggcggaacaaaggtggaaatcaagcggggcggaggcggaagtggaggcggaggatctggcggcggaggctctcaggtgcaactggtgcagagcggagccgaagtgaaaaagcccggcagcagcgtgaaggtgtcctgcaaggccagcggctacgccttcagctactcctggatcaactgggtgcgccaggcccctggacagggcctggaatggatgggcagaatcttccccggcgacggcgacaccgactacaacggcaagttcaagggcagagtgaccatcaccgccgacaagagcaccagcaccgcctacatggaactgagcagcctgcggagcgaggataccgccgtgtactattgtgccagaaacgtgttcgacggctactggctggtgtactggggccagggaacacttgtgaccgtgtccagcacgcgtggaatgaggactgaggatcttcccaaagctgtcgtctttctcgaaccccaatggtatcgggtgctcgaaaaagactctgtgacactgaaatgccaaggggcctactctcccgaggacaactccacacagtggtttcataatgagtccctcatcagctctcaggccagctcttatttcattgatgccgctacagtggacgactccggcgagtatcggtgtcagaccaatctgtctacactgtctgaccccgtgcagcttgaggtccacattggatggttgctcttgcaagccccacgctgggttttcaaagaggaagatccaatccatctgcggtgccacagctggaaaaacaccgctctccacaaagtcacatacctgcaaaatggcaaaggacgcaaatacttccatcacaattccgatttttacattccgaaggctaccctgaaagacagcggcagctatttctgccggggactcgtcggctccaagaatgtgtcctccgaaaccgtgaatatcacgattacccaaggactggctgtgcctacaatctctagcttctttccgcctggataccaagtctccttctgtcttgtgatggtcctcctgtttgctgtggacacaggactgtacttttccgtg

SEQ ID NO: 1404 - DNA, 1452 bp, synthetic construct
  source 1..1452: mol_type = other DNA
atggccttaccagtgaccgccttgctcctgccgctggccttgctgctccacgccgccaggccggacatccagatgacccagagccccagcagcctgtctgccagcgtgggcgacagagtgaccatcacctgtcggagcagccagagcatcgtgcactccgtgggcaacaccttcctggaatggtatcagcagaagcccggcaaggcccccaagctgctgatctacaaggtgtccaacagattcagcggcgtgcccagcaggtttagcggctctggcagcggcaccgacttcaccctgaccatctctagcctccagcccgaggacttcgccacctactactgttttcaaggcagccagttcccctacaccttcggccagggaacaaaggtggaaatcaagcggggcggaggcggaagtggaggcggaggatctggcggcggaggctctgaagtgcaactggtggaaagcggaggcggcctggtgcagcctggcggatctctgagactgagctgtgccgccagcggctacgagttcagccggtcctggatgaactgggtgcgccaggcccctggcaagggactggaatgggtgggaagaatctaccccggcgacggcgacaccaactacagcggcaagttcaagggccggttcaccatcagcgccgacaccagcaagaacaccgcctacctccagatgaacagcctgcgggccgaggataccgccgtgtactactgtgccagagatggcagctcctgggactggtacttcgacgtgtggggacagggaacccttgtgaccgtgtccagcacgcgtggaatgaggactgaggatcttcccaaagctgtcgtctttctcgaaccccaatggtatcgggtgctcgaaaaagactctgtgacactgaaatgccaaggggcctactctcccgaggacaactccacacagtggtttcataatgagtccctcatcagctctcaggccagctcttatttcattgatgccgctacagtggacgactccggcgagtatcggtgtcagaccaatctgtctacactgtctgaccccgtgcagcttgaggtccacattggatggttgctcttgcaagccccacgctgggttttcaaagaggaagatccaatccatctgcggtgccacagctggaaaaacaccgctctccacaaagtcacatacctgcaaaatggcaaaggacgcaaatacttccatcacaattccgatttttacattccgaaggctaccctgaaagacagcggcagctatttctgccggggactcgtcggctccaagaatgtgtcctccgaaaccgtgaatatcacgattacccaaggactggctgtgcctacaatctctagcttctttccgcctggataccaagtctccttctgtcttgtgatggtcctcctgtttgctgtggacacaggactgtacttttccgtg

SEQ ID NO: 1405 - DNA, 1434 bp, synthetic construct
  source 1..1434: mol_type = other DNA
atggccttaccagtgaccgccttgctcctgccgctggccttgctgctccacgccgccaggccggagatcgtgctgacacagagccctggcaccctgagcctgtctccaggcgaaagagccacactgagctgtcgggcctctcagagcgtgggaggctacctggcttggtatcagcagaagccaggccaggcccccagactgctgatctacgacgccagcaatcgggccacaggcatccccgccagattttctggcagcggctccggcaccgacttcaccctgacaatcagcagcctggaacccgaggacttcgccgtgtactactgccagcagcggaacaactggccccccatgtacacattcggccagggcaccaagctggaaatcaagagaggcggaggcggaagtggaggcggaggatctggcggcggaggctctcaggtgcaactggtgcagagcggagccgaagtgaagaaacccggcagcagcgtgaaggtgtcctgcaaggcttccggcggcaccttcagcagctacgccatttcttgggtgcgccaggctcctggacagggcctggaatggatgggcggcatcatccctatcctgggcaccgccaactacgcccagaaattccagggcagagtgaccatcaccgccgacgagagcaccagcaccgcctacatggaactgagcagcctgcggagcgaggacacagccgtgtattattgcgccagatggggcggaggggccttcgacatttggggccagggaacaatggtcaccgtgtccagcacgcgtggaatgaggactgaggatcttcccaaagctgtcgtctttctcgaaccccaatggtatcgggtgctcgaaaaagactctgtgacactgaaatgccaaggggcctactctcccgaggacaactccacacagtggtttcataatgagtccctcatcagctctcaggccagctcttatttcattgatgccgctacagtggacgactccggcgagtatcggtgtcagaccaatctgtctacactgtctgaccccgtgcagcttgaggtccacattggatggttgctcttgcaagccccacgctgggttttcaaagaggaagatccaatccatctgcggtgccacagctggaaaaacaccgctctccacaaagtcacatacctgcaaaatggcaaaggacgcaaatacttccatcacaattccgatttttacattccgaaggctaccctgaaagacagcggcagctatttctgccggggactcgtcggctccaagaatgtgtcctccgaaaccgtgaatatcacgattacccaaggactggctgtgcctacaatctctagcttctttccgcctggataccaagtctccttctgtcttgtgatggtcctcctgtttgctgtggacacaggactgtacttttccgtg

SEQ ID NO: 1406 - DNA, 1425 bp, synthetic construct
  source 1..1425: mol_type = other DNA
atggccttaccagtgaccgccttgctcctgccgctggccttgctgctccacgccgccaggccggacatccagatgacccagagccccgccaccatcgagaacacaagcctgtctgccagcgtgggcgacagagtgaccatcacctgtagagccagccagggcatcagctcttggctgacctggtatcagcagaagcccgagaaggcccccaagagcctgatctacgccgccagctctctgcagtctggcgtgcccagcagattttccggcagcggctctggcaccgacttcaccctgacaatcagcagcctgcagcccgaggacttcgccacctactactgccagcagtacgacagctaccccatcaccttcggccagggcacccggctggaaatcaagggcggaggcggaagtggaggcggaggatctggcggcggaggctctcaggtgcaactgcagcagtggggagccggactgctgaagcctagcgagacactgagcctgacctgcgccgtgtacggcggcagcttcagcgcctactattggagctggatcagacagccccctggcaagggcctggaatggatcggcgacatcaatcacggcggaggcaccaactacaaccccagcctgaagtcccgcgtgaccatctccgtggacaccagcaagaaccagttctccctgaagctgaacagcgtgacagccgccgacacagccgtgtactactgtgccagcctgaccgcctattggggccagggatctcttgtgaccgtgtccagcacgcgtggaatgaggactgaggatcttcccaaagctgtcgtctttctcgaaccccaatggtatcgggtgctcgaaaaagactctgtgacactgaaatgccaaggggcctactctcccgaggacaactccacacagtggtttcataatgagtccctcatcagctctcaggccagctcttatttcattgatgccgctacagtggacgactccggcgagtatcggtgtcagaccaatctgtctacactgtctgaccccgtgcagcttgaggtccacattggatggttgctcttgcaagccccacgctgggttttcaaagaggaagatccaatccatctgcggtgccacagctggaaaaacaccgctctccacaaagtcacatacctgcaaaatggcaaaggacgcaaatacttccatcacaattccgatttttacattccgaaggctaccctgaaagacagcggcagctatttctgccggggactcgtcggctccaagaatgtgtcctccgaaaccgtgaatatcacgattacccaaggactggctgtgcctacaatctctagcttctttccgcctggataccaagtctccttctgtcttgtgatggtcctcctgtttgctgtggacacaggactgtacttttccgtg

SEQ ID NO: 1407 - DNA, 1437 bp, synthetic construct
  source 1..1437: mol_type = other DNA
atggccttaccagtgaccgccttgctcctgccgctggccttgctgctccacgccgccaggccggagatcgtgctgacccagagccctgatagcctggccgtgtctctgggcgagagagccaccatcaactgcaaggccagccagagcgtggacttcgacggcgacagctacctgaactggtatcagcagaagcccggccagccccccaaggtgctgatctatgccgccagcacactgcagagcggcgtgcccagcagattttctggcagcggctccggcaccgacttcaccctgaccatcaacagcctggaagccgaggacgccgccacctactactgccagcagagcaacgaggacccctggacctttggcggcggaacaaaggtggaaatcaagggcggaggcggaagtggaggcggaggatctggcggcggaggctctcaggtgcaactggtgcagtccggcgctgaagtgaagaaacctggggccagcgtgaaggtgtcctgcaaggtgtccggctacacctttaccgactactacattacctgggtgcgccaggcccctggacaggccctggaatggatgggctggatctaccccggcagcggcaacaccaagtacagccagaagttccagggcagattcgtgttcagcgtggacaccagcgccagcaccgcctacctgcaactgtctagcctgaaggccgaagataccgccgtgtactactgcgccaactacggcaactattggttcgcctattggggccagggaacccttgtgaccgtgtcctctacgcgtggaatgaggactgaggatcttcccaaagctgtcgtctttctcgaaccccaatggtatcgggtgctcgaaaaagactctgtgacactgaaatgccaaggggcctactctcccgaggacaactccacacagtggtttcataatgagtccctcatcagctctcaggccagctcttatttcattgatgccgctacagtggacgactccggcgagtatcggtgtcagaccaatctgtctacactgtctgaccccgtgcagcttgaggtccacattggatggttgctcttgcaagccccacgctgggttttcaaagaggaagatccaatccatctgcggtgccacagctggaaaaacaccgctctccacaaagtcacatacctgcaaaatggcaaaggacgcaaatacttccatcacaattccgatttttacattccgaaggctaccctgaaagacagcggcagctatttctgccggggactcgtcggctccaagaatgtgtcctccgaaaccgtgaatatcacgattacccaaggactggctgtgcctacaatctctagcttctttccgcctggataccaagtctccttctgtcttgtgatggtcctcctgtttgctgtggacacaggactgtacttttccgtg

SEQ ID NO: 1408 - DNA, 1431 bp, synthetic construct
  source 1..1431: mol_type = other DNA
atggccttaccagtgaccgccttgctcctgccgctggccttgctgctccacgccgccaggccggacatccagatgacccagagccccagcagcctgtctgccagcgtgggcgacagagtgaccatcacctgtagagccagccagggcatcagctcttggctggcctggtatcagcagaagcccgagaaggcccccaagagcctgatctacgccgcctctagtctccagagcggcgtgcccagcagattttctggcagcggctccggcaccgacttcaccctgacaatcagctccctccagcccgaggacttcgccacctactactgccagcagtacaacagctaccctcccacctttggcggaggcaccaaggtggaaatcaagggcggaggcggaagtggaggcggaggatctggcggcggaggctctgaagtgcaactggtgcagtctggcggagggctggtgcatcctgggggaagcctgagactgagctgtgccggctctggcttcgccttcagcagcagcaccatgcactggatcagacaggcccctggcaagggcctggaatggatcagcctgatcggaagcggagggggcatctactacggcgacagcgtgaagggccggttcaccatcagccgggacaacgccaagaacagcctgtacctccagatgaactccctgcgggccgaggacatggccgtgtactattgtgtgcggggctacttcgactgggtggactacttcgattactggggccagggcaccctcgtgaccgtgtcatctacgcgtggaatgaggactgaggatcttcccaaagctgtcgtctttctcgaaccccaatggtatcgggtgctcgaaaaagactctgtgacactgaaatgccaaggggcctactctcccgaggacaactccacacagtggtttcataatgagtccctcatcagctctcaggccagctcttatttcattgatgccgctacagtggacgactccggcgagtatcggtgtcagaccaatctgtctacactgtctgaccccgtgcagcttgaggtccacattggatggttgctcttgcaagccccacgctgggttttcaaagaggaagatccaatccatctgcggtgccacagctggaaaaacaccgctctccacaaagtcacatacctgcaaaatggcaaaggacgcaaatacttccatcacaattccgatttttacattccgaaggctaccctgaaagacagcggcagctatttctgccggggactcgtcggctccaagaatgtgtcctccgaaaccgtgaatatcacgattacccaaggactggctgtgcctacaatctctagcttctttccgcctggataccaagtctccttctgtcttgtgatggtcctcctgtttgctgtggacacaggactgtacttttccgtg

SEQ ID NO: 1409 - DNA, 1449 bp, synthetic construct
  source 1..1449: mol_type = other DNA
atggccttaccagtgaccgccttgctcctgccgctggccttgctgctccacgccgccaggccggacgtcgtgatgacccagagccctctgagcctgcctgtgacactgggacagcctgccagcatctcctgtcggagcagccagagcatcgtgcacagcgacggcaacacctacctggaatggtatcagcagcggccaggccagagccccagacggctgatctacaaggtgtccaacagattcagcggcgtgcccgacagattctccggcagcggctctggcaccgacttcaccctgaagatcagcagagtggaagccgaggacgtgggcgtgtactactgttttcaaggcagccacgccccctggacctttggcggaggaacaaaggtggaaatcaagggcggaggcggaagtggaggcggaggatctggcggcggaggctctgaagtgcaactggtggaatcaggcggcggactggtgcagcctggcggatctctgagactgagctgtgccgccagcggcttcaccttcagcagctacggaatgcactgggtgcgccaggcccctggcaaaggactggaatgggtggcctacatcaccaccagaagcagcaccatctactacgccgacagcgtgaagggccggttcaccatctccagagacaacgccaagaacagcctgtacctccagatgaactccctgcgggccgaggacaccgccgtgtactattgcaccagagagcccctgaccggctactacgctatggactattggggccagggcaccagcgtgaccgtgtctagtacgcgtggaatgaggactgaggatcttcccaaagctgtcgtctttctcgaaccccaatggtatcgggtgctcgaaaaagactctgtgacactgaaatgccaaggggcctactctcccgaggacaactccacacagtggtttcataatgagtccctcatcagctctcaggccagctcttatttcattgatgccgctacagtggacgactccggcgagtatcggtgtcagaccaatctgtctacactgtctgaccccgtgcagcttgaggtccacattggatggttgctcttgcaagccccacgctgggttttcaaagaggaagatccaatccatctgcggtgccacagctggaaaaacaccgctctccacaaagtcacatacctgcaaaatggcaaaggacgcaaatacttccatcacaattccgatttttacattccgaaggctaccctgaaagacagcggcagctatttctgccggggactcgtcggctccaagaatgtgtcctccgaaaccgtgaatatcacgattacccaaggactggctgtgcctacaatctctagcttctttccgcctggataccaagtctccttctgtcttgtgatggtcctcctgtttgctgtggacacaggactgtacttttccgtg

SEQ ID NO: 1410 - DNA, 1419 bp, synthetic construct
  source 1..1419: mol_type = other DNA
atggccttaccagtgaccgccttgctcctgccgctggccttgctgctccacgccgccaggccgcagatcgtgctgacacagagccctgccctgatgagcgccagccctggcgagaaagtgaccatgacctgtagcgccagcagcagcgtgcgctacatgtactggtatcagcagaagcccagaagcagccccaagccctggattcacctgaccagcaatctggcctctggcgtgcccgctagattttccggctctggcagcggcaccagctacagcctgaccatcagcagcatggaagccgaggacgccgccacctactactgccagcagtggtccagccaccccttcacatttggctccggcaccaagctggaaatcaagggcggaggcggaagtggaggcggaggatctggcggcggaggctctgatgtgcaactccaggaaagcggccctggccttgtgaagcctagccagagcctgtccctgacctgtaccgtgaccggcttcagcatcaccagcgactactcttggaactggatcagacagttccctggcaacaaactggaatggatgggctacatcagctactccggccacacctcctacaaccccagcctggaaagccggatctccatcaccagagacaccagcaagaaccagttcttcttgcaactgaacagcgtgaccaccgaggataccgccacatattactgtaccagaggcaactgggacgtggtgtactggggccagggcacacttgtgaccgtgtctgctacgcgtggaatgaggactgaggatcttcccaaagctgtcgtctttctcgaaccccaatggtatcgggtgctcgaaaaagactctgtgacactgaaatgccaaggggcctactctcccgaggacaactccacacagtggtttcataatgagtccctcatcagctctcaggccagctcttatttcattgatgccgctacagtggacgactccggcgagtatcggtgtcagaccaatctgtctacactgtctgaccccgtgcagcttgaggtccacattggatggttgctcttgcaagccccacgctgggttttcaaagaggaagatccaatccatctgcggtgccacagctggaaaaacaccgctctccacaaagtcacatacctgcaaaatggcaaaggacgcaaatacttccatcacaattccgatttttacattccgaaggctaccctgaaagacagcggcagctatttctgccggggactcgtcggctccaagaatgtgtcctccgaaaccgtgaatatcacgattacccaaggactggctgtgcctacaatctctagcttctttccgcctggataccaagtctccttctgtcttgtgatggtcctcctgtttgctgtggacacaggactgtacttttccgtg

SEQ ID NO: 1411 - DNA, 1446 bp, synthetic construct
  source 1..1446: mol_type = other DNA
atggccttaccagtgaccgccttgctcctgccgctggccttgctgctccacgccgccaggccggagatcgtgctgacacagagccctggaagcctggccgtgtctcctggcgagcgcgtgacaatgagctgcaagagcagccagagcgtgttcttcagcagctcccagaagaactacctggcctggtatcagcagatccccggccagagccccagactgctgatctactgggccagcaccagagaaagcggcgtgcccgatagattcaccggcagcggctctggcaccgacttcaccctgacaatcagcagcgtgcagcccgaggacctggctatctactactgccaccagtacctgagcagccggaccttcggccagggcaccaagctggaaatcaagagaggcggaggcggaagtggaggcggaggatctggcggcggaggctctcaggtgcaactgcagcagcctggcgctgaggtcgtgaagccaggcgcttccgtgaagatgtcctgcaaggccagcggctacaccttcaccagctactacatccactggatcaagcagacccctggacagggcctggaatgggtgggagtgatctaccccggcaacgacgacatcagctacaaccagaagttccagggcaaggccaccctgaccgccgacaagtctagcaccaccgcctacatgcaactgtccagcctgaccagcgaggacagcgccgtgtactactgcgccagagaagtgcggctgcggtacttcgatgtgtggggccagggaaccaccgtgaccgtgtcatctacgcgtggaatgaggactgaggatcttcccaaagctgtcgtctttctcgaaccccaatggtatcgggtgctcgaaaaagactctgtgacactgaaatgccaaggggcctactctcccgaggacaactccacacagtggtttcataatgagtccctcatcagctctcaggccagctcttatttcattgatgccgctacagtggacgactccggcgagtatcggtgtcagaccaatctgtctacactgtctgaccccgtgcagcttgaggtccacattggatggttgctcttgcaagccccacgctgggttttcaaagaggaagatccaatccatctgcggtgccacagctggaaaaacaccgctctccacaaagtcacatacctgcaaaatggcaaaggacgcaaatacttccatcacaattccgatttttacattccgaaggctaccctgaaagacagcggcagctatttctgccggggactcgtcggctccaagaatgtgtcctccgaaaccgtgaatatcacgattacccaaggactggctgtgcctacaatctctagcttctttccgcctggataccaagtctccttctgtcttgtgatggtcctcctgtttgctgtggacacaggactgtacttttccgtg

SEQ ID NO: 1412 - DNA, 1458 bp, synthetic construct
  source 1..1458: mol_type = other DNA
atggccttaccagtgaccgccttgctcctgccgctggccttgctgctccacgccgccaggccggacatcgtgatgacacagtcaccagatagcctcaccgtctccctgggggagcggaccaccattaattgtaaatccagccaaagcgtgctggactcaagcaagaacaagaatagcctcgcctggtatcagcagaagcccggtcagcctccaaagctgctgctttcttgggcctccaccagagagtccgggattcctgataggtttagtggttcaggctccggcacagattttactctgaccattgattctctccagccagaggattctgcaacttattactgccagcaaagcgcccactttcctataacttttggccagggaacccgacttgaaatcaagggcggaggcggaagtggaggcggaggatctggcggcggaggctctcaggtgcagctggtgcagagcggtgccgaagtgaagaaaccaggtgcatccgttaaagtttcatgtaaggctagtggatataccttcaccaattacggaatgaactgggtgaaacaggcccctggccagggactgaagtggatggggtggattaacacctacaccggggagccgacttatgcagacgactttaaggggcgggtcacgatgacctccgacacctccaccagtaccgcctacctggagctgcacaaccttaggtcagacgataccgccgtgtattactgtgcccgatggtcttggtccgacggatactatgtctacttcgactattggggccaggggaccacagttaccgtgtcctctacgcgtggaatgaggactgaggatcttcccaaagctgtcgtctttctcgaaccccaatggtatcgggtgctcgaaaaagactctgtgacactgaaatgccaaggggcctactctcccgaggacaactccacacagtggtttcataatgagtccctcatcagctctcaggccagctcttatttcattgatgccgctacagtggacgactccggcgagtatcggtgtcagaccaatctgtctacactgtctgaccccgtgcagcttgaggtccacattggatggttgctcttgcaagccccacgctgggttttcaaagaggaagatccaatccatctgcggtgccacagctggaaaaacaccgctctccacaaagtcacatacctgcaaaatggcaaaggacgcaaatacttccatcacaattccgatttttacattccgaaggctaccctgaaagacagcggcagctatttctgccggggactcgtcggctccaagaatgtgtcctccgaaaccgtgaatatcacgattacccaaggactggctgtgcctacaatctctagcttctttccgcctggataccaagtctccttctgtcttgtgatggtcctcctgtttgctgtggacacaggactgtacttttccgtg

SEQ ID NO: 1413 - DNA, 1458 bp, synthetic construct
  source 1..1458: mol_type = other DNA
atggccttaccagtgaccgccttgctcctgccgctggccttgctgctccacgccgccaggccggatgtgctgctgacccagagccctctgagcctgcctgtgacactgggacagcctgccagcatctcctgtcggagcagccagaccatcgtgcacagcaacggcaacacctacctggaatggttccagcagcggccaggccagagccccagactgctgatctaccaggtgtccaacagattcagcggcgtgcccgacagattctccggcagcggctctggcaccgacttcaccctgaagatcagccgggtggaagccgaggacgtgggcgtgtactactgttttcaaggcagccacgtgccccggacctttggcggaggaacaaaggtggaaatcaagagaggcggaggcggaagtggaggcggaggatctggcggcggaggctctcagatccaactggtgcagagcggcagcgagctgaagaaacctggggccagcgtgaaggtgtcctgcaaggccagcggctacacctttaccaactacggcatgaactgggtgcgccaggcccctggacagggcctgaaatggatgggctggatcaacaccaacaccggcgagcctaagtacgccgaagagttcaagggcagattcgccctgagcctggacaccagcgtgtccacagcctacctccagatcaacagcctgaaggccgaggataccgccgtgtacttctgcgccagaggctacggcaactacgccagaggggcttggctggcctattggggccagggaacactcgtgaccgtgtcctctacgcgtggaatgaggactgaggatcttcccaaagctgtcgtctttctcgaaccccaatggtatcgggtgctcgaaaaagactctgtgacactgaaatgccaaggggcctactctcccgaggacaactccacacagtggtttcataatgagtccctcatcagctctcaggccagctcttatttcattgatgccgctacagtggacgactccggcgagtatcggtgtcagaccaatctgtctacactgtctgaccccgtgcagcttgaggtccacattggatggttgctcttgcaagccccacgctgggttttcaaagaggaagatccaatccatctgcggtgccacagctggaaaaacaccgctctccacaaagtcacatacctgcaaaatggcaaaggacgcaaatacttccatcacaattccgatttttacattccgaaggctaccctgaaagacagcggcagctatttctgccggggactcgtcggctccaagaatgtgtcctccgaaaccgtgaatatcacgattacccaaggactggctgtgcctacaatctctagcttctttccgcctggataccaagtctccttctgtcttgtgatggtcctcctgtttgctgtggacacaggactgtacttttccgtg

SEQ ID NO: 1414 - DNA, 1443 bp, synthetic construct
  source 1..1443: mol_type = other DNA
atggccttaccagtgaccgccttgctcctgccgctggccttgctgctccacgccgccaggccggaccacatcgtgctgacccagagccctagcagcctgtctgccagcctgggcgacagagtgaccatcagctgtagagccagccaggacatcagcacctacctgaactggtatcagcagaaacccgacggcaccgtgaagctgctgatcttctacaccagcagactgcacgccggggtgcccagcagattttctggcagcggctctggcacccaccacagcctgaccatctccaacctggaacaggaagatattgctacctacttctgtcagcaaggcaacagcctgcccttcaccttcggcagcggcaccaagctggaaatcaagagaggcggaggcggaagtggaggcggaggatctggcggcggaggctctcaggtgcagctgaaagagagcggccctgagctggaaaagcctggggccagcgtgaagattagctgcaaggccagcggctacagcttcaccgcctacagcatgaactgggtcaagcagaacaacggcatgagcctggaatggatcggcagcatcgacccctactacggcgacaccaaatacgcccagaagttcaagggcaaggccaccctgaccgtggataaggccagcagcaccgcctacctccagctgaagtctctgaccagcgaggacagcgccgtgtactactgcgccagacggatgattaccaccggcgactggtacttcgacgtgtggggagccggaaccaccgtgacagtgtctagcacgcgtggaatgaggactgaggatcttcccaaagctgtcgtctttctcgaaccccaatggtatcgggtgctcgaaaaagactctgtgacactgaaatgccaaggggcctactctcccgaggacaactccacacagtggtttcataatgagtccctcatcagctctcaggccagctcttatttcattgatgccgctacagtggacgactccggcgagtatcggtgtcagaccaatctgtctacactgtctgaccccgtgcagcttgaggtccacattggatggttgctcttgcaagccccacgctgggttttcaaagaggaagatccaatccatctgcggtgccacagctggaaaaacaccgctctccacaaagtcacatacctgcaaaatggcaaaggacgcaaatacttccatcacaattccgatttttacattccgaaggctaccctgaaagacagcggcagctatttctgccggggactcgtcggctccaagaatgtgtcctccgaaaccgtgaatatcacgattacccaaggactggctgtgcctacaatctctagcttctttccgcctggataccaagtctccttctgtcttgtgatggtcctcctgtttgctgtggacacaggactgtacttttccgtg

SEQ ID NO: 1415 - DNA, 1443 bp, synthetic construct; identical to SEQ ID NO: 1414
  source 1..1443: mol_type = other DNA

SEQ ID NO: 1416 - DNA, 1443 bp, synthetic construct
  source 1..1443: mol_type = other DNA
atggccttaccagtgaccgccttgctcctgccgctggccttgctgctccacgccgccaggccggacatcgtgatgacccagagccccgatagcctggccgtgtctctgggagagagagccaccatcaactgccgggccagcaagagcgtgtccaccagcggctacagcttcatgcactggtatcagcagaagcccggccagccccccaagctgctgatctacctggcctccaacctggaaagcggcgtgcccgatagattcagcggcagcggctctggcaccgacttcaccctgaccatcagttctcttcaggccgaggacgtggccgtgtactactgccagcacagcagagaggtgccctggacattcggccagggcacaaaggtggaaatcaagcggggcggaggcggaagtggaggcggaggatctggcggcggaggctctcaggtgcagctggtgcagtctggggccgaagtgaagaaacctggggccagcgtgaaggtgtcctgcaaggccagcggatacacctttaccaactacggcatgaactgggtgcgccaggcccctggacagggcctggaatggatgggctggatcaacacctacaccggcgagcccacatacgccgacgccttcaagggcagattcgccttcagcctggacaccagcacctccaccgcctacctccagatcaacagcctgcggagcgacgacaccgccgtgtattattgcgccagagattacggcgactacgggatggactattggggccagggaaccaccgtgaccgtgtcctctacgcgtggaatgaggactgaggatcttcccaaagctgtcgtctttctcgaaccccaatggtatcgggtgctcgaaaaagactctgtgacactgaaatgccaaggggcctactctcccgaggacaactccacacagtggtttcataatgagtccctcatcagctctcaggccagctcttatttcattgatgccgctacagtggacgactccggcgagtatcggtgtcagaccaatctgtctacactgtctgaccccgtgcagcttgaggtccacattggatggttgctcttgcaagccccacgctgggttttcaaagaggaagatccaatccatctgcggtgccacagctggaaaaacaccgctctccacaaagtcacatacctgcaaaatggcaaaggacgcaaatacttccatcacaattccgatttttacattccgaaggctaccctgaaagacagcggcagctatttctgccggggactcgtcggctccaagaatgtgtcctccgaaaccgtgaatatcacgattacccaaggactggctgtgcctacaatctctagcttctttccgcctggataccaagtctccttctgtcttgtgatggtcctcctgtttgctgtggacacaggactgtacttttccgtg

SEQ ID NO: 1417 - DNA, 1431 bp, synthetic construct
  source 1..1431: mol_type = other DNA
atggccttaccagtgaccgccttgctcctgccgctggccttgctgctccacgccgccaggccggacatcgtgatgacccagacccccctgaccctgagcgtgacaatcggacagcctgccagcatctcctgcaagagcagccagagcctgctggacagcgacggcaagacctacctgaactggctgctgcagaggccaggccagagccccgagagactgatctacctggtgtccaagctggactccggcgtgcccgatagattcacaggcagcggctccggcaccgacttcaccctgaagatcagccgggtggaagccgaggacctgggcgtgtactgttgttggcagggcacccacttcccttacaccttcggcggagggaccaaggtggaaatcaagggcggcggaggcggaagtggaggcggaggatctggcggcggaggctctcaggtgcaactgcagcagcctggcgctgaacttgtgcggccaggcgcctctgtgaagctgagctgtaaagccagcggctacaccttcaccagctactggatgaactgggtcaagcagcgcccaggccagggcctggaatggatcggaatgatcgaccccagcgacagcgagacacactacaaccacatcttcaaggacaaggccaccctgaccgtggacaagtccagcagcacagcctacctgcaactgtccagcctgaccagcgaggacagcgccgtgtactactgcgcccggaacctgtatctgtggggccagggaacaagcgtgaccgtgtctagcacgcgtggaatgaggactgaggatcttcccaaagctgtcgtctttctcgaaccccaatggtatcgggtgctcgaaaaagactctgtgacactgaaatgccaaggggcctactctcccgaggacaactccacacagtggtttcataatgagtccctcatcagctctcaggccagctcttatttcattgatgccgctacagtggacgactccggcgagtatcggtgtcagaccaatctgtctacactgtctgaccccgtgcagcttgaggtccacattggatggttgctcttgcaagccccacgctgggttttcaaagaggaagatccaatccatctgcggtgccacagctggaaaaacaccgctctccacaaagtcacatacctgcaaaatggcaaaggacgcaaatacttccatcacaattccgatttttacattccgaaggctaccctgaaagacagcggcagctatttctgccggggactcgtcggctccaagaatgtgtcctccgaaaccgtgaatatcacgattacccaaggactggctgtgcctacaatctctagcttctttccgcctggataccaagtctccttctgtcttgtgatggtcctcctgtttgctgtggacacaggactgtacttttccgtg

SEQ ID NO: 1418 - DNA, 1440 bp, synthetic construct
  source 1..1440: mol_type = other DNA
atggccttaccagtgaccgccttgctcctgccgctggccttgctgctccacgccgccaggccggacatccagttgacccagtcccccagctcactcagcgccagtgtgggggaccgggtgaccattacctgtaaagccagtcagagtgtggactatgagggggatagcttcctgaattggtatcagcagaagcctggcaaagccccaaagctgctgatctacgctgcatctaatctggagtcaggcgtgccttctaggttctccggtagtgggtctgggaccgatttcacattgaccatttcatccctccaacccgaggatttcgctacatattactgtcagcagtccaatgaggaccctctcacctttggccagggcaccaaagttgaaattaagagaggcggaggcggaagtggaggcggaggatctggcggcggaggctctgaagtccaacttgtggagtctggagggggcctggtgcagcccggcggctctctcagactgtcttgtgcggcaagcggctacaccttcagctcttactggatagaatgggtgaggcaggcacctggaaagggactggagtggattggagagattctgccaggagggggagatacaaattacaatgaaatcttcaaggggcgggccaccttttcagcggataccagcaagaatacagcttacctgcagatgaatagcctccgggcagaagataccgctgtttattattgcacgagacgggtgccaataagactggactattgggggcaagggactcttgtcaccgtcagttcaacgcgtggaatgaggactgaggatcttcccaaagctgtcgtctttctcgaaccccaatggtatcgggtgctcgaaaaagactctgtgacactgaaatgccaaggggcctactctcccgaggacaactccacacagtggtttcataatgagtccctcatcagctctcaggccagctcttatttcattgatgccgctacagtggacgactccggcgagtatcggtgtcagaccaatctgtctacactgtctgaccccgtgcagcttgaggtccacattggatggttgctcttgcaagccccacgctgggttttcaaagaggaagatccaatccatctgcggtgccacagctggaaaaacaccgctctccacaaagtcacatacctgcaaaatggcaaaggacgcaaatacttccatcacaattccgatttttacattccgaaggctaccctgaaagacagcggcagctatttctgccggggactcgtcggctccaagaatgtgtcctccgaaaccgtgaatatcacgattacccaaggactggctgtgcctacaatctctagcttctttccgcctggataccaagtctccttctgtcttgtgatggtcctcctgtttgctgtggacacaggactgtacttttccgtg

SEQ ID NO: 1419 - DNA, 1464 bp, synthetic construct
  source 1..1464: mol_type = other DNA
atggccttaccagtgaccgccttgctcctgccgctggccttgctgctccacgccgccaggccggacatcgtgatgagccagagccctagcagcctggccgtgtccgtgggcgagaaagtgaccatgagctgcaagagcagccagtccctgctgcacagcagcaaccagaagaactacctggcctggtatcagcagaagcccggccagtcccccaaggtgctgatctactgggccagcaccagagaaagcggcgtgcccgatagattcaccggcagcggctctggcaccgacttcaccctgaccatcaccagcgtgaagtccgaggacctggctgtgtactactgccagcagtattacagctacccctggaccttcggcggaggcacccggctggaaatcaaaagaggcggaggcggaagtggaggcggaggatctggcggcggaggctctgaagtgcaactccagcagagcgtggccgagcttgtgaagcctggcgcttccgtgaagatgtcctgcaaggtgtccggctacaccctgacagaccacaccatccactggatgaagcagcggcctgagcagggcctggaatggatcggctacatctaccccagggacggcatcaccggctacaacgagaagttcaagggcaaggccacactgaccgccgacaccagcagcagcacagcctacatgcaactgaacagcctgaccagcgaggacagcgccgtgtacttctgtgccagatggggctacagctacagaaactacgcctactactacgactactggggccagggcacaaccctgaccgtgtctagtacgcgtggaatgaggactgaggatcttcccaaagctgtcgtctttctcgaaccccaatggtatcgggtgctcgaaaaagactctgtgacactgaaatgccaaggggcctactctcccgaggacaactccacacagtggtttcataatgagtccctcatcagctctcaggccagctcttatttcattgatgccgctacagtggacgactccggcgagtatcggtgtcagaccaatctgtctacactgtctgaccccgtgcagcttgaggtccacattggatggttgctcttgcaagccccacgctgggttttcaaagaggaagatccaatccatctgcggtgccacagctggaaaaacaccgctctccacaaagtcacatacctgcaaaatggcaaaggacgcaaatacttccatcacaattccgatttttacattccgaaggctaccctgaaagacagcggcagctatttctgccggggactcgtcggctccaagaatgtgtcctccgaaaccgtgaatatcacgattacccaaggactggctgtgcctacaatctctagcttctttccgcctggataccaagtctccttctgtcttgtgatggtcctcctgtttgctgtggacacaggactgtacttttccgtg

SEQ ID NO: 1420 - DNA, 1455 bp, synthetic construct
  source 1..1455: mol_type = other DNA
atggccttaccagtgaccgccttgctcctgccgctggccttgctgctccacgccgccaggccggagatcgtgctgacacagagccctggcaccctgagcctgtctccaggcgaaagagccacactgagctgtcgggccagccagagcgtgtccagctcttacctggcctggtatcagcagaagcccggccaggctccccggctgctgatctacggaacaagcagcagagccaccggcatccccgacagattttctggcagcggctccggcaccgacttcaccctgacaatcagcagactggaacccgaggacttcgccgtgtactactgccagcagtacggcagcagccccttcacctttggcggaggcaccaaggtggaaatcaagagaggcggaggcggaagtggaggcggaggatctggcggcggaggctctcaggtgcaactccaggaatctggccccggactggctaagcccagcgagacactgagcctgacctgtaccgtgtccggcgacagcatcaccagctactactggtcctggatcagacagccccctggcaagggcctggaatggatcggctacatctactacagcggcagcaccaactacaaccccagcctgaagtccagagtgaccatcagcgtggacaccagcaagaaccagttctccctgaagctgagcagcgtgacagccgccgacaccgccgtgtattattgcgccagagatcagcggagaatcgccgctgccggcacccacttttacggcatggatgtgtggggccagggcaccaccgtgaccgtgtcatctacgcgtggaatgaggactgaggatcttcccaaagctgtcgtctttctcgaaccccaatggtatcgggtgctcgaaaaagactctgtgacactgaaatgccaaggggcctactctcccgaggacaactccacacagtggtttcataatgagtccctcatcagctctcaggccagctcttatttcattgatgccgctacagtggacgactccggcgagtatcggtgtcagaccaatctgtctacactgtctgaccccgtgcagcttgaggtccacattggatggttgctcttgcaagccccacgctgggttttcaaagaggaagatccaatccatctgcggtgccacagctggaaaaacaccgctctccacaaagtcacatacctgcaaaatggcaaaggacgcaaatacttccatcacaattccgatttttacattccgaaggctaccctgaaagacagcggcagctatttctgccggggactcgtcggctccaagaatgtgtcctccgaaaccgtgaatatcacgattacccaaggactggctgtgcctacaatctctagcttctttccgcctggataccaagtctccttctgtcttgtgatggtcctcctgtttgctgtggacacaggactgtacttttccgtg

SEQ ID NO: 1421 - DNA, 1425 bp, synthetic construct
  source 1..1425: mol_type = other DNA
atggccttaccagtgaccgccttgctcctgccgctggccttgctgctccacgccgccaggccggacatccagatgacccagagccccagcagcctgtctgccagcgtgggcgacagagtgaccatcacctgtagagccagccagagcatcagcctgtggctgaactggtatcagcagaagcccggcaaggcccccaagctgctgatctacgccgccagcacactccagagcggcgtgccaagcagattttccggcagcggctccggcaccgacttcaccctgacaatcagctccctccagcccgaggacttcgccacctactactgccagcagtactacaccagcccctacaccttcggccagggcaccaaggtggaaatcaagagaggcggaggcggaagtggaggcggaggatctggcggcggaggctctcaggtgcaactgctggaatctggcggcggactggtgcagcctggcggatctctgagactgagctgtgccgccagcggcttcaccttcagcagctacgccatgagctgggtgcgccaggcccctggaaaaggactggaatgggtgtccgtgatccggtccagcggcagcagcacctattacgccgatagcgtgaagggccggttcaccatcagccgggacaacagcaagaacaccctgtacctccagatgaacagcctgcgggccgaggacaccgccgtgtactattgtgctaggggaggcggctacttcgactactggggccagggaacactcgtgaccgtgtcctctacgcgtggaatgaggactgaggatcttcccaaagctgtcgtctttctcgaaccccaatggtatcgggtgctcgaaaaagactctgtgacactgaaatgccaaggggcctactctcccgaggacaactccacacagtggtttcataatgagtccctcatcagctctcaggccagctcttatttcattgatgccgctacagtggacgactccggcgagtatcggtgtcagaccaatctgtctacactgtctgaccccgtgcagcttgaggtccacattggatggttgctcttgcaagccccacgctgggttttcaaagaggaagatccaatccatctgcggtgccacagctggaaaaacaccgctctccacaaagtcacatacctgcaaaatggcaaaggacgcaaatacttccatcacaattccgatttttacattccgaaggctaccctgaaagacagcggcagctatttctgccggggactcgtcggctccaagaatgtgtcctccgaaaccgtgaatatcacgattacccaaggactggctgtgcctacaatctctagcttctttccgcctggataccaagtctccttctgtcttgtgatggtcctcctgtttgctgtggacacaggactgtacttttccgtg

SEQ ID NO: 1422 - DNA, 1434 bp, synthetic construct
  source 1..1434: mol_type = other DNA
atggccttaccagtgaccgccttgctcctgccgctggccttgctgctccacgccgccaggccggacatccagatgacccagagccccagcagcctgtctgccagcgtgggcgacagagtgaccatcacctgtagagccagccagagcatcagcagctacctgaactggtatcagcagaagcccggcaaggcccccaaactgctgatctacgccgtgtccacactccagagcggcgtgcccagcagattttctggcagcggctccggcaccgacttcaccctgacaatcagctccctccagcccgaggacttcgccacctactactgtcagcagagcggcaccttccctcccaccacatttggacagggcaccaaggtggaaatcaagagaggcggaggcggaagtggaggcggaggatctggcggcggaggctctcaggtgcaactgctggaatctggcggcggactggtgcagcctggcggatctctgagactgagctgtgccgccagcggcttcaccttcagcagccacggaatgcactgggtgcgccaggcccctggaaagggactggaatgggtgtccgtgatctccggcagcggcagcaataccggctacgccgatagcgtgaagggccggttcaccatcagccgggacaacagcaagaacaccctgtacctccagatgaacagcctgcgggccgaggacaccgccgtgtactattgtgccagacagtggggcagctacgccttcgattcttggggccagggcaccctcgtgaccgtgtcatctacgcgtggaatgaggactgaggatcttcccaaagctgtcgtctttctcgaaccccaatggtatcgggtgctcgaaaaagactctgtgacactgaaatgccaaggggcctactctcccgaggacaactccacacagtggtttcataatgagtccctcatcagctctcaggccagctcttatttcattgatgccgctacagtggacgactccggcgagtatcggtgtcagaccaatctgtctacactgtctgaccccgtgcagcttgaggtccacattggatggttgctcttgcaagccccacgctgggttttcaaagaggaagatccaatccatctgcggtgccacagctggaaaaacaccgctctccacaaagtcacatacctgcaaaatggcaaaggacgcaaatacttccatcacaattccgatttttacattccgaaggctaccctgaaagacagcggcagctatttctgccggggactcgtcggctccaagaatgtgtcctccgaaaccgtgaatatcacgattacccaaggactggctgtgcctacaatctctagcttctttccgcctggataccaagtctccttctgtcttgtgatggtcctcctgtttgctgtggacacaggactgtacttttccgtg

SEQ ID NO: 1423 - DNA, 1410 bp, synthetic construct
  source 1..1410: mol_type = other DNA
atggccttaccagtgaccgccttgctcctgccgctggccttgctgctccacgccgccaggccgatgacccagagccccaagttcctgctggtgtctgccggcgacagagtgaccctgacatgcaaggccagccagagcgtgaacaacgacgtgtactggtatcagcaggaacccggccagtcccccaagctgctgatctactgggccagcaccagagaaagcggcgtgcccgatagattcaccggcagcggctctggcaccgacttcaccctgacaatcagcagcgtgcaggccgaggacctggccgtgtactactgcaagcagagctacaacctgtacaccttcggcggaggcaccaagctggaaatcaagagaggcggcggaggatctggcggaggcggatctgggggcggaggctctgaatctggaagaggactggtgcagcctggcggcagcagaaagctgtcttgtgccgccagcggcttcaccttcagcaccagcggaatgcactgggtgcgccaggcccctgagaagggactggaatgggtggcctacatcagctccggcagcaccaccatctaccacgccgataccgtgaagggccggttcaccatcagccgggacaaccccaagaataccctgttcctccagatgaccagcctgcggagcgaggacaccgccatgtactattgctgcgccagaagcggccagttcggcaactacttcgactactggggccagggcaccaccctgaccgtgtcatctacgcgtggaatgaggactgaggatcttcccaaagctgtcgtctttctcgaaccccaatggtatcgggtgctcgaaaaagactctgtgacactgaaatgccaaggggcctactctcccgaggacaactccacacagtggtttcataatgagtccctcatcagctctcaggccagctcttatttcattgatgccgctacagtggacgactccggcgagtatcggtgtcagaccaatctgtctacactgtctgaccccgtgcagcttgaggtccacattggatggttgctcttgcaagccccacgctgggttttcaaagaggaagatccaatccatctgcggtgccacagctggaaaaacaccgctctccacaaagtcacatacctgcaaaatggcaaaggacgcaaatacttccatcacaattccgatttttacattccgaaggctaccctgaaagacagcggcagctatttctgccggggactcgtcggctccaagaatgtgtcctccgaaaccgtgaatatcacgattacccaaggactggctgtgcctacaatctctagcttctttccgcctggataccaagtctccttctgtcttgtgatggtcctcctgtttgctgtggacacaggactgtacttttccgtg

SEQ ID NO: 1424 - DNA, 1425 bp, synthetic construct
  source 1..1425: mol_type = other DNA
atggccttaccagtgaccgccttgctcctgccgctggccttgctgctccacgccgccaggccgcagagcccatctagcctggctgtgtctgccggcgagaaagtgaccatgagctgcaagagcagccagagcctgctgaacagccggacccggaagaactacctggcctggtatcagcagaagcccggccagagccccaagctgctgatctactgggccagcaccagagaaagcggcgtgcccgatagattcaccggctctggcagcggcaccgacttcaccctgacaatcagcagcgtgcaggccgaggacctggccgtgtactactgcaagcagagcaacctgtacaccttcggcggaggcaccaagctggaaatcaagggcggaggcggaagtggaggcggaggatctggcggcggaggctctcaggtgcagctggaagagtctggacccgagcttgtgaagcctggggccagcgtgaagctgtcctgtaaagccagcggctacaccttcaccgagtacatcatccactgggtcaagcagcggagcggccagggcctggaatggatcggctggttttaccctggctccggcagcatcaagtacaacgagaagttcaaggacaaggccaccctgaccgccgacaagtccagcagcaccgtgtacatggaactgagcggcctgaccagcgaggacagcgccgtgtatttctgcgccagacacgacggctacagctacttcgactattggggccagggcaccacactgaccgtgtcctctacgcgtggaatgaggactgaggatcttcccaaagctgtcgtctttctcgaaccccaatggtatcgggtgctcgaaaaagactctgtgacactgaaatgccaaggggcctactctcccgaggacaactccacacagtggtttcataatgagtccctcatcagctctcaggccagctcttatttcattgatgccgctacagtggacgactccggcgagtatcggtgtcagaccaatctgtctacactgtctgaccccgtgcagcttgaggtccacattggatggttgctcttgcaagccccacgctgggttttcaaagaggaagatccaatccatctgcggtgccacagctggaaaaacaccgctctccacaaagtcacatacctgcaaaatggcaaaggacgcaaatacttccatcacaattccgatttttacattccgaaggctaccctgaaagacagcggcagctatttctgccggggactcgtcggctccaagaatgtgtcctccgaaaccgtgaatatcacgattacccaaggactggctgtgcctacaatctctagcttctttccgcctggataccaagtctccttctgtcttgtgatggtcctcctgtttgctgtggacacaggactgtacttttccgtg

SEQ ID NO: 1425 - DNA, 1434 bp, synthetic construct
  source 1..1434: mol_type = other DNA
atggccttaccagtgaccgccttgctcctgccgctggccttgctgctccacgccgccaggccggacatccagatgacccagagccccagcagcctgtctgcctctctgggcgagagagtgtccctgacctgtcgggccacacaggaactgagcggctacctgtcttggctgcagcagaagcccgacggcaccatcaagcggctgatctacgccgccagcaccctggatagcggcgtgcccaagagattcagcggcaacagaagcggcagcgactacagcctgaccatcagctccctggaaagcgaggacttcgccgactactactgcctgcagtacgccatctacccctacaccttcggcggaggcaccaagctggaaatcaagggcggaggcggaagtggaggcggaggatctggcggcggaggctctgaggtgcaactgcagcagtctggccccgagcttgtgaagcctggcgcctccgtgaagatgagctgcaaggccagcggctacacctttaccagctacttcatccactgggtcaagcagaaacccggccagggcctggaatggatcggcttcatcaacccttacaacgacggcagcaagtacaacgagaagttcaagggcaaggccaccctgaccagcgacaagagcagcagcaccgcctacatggaactgtccagcctgacatccgaggacagcgccgtgtactactgcaccagggacgacggctactacggctacgccatggactactggggccagggaacaagcgtcaccgtgtcctctacgcgtggaatgaggactgaggatcttcccaaagctgtcgtctttctcgaaccccaatggtatcgggtgctcgaaaaagactctgtgacactgaaatgccaaggggcctactctcccgaggacaactccacacagtggtttcataatgagtccctcatcagctctcaggccagctcttatttcattgatgccgctacagtggacgactccggcgagtatcggtgtcagaccaatctgtctacactgtctgaccccgtgcagcttgaggtccacattggatggttgctcttgcaagccccacgctgggttttcaaagaggaagatccaatccatctgcggtgccacagctggaaaaacaccgctctccacaaagtcacatacctgcaaaatggcaaaggacgcaaatacttccatcacaattccgatttttacattccgaaggctaccctgaaagacagcggcagctatttctgccggggactcgtcggctccaagaatgtgtcctccgaaaccgtgaatatcacgattacccaaggactggctgtgcctacaatctctagcttctttccgcctggataccaagtctccttctgtcttgtgatggtcctcctgtttgctgtggacacaggactgtacttttccgtg

SEQ ID NO: 1426 - DNA, 1449 bp, synthetic construct
  source 1..1449: mol_type = other DNA
atggccttaccagtgaccgccttgctcctgccgctggccttgctgctccacgccgccaggccggacaccatcgtgctgacacagagccctgcttccctggccgtgtccctgggacagagagccaccatctcttgcagagccagcgagagcgtggacagctacggcaacagcttcatgcactggtatcagcagaagcccggccagccccccaagctgctgatctacctggcctccaacctggaaagcggcgtgcccgccagattttctggcagcggcagcagaaccgacttcaccctgaccatcgaccccgtggaagccgatgatgccgccacctactactgccagcagaacaactacgacccctggaccttcggcggaggcaccaagctggaaatcaagggcggaggcggaagtggaggcggaggatctggcggcggaggctctgaagtgcaactccagcagagcggccctgagcttgtgaagcctggcgcttccgtgaagatgagctgcaaggccagcggctacaccttcaccagctacgtgatgcactgggtcaagcagaaacctggacagggcctggaatggatcggctacatcaacccctacaacgacggcaccaagtacaacgagaagttcaagggcaaggccaccctgacaagcgacaccagcagcagcaccgcctacatggaactgaacagcctgaccagcgaggacagcgccgtgtacttctgcgccagacccatctacttcgacaacgactacttcgattactggggccagggcaccaccctgaaggtgtcctctacgcgtggaatgaggactgaggatcttcccaaagctgtcgtctttctcgaaccccaatggtatcgggtgctcgaaaaagactctgtgacactgaaatgccaaggggcctactctcccgaggacaactccacacagtggtttcataatgagtccctcatcagctctcaggccagctcttatttcattgatgccgctacagtggacgactccggcgagtatcggtgtcagaccaatctgtctacactgtctgaccccgtgcagcttgaggtccacattggatggttgctcttgcaagccccacgctgggttttcaaagaggaagatccaatccatctgcggtgccacagctggaaaaacaccgctctccacaaagtcacatacctgcaaaatggcaaaggacgcaaatacttccatcacaattccgatttttacattccgaaggctaccctgaaagacagcggcagctatttctgccggggactcgtcggctccaagaatgtgtcctccgaaaccgtgaatatcacgattacccaaggactggctgtgcctacaatctctagcttctttccgcctggataccaagtctccttctgtcttgtgatggtcctcctgtttgctgtggacacaggactgtacttttccgtg

SEQ ID NO: 1427 - DNA, 1431 bp, synthetic construct
  source 1..1431: mol_type = other DNA
atggccttaccagtgaccgccttgctcctgccgctggccttgctgctccacgccgccaggccggacatccagatgacccagagccccagcagcctgtctgccagcgtgggcgacagagtgaccatcacatgcaaggccagccaggacgtgggaatcgccgtggcctggtatcagcagaaacccggcaaggtgcccaagctgctgatctactgggccagcaccagacacaccggcgtgcccgatagattttccggcagcggctccggcaccgacttcaccctgacaatcagctccctccagcccgaggacgtggcaacctactactgccagcagtacagcagctacccctacaccttcggccagggcaccaaggtggaaatcaagggcggaggcggaagtggaggcggaggatctggcggcggaggctctgaagtgcaactggtggaatcaggcggcggactggtgcagcctggcggatctctgagactgagctgtgccgccagcggcttcgacttcagccggtactggatgagctgggtgcgccaggcccctggcaaaggactggaatggatcggcgagatcaaccccgacagcagcaccatcaactacgcccccagcctgaaggacaagttcatcatcagccgggacaacgccaagaacagcctgtacctccagatgaactccctgcgggccgaggacaccgccgtgtactattgcgccagacccgacggcaactactggtacttcgacgtgtggggccagggaaccctcgtgaccgtgtcatctacgcgtggaatgaggactgaggatcttcccaaagctgtcgtctttctcgaaccccaatggtatcgggtgctcgaaaaagactctgtgacactgaaatgccaaggggcctactctcccgaggacaactccacacagtggtttcataatgagtccctcatcagctctcaggccagctcttatttcattgatgccgctacagtggacgactccggcgagtatcggtgtcagaccaatctgtctacactgtctgaccccgtgcagcttgaggtccacattggatggttgctcttgcaagccccacgctgggttttcaaagaggaagatccaatccatctgcggtgccacagctggaaaaacaccgctctccacaaagtcacatacctgcaaaatggcaaaggacgcaaatacttccatcacaattccgatttttacattccgaaggctaccctgaaagacagcggcagctatttctgccggggactcgtcggctccaagaatgtgtcctccgaaaccgtgaatatcacgattacccaaggactggctgtgcctacaatctctagcttctttccgcctggataccaagtctccttctgtcttgtgatggtcctcctgtttgctgtggacacaggactgtacttttccgtg

SEQ ID NO: 1428 - DNA, 1434 bp, synthetic construct
  source 1..1434: mol_type = other DNA
atggccttaccagtgaccgccttgctcctgccgctggccttgctgctccacgccgccaggccggacatcgtgatgacccagagccagaagagcatgagcaccagcgtgggcgacagagtgagcatcacctgcaaggccagccaggacgtgatcaccggcgtggcctggtaccagcagaagcccggccagagccccaagctgctgatctacagcgccagctacagatacaccggcgtgcccgacagattcaccggcagcggcagcggcaccgacttcaccttcaccatcagcaacgtgcaggccgaggacctggccgtgtactactgccagcagcactacagcacccccctgaccttcggcgccggcaccaagctggagctgaagggcggaggcggaagtggaggcggaggatctggcggcggaggctctcaggtgcagctgcagcagcccggcgccgagctggtgagacccggcgccagcgtgaagctgagctgcaaggccagcggctacagcttcaccacctactggatgaactgggtgaagcagagacccggccagggcctggagtggatcggcatgatccaccccagcgacagcgagaccagactgaaccagaagttcaaggacaaggccaccctgaccgtggacaagagcagcagcaccgcctacatgcagctgagcagccccaccagcgaggacagcgccgtgtactactgcgccagaagcaccatgatcgccaccagagccatggactactggggccagggcaccagcgtgaccgtgagcagcacgcgtggaatgaggactgaggatcttcccaaagctgtcgtctttctcgaaccccaatggtatcgggtgctcgaaaaagactctgtgacactgaaatgccaaggggcctactctcccgaggacaactccacacagtggtttcataatgagtccctcatcagctctcaggccagctcttatttcattgatgccgctacagtggacgactccggcgagtatcggtgtcagaccaatctgtctacactgtctgaccccgtgcagcttgaggtccacattggatggttgctcttgcaagccccacgctgggttttcaaagaggaagatccaatccatctgcggtgccacagctggaaaaacaccgctctccacaaagtcacatacctgcaaaatggcaaaggacgcaaatacttccatcacaattccgatttttacattccgaaggctaccctgaaagacagcggcagctatttctgccggggactcgtcggctccaagaatgtgtcctccgaaaccgtgaatatcacgattacccaaggactggctgtgcctacaatctctagcttctttccgcctggataccaagtctccttctgtcttgtgatggtcctcctgtttgctgtggacacaggactgtacttttccgtg

SEQ ID NO: 1429 - DNA, 1452 bp, synthetic construct
  source 1..1452: mol_type = other DNA
atggccttaccagtgaccgccttgctcctgccgctggccttgctgctccacgccgccaggccgcagagcgtgctgacacagcctccatccgtgtctggcgctccaggccagagagtgaccatctcctgtaccggcagcggcagcaacatcggagccccctacgacgtgtcctggtatcagcaactgcctggcaccgcccccaagctgctgatctaccacaacaacaagcggcccagcggcgtgcccgatagattcagcggctctaagagcggcaccagcgccagcctggctatcactggactccaggccgaggacgaggccgactactactgtgccacagtggaagccggcctgagcggctctgtgtttggcggcggaacaaagctgaccgtgctgggagctggcggaggcggaagtggaggcggaggatctggcggcggaggctctcaggtgcaactggtgcagagcggagccgaagtgaagaaacctggggccagcgtgaaggtgtcctgcaaggtgtccggctacaccctgaccgagctgagcattcactgggtgcgccaggcccctggcaagggactggaatggatgggcggcttcgaccccgaagagaacgagatcgtgtacgcccagcggttccagggcagagtgacaatgaccgaggacaccagcaccgacaccgcctacatggaactgagcagcctgcggagcgaggataccgccgtgtactactgcgccatcgtgggcagcttcagccctctgacactgggcctgtggggccagggaactatggtcaccgtgtccagcacgcgtggaatgaggactgaggatcttcccaaagctgtcgtctttctcgaaccccaatggtatcgggtgctcgaaaaagactctgtgacactgaaatgccaaggggcctactctcccgaggacaactccacacagtggtttcataatgagtccctcatcagctctcaggccagctcttatttcattgatgccgctacagtggacgactccggcgagtatcggtgtcagaccaatctgtctacactgtctgaccccgtgcagcttgaggtccacattggatggttgctcttgcaagccccacgctgggttttcaaagaggaagatccaatccatctgcggtgccacagctggaaaaacaccgctctccacaaagtcacatacctgcaaaatggcaaaggacgcaaatacttccatcacaattccgatttttacattccgaaggctaccctgaaagacagcggcagctatttctgccggggactcgtcggctccaagaatgtgtcctccgaaaccgtgaatatcacgattacccaaggactggctgtgcctacaatctctagcttctttccgcctggataccaagtctccttctgtcttgtgatggtcctcctgtttgctgtggacacaggactgtacttttccgtg

SEQ ID NO: 1430 - DNA, 1452 bp, synthetic construct
  source 1..1452: mol_type = other DNA
atggccttaccagtgaccgccttgctcctgccgctggccttgctgctccacgccgccaggccgcagagcgtgctgacacagcctccatccgtgtctggcgctccaggccagagagtgaccatctcctgtaccggcagcggcagcaacatcggagccccctacgacgtgtcctggtatcagcaactgcctggcaccgcccccaagctgctgatctaccacaacaacaagcggcccagcggcgtgcccgatagattcagcggctctaagagcggcaccagcgccagcctggctatcactggactccaggccgaggacgaggccgactactactgccagagctacgacagcagcagcatcagcaccatcttcggcggaggcaccaagctgacagtgctgggagctggcggaggcggaagtggaggcggaggatctggcggcggaggctctcaggtgcaactggtgcagagcggagccgaagtgaagaaacctggggccagcgtgaaggtgtcctgcaaggtgtccggctacaccctgaccgagctgagcattcactgggtgcgccaggcccctggcaagggactggaatggatgggcggcttcgaccccgaagagaacgagatcgtgtacgcccagcggttccagggcagagtgacaatgaccgaggacaccagcaccgacaccgcctacatggaactgagcagcctgcggagcgaggataccgccgtgtactactgtgccatcgtgggcagcttcagcggaatcgcctacagaccttggggccagggcacaatggtcaccgtgtctagcacgcgtggaatgaggactgaggatcttcccaaagctgtcgtctttctcgaaccccaatggtatcgggtgctcgaaaaagactctgtgacactgaaatgccaaggggcctactctcccgaggacaactccacacagtggtttcataatgagtccctcatcagctctcaggccagctcttatttcattgatgccgctacagtggacgactccggcgagtatcggtgtcagaccaatctgtctacactgtctgaccccgtgcagcttgaggtccacattggatggttgctcttgcaagccccacgctgggttttcaaagaggaagatccaatccatctgcggtgccacagctggaaaaacaccgctctccacaaagtcacatacctgcaaaatggcaaaggacgcaaatacttccatcacaattccgatttttacattccgaaggctaccctgaaagacagcggcagctatttctgccggggactcgtcggctccaagaatgtgtcctccgaaaccgtgaatatcacgattacccaaggactggctgtgcctacaatctctagcttctttccgcctggataccaagtctccttctgtcttgtgatggtcctcctgtttgctgtggacacaggactgtacttttccgtg

SEQ ID NO: 1431 - DNA, 1446 bp, synthetic construct
  source 1..1446: mol_type = other DNA
atggccttaccagtgaccgccttgctcctgccgctggccttgctgctccacgccgccaggccggacatccagatgacccagagccccagcagcctgtctgccagcgtgggcgacagagtgaccatcacctgtagcgccagcagcagcgtgtcctacatgtactggtatcagcagaagcccggcaaggcccccaagctgctgatctacctgaccagcaatctggcctccggcgtgcccagcagattttctggcagcggctccggcaccgacttcaccctgacaatcagctccctccagcccgaggacttcgccacctactactgtcagcagtggcggagcaaccccttcaccttcggccagggcaccaagctggaaatcaagagaggcggaggcggaagtggaggcggaggatctggcggcggaggctctcagatcaccctgaaagagtccggccccaccctcgtgaagcctacccagaccctgacactgacctgcaccttcagcggcttcagcctgagcacaagcggcatgggcgtgggctggatcagacagcctcctggaaaggccctggaatggctggcccacatttggtgggacgacgtgaagcggtacagccccagcctgaagtcccggctgaccattaccaaggacaccagcaagaaccaggtggtgctgaccatgacaaacatggaccccgtggacaccgccacatattactgcgcccggatcgtgtccttcgacaacgacgtggtgtccgctatggactactggggccagggaaccctcgtgaccgtgtctagtacgcgtggaatgaggactgaggatcttcccaaagctgtcgtctttctcgaaccccaatggtatcgggtgctcgaaaaagactctgtgacactgaaatgccaaggggcctactctcccgaggacaactccacacagtggtttcataatgagtccctcatcagctctcaggccagctcttatttcattgatgccgctacagtggacgactccggcgagtatcggtgtcagaccaatctgtctacactgtctgaccccgtgcagcttgaggtccacattggatggttgctcttgcaagccccacgctgggttttcaaagaggaagatccaatccatctgcggtgccacagctggaaaaacaccgctctccacaaagtcacatacctgcaaaatggcaaaggacgcaaatacttccatcacaattccgatttttacattccgaaggctaccctgaaagacagcggcagctatttctgccggggactcgtcggctccaagaatgtgtcctccgaaaccgtgaatatcacgattacccaaggactggctgtgcctacaatctctagcttctttccgcctggataccaagtctccttctgtcttgtgatggtcctcctgtttgctgtggacacaggactgtacttttccgtg

SEQ ID NO: 1432 - DNA, 1431 bp, synthetic construct
  source 1..1431: mol_type = other DNA
atggccttaccagtgaccgccttgctcctgccgctggccttgctgctccacgccgccaggccggagatcgtgatgacccagagccctgccaccctgtccgtgtctccaggcgaaagagccaccctgagctgcaaggcttcccagagcgtgtccaacgacgtcgtgtggtatcagcagaagcccggccaggcccccagactgctgatctactacgccagcaacagatacaccggcatccccgccagattcagcggctctggcagcggcaccgagttcaccctgacaatcagcagcctccagagcgaggacttcgccgtgtactactgtcagcaggactacaccagcccctggaccttcggccagggcaccaagctggaaatcaagagaggcggaggcggaagtggaggcggaggatctggcggcggaggctctcaggtgcaactggtgcagagcggagccgaagtgaagaaacctggggccagcgtgaaggtgtcctgcaaggccagcggctacacctttaccaactacggcatgaactgggtgcgccaggctcctggacagggcctggaatggatgggctggatcaacacctacaccggcgagcccacctacgccgacgacttcaagggcagagtgaccatgaccaccgacaccagcacctccaccgcctacatggaactgcggagcctgagaagcgacgacaccgccgtgtattattgcgcccggatcggcgacagcagccccagcgattattggggccagggaaccctcgtgaccgtgtcctctacgcgtggaatgaggactgaggatcttcccaaagctgtcgtctttctcgaaccccaatggtatcgggtgctcgaaaaagactctgtgacactgaaatgccaaggggcctactctcccgaggacaactccacacagtggtttcataatgagtccctcatcagctctcaggccagctcttatttcattgatgccgctacagtggacgactccggcgagtatcggtgtcagaccaatctgtctacactgtctgaccccgtgcagcttgaggtccacattggatggttgctcttgcaagccccacgctgggttttcaaagaggaagatccaatccatctgcggtgccacagctggaaaaacaccgctctccacaaagtcacatacctgcaaaatggcaaaggacgcaaatacttccatcacaattccgatttttacattccgaaggctaccctgaaagacagcggcagctatttctgccggggactcgtcggctccaagaatgtgtcctccgaaaccgtgaatatcacgattacccaaggactggctgtgcctacaatctctagcttctttccgcctggataccaagtctccttctgtcttgtgatggtcctcctgtttgctgtggacacaggactgtacttttccgtg

SEQ ID NO: 1433 - DNA, 1431 bp, synthetic construct
  source 1..1431: mol_type = other DNA
atggccttaccagtgaccgccttgctcctgccgctggccttgctgctccacgccgccaggccggacatcctgctgacccagagccccgtgatcctgtccgtgtctcctggcgagagagtgtccttcagctgtcgggccagccagagcatcggcaccaacatccactggtatcagcagcggaccaacggcagccccagactgctgattaagtacgccagcgagtccatcagcggcatccccagcagattttccggcagcggctccggcaccgacttcaccctgagcatcaacagcgtggaaagcgaggacattgccgactactactgccagcagaacaacaactggcccaccaccttcggagccggcaccaagctggaactgaagggcggaggcggaagtggaggcggaggatctggcggcggaggctctcaggtgcagctgaagcagagcggacctggcctggtgcagcctagccagagcctgtccatcacctgtaccgtgtccggcttcagcctgaccaactacggcgtgcactgggtgcgccagagccctggaaaaggactggaatggctgggagtgatttggagcggcggcaacaccgactacaacacccccttcaccagcagactgtctatcaacaaggacaacagcaagagccaggtgttcttcaagatgaacagcctccagagcaacgacaccgccatctactactgtgctagagccctgacctactatgactacgagttcgcctactggggccagggcacactcgtgacagtgtctgctacgcgtggaatgaggactgaggatcttcccaaagctgtcgtctttctcgaaccccaatggtatcgggtgctcgaaaaagactctgtgacactgaaatgccaaggggcctactctcccgaggacaactccacacagtggtttcataatgagtccctcatcagctctcaggccagctcttatttcattgatgccgctacagtggacgactccggcgagtatcggtgtcagaccaatctgtctacactgtctgaccccgtgcagcttgaggtccacattggatggttgctcttgcaagccccacgctgggttttcaaagaggaagatccaatccatctgcggtgccacagctggaaaaacaccgctctccacaaagtcacatacctgcaaaatggcaaaggacgcaaatacttccatcacaattccgatttttacattccgaaggctaccctgaaagacagcggcagctatttctgccggggactcgtcggctccaagaatgtgtcctccgaaaccgtgaatatcacgattacccaaggactggctgtgcctacaatctctagcttctttccgcctggataccaagtctccttctgtcttgtgatggtcctcctgtttgctgtggacacaggactgtacttttccgtg

SEQ ID NO: 1434 - DNA, 1431 bp, synthetic construct
  source 1..1431: mol_type = other DNA
atggccttaccagtgaccgccttgctcctgccgctggccttgctgctccacgccgccaggccggagatccagctggtgcagagcggagccgaagtgaagaagcctggcgagagcctgcggatcagctgcaagggcagcggcttcaacatcgaggactactacatccactgggtgcgccagatgcccggcaagggcctggaatggatgggcagaatcgaccccgagaacgacgagactaagtacggccccatcttccagggccacgtgaccatcagcgccgacaccagcatcaacaccgtgtacctccagtggtccagcctgaaggccagcgacaccgccatgtactactgcgcctttagaggcggcgtgtactggggccagggcaccacagtgacagtgtctagcggcggaggcggaagtggaggcggaggatctggcggcggaggctctgatgtcgtgatgacccagagccccgacagcctggctgtgtctctgggagagagagccaccatcaactgcaagtccagccagtccctgctggacagcgacggcaagacctacctgaactggctccagcagaagcccggccagccccccaagagactgatctccctggtgtccaagctggactccggcgtgcccgatagattttccggctctggcagcggcaccgacttcaccctgacaatcagctcccttcaggccgaggacgtggccgtgtactattgctggcagggcacacacttccccggcacctttggcggaggcaccaaggtggaaatcaagacgcgtggaatgaggactgaggatcttcccaaagctgtcgtctttctcgaaccccaatggtatcgggtgctcgaaaaagactctgtgacactgaaatgccaaggggcctactctcccgaggacaactccacacagtggtttcataatgagtccctcatcagctctcaggccagctcttatttcattgatgccgctacagtggacgactccggcgagtatcggtgtcagaccaatctgtctacactgtctgaccccgtgcagcttgaggtccacattggatggttgctcttgcaagccccacgctgggttttcaaagaggaagatccaatccatctgcggtgccacagctggaaaaacaccgctctccacaaagtcacatacctgcaaaatggcaaaggacgcaaatacttccatcacaattccgatttttacattccgaaggctaccctgaaagacagcggcagctatttctgccggggactcgtcggctccaagaatgtgtcctccgaaaccgtgaatatcacgattacccaaggactggctgtgcctacaatctctagcttctttccgcctggataccaagtctccttctgtcttgtgatggtcctcctgtttgctgtggacacaggactgtacttttccgtg

SEQ ID NO: 1435 - DNA, 1455 bp, synthetic construct
  source 1..1455: mol_type = other DNA
atggccttaccagtgaccgccttgctcctgccgctggccttgctgctccacgccgccaggccggagctgcagatgacccagagccctagcagcctgtctgccagcgtgggcgacagagtgaccatcacctgtagagccagccagagcatcagcagctacctgaactggtatcagcagaagcccggccagccccccaaactgctgatctactgggccagcaccagagaaagcggcgtgcccgatagattcagcggcagcgagagcggcaccaactacaccctgaccatcagctccctgcagcccgaggacttcgccacctacttttgccagcagagcgacagcctgcccatcacctttggacagggcacccggctggacattcagggcggaggcggaagtggaggcggaggatctggcggcggaggctctgaggtgcaactgctggaatctgggggcggagtggtgcagcctggcagaagcctgagactgagctgtgccgccagcggcttcaccttcagctcctacggaatgcactgggtgcgccaggcccctggcaaaggactggaatgggtggccgtgatctcctacgacggcagcaacaagtactacgccgacagcgtgaagggccggttcaccatcagccgggacaacagcaagaacaccctgtacctgcagatgaacagcctgcgggccgaggacaccgccgtgtactactgcgccaaggatatgggctggggcagcggctggcggccttactactactacggcatggacgtgtggggccagggcaccaccgtgacagtgtcatctacgcgtggaatgaggactgaggatcttcccaaagctgtcgtctttctcgaaccccaatggtatcgggtgctcgaaaaagactctgtgacactgaaatgccaaggggcctactctcccgaggacaactccacacagtggtttcataatgagtccctcatcagctctcaggccagctcttatttcattgatgccgctacagtggacgactccggcgagtatcggtgtcagaccaatctgtctacactgtctgaccccgtgcagcttgaggtccacattggatggttgctcttgcaagccccacgctgggttttcaaagaggaagatccaatccatctgcggtgccacagctggaaaaacaccgctctccacaaagtcacatacctgcaaaatggcaaaggacgcaaatacttccatcacaattccgatttttacattccgaaggctaccctgaaagacagcggcagctatttctgccggggactcgtcggctccaagaatgtgtcctccgaaaccgtgaatatcacgattacccaaggactggctgtgcctacaatctctagcttctttccgcctggataccaagtctccttctgtcttgtgatggtcctcctgtttgctgtggacacaggactgtacttttccgtg

SEQ ID NO: 1436 - DNA, 1452 bp, synthetic construct
  source 1..1452: mol_type = other DNA
atggccttaccagtgaccgccttgctcctgccgctggccttgctgctccacgccgccaggccggagcttgtgatgacccagagccccagcagcctgacagtgacagccggcgagaaagtgaccatgagctgcaagagcagccagagcctgctgaacagcggcaaccagaagaactacctgacctggtatcagcagaagcccggccagccccccaagctgctgatctactgggccagcaccagagaaagcggcgtgcccgatagattcaccggctctggcagcggcaccgacttcaccctgacaatcagcagcgtgcaggccgaggacctggccgtgtactactgccagaacgactacagctaccccctgaccttcggagccggcaccaagctggaaatcaagggcggaggcggaagtggaggcggaggatctggcggcggaggctctgaagtgcagctgctggaacagtctggcgccgaacttgtgcggcctggcaccagcgtgaagatcagctgtaaagccagcggctacgccttcaccaactactggctgggctgggtcaagcagaggcctggacacggcctggaatggatcggcgacatctttcccggctccggcaacatccactacaacgagaagttcaagggcaaggccaccctgaccgccgacaagtctagcagcaccgcctacatgcagctgtccagcctgacctttgaggacagcgccgtgtatttctgtgcccggctgcggaactgggacgagcccatggattattggggccagggcaccaccgtgaccgtgtctagtacgcgtggaatgaggactgaggatcttcccaaagctgtcgtctttctcgaaccccaatggtatcgggtgctcgaaaaagactctgtgacactgaaatgccaaggggcctactctcccgaggacaactccacacagtggtttcataatgagtccctcatcagctctcaggccagctcttatttcattgatgccgctacagtggacgactccggcgagtatcggtgtcagaccaatctgtctacactgtctgaccccgtgcagcttgaggtccacattggatggttgctcttgcaagccccacgctgggttttcaaagaggaagatccaatccatctgcggtgccacagctggaaaaacaccgctctccacaaagtcacatacctgcaaaatggcaaaggacgcaaatacttccatcacaattccgatttttacattccgaaggctaccctgaaagacagcggcagctatttctgccggggactcgtcggctccaagaatgtgtcctccgaaaccgtgaatatcacgattacccaaggactggctgtgcctacaatctctagcttctttccgcctggataccaagtctccttctgtcttgtgatggtcctcctgtttgctgtggacacaggactgtacttttccgtg

SEQ ID NO: 1437 - DNA, 1446 bp, synthetic construct
  source 1..1446: mol_type = other DNA
atggccttaccagtgaccgccttgctcctgccgctggccttgctgctccacgccgccaggccggacatccaaatgacacagagtccttctagtttgagtgcgagcgtgggggacagggtgaccattacctgcagggccagccagagcataagctcataccttaattggtaccagcaaaaaccaggtaaggcccctaagctcctgatctacgcggcctcttcacttcaatctggggtcccttcccgcttcagtggctccggcagcggcaccgacttcacgctcactatatcaagtctgcagcctgaggatctcgccacctattactgtcaacaaagttattccacccctttcacctttggaccgggcacgaaagtggatattaagggcggaggcggaagtggaggcggaggatctggcggcggaggctctgtgcacgaggtccagcttgtgcagtccggggcagaggtcaagaagcctggttctagcgtaaaagtgagttgcaaagcctcaggtgggacattttcatcctacgcgatcagttgggttagacaggctcctggtcaagggctggaatggatgggcggaattattccaatcttcggaacagcgaattacgcgcagaagttccagggtagagtaaccatcactgctgacaagtccacctccaccgcatacatggaattgtctagtctccggagcgaggatacggcggtgtattattgtgctacgttcgccctgtttggcttccgcgaacaggctttcgacatctgggggcagggcacgacagtcacggttagtagtacgcgtggaatgaggactgaggatcttcccaaagctgtcgtctttctcgaaccccaatggtatcgggtgctcgaaaaagactctgtgacactgaaatgccaaggggcctactctcccgaggacaactccacacagtggtttcataatgagtccctcatcagctctcaggccagctcttatttcattgatgccgctacagtggacgactccggcgagtatcggtgtcagaccaatctgtctacactgtctgaccccgtgcagcttgaggtccacattggatggttgctcttgcaagccccacgctgggttttcaaagaggaagatccaatccatctgcggtgccacagctggaaaaacaccgctctccacaaagtcacatacctgcaaaatggcaaaggacgcaaatacttccatcacaattccgatttttacattccgaaggctaccctgaaagacagcggcagctatttctgccggggactcgtcggctccaagaatgtgtcctccgaaaccgtgaatatcacgattacccaaggactggctgtgcctacaatctctagcttctttccgcctggataccaagtctccttctgtcttgtgatggtcctcctgtttgctgtggacacaggactgtacttttccgtg

SEQ ID NO: 1438 - DNA, 1428 bp, synthetic construct
  source 1..1428: mol_type = other DNA
atggccttaccagtgaccgccttgctcctgccgctggccttgctgctccacgccgccaggccgtacatccacgtgacacagagccctagcagcctgtccgtgtccatcggcgatagagtgaccatcaactgccagacctctcaaggcgtgggcagcgacctgcactggtatcagcacaaacctggcagagcccctaagctgctgatccaccatgccagctctgtggaagatggcgtgcccagcagattttccggcaccggatttcacaccagcttcaacctgacaatcaacgacctccaggccgacgacatcggcacctactactgtcaagtgctccagagcttcggcagaggcagcagactggatacaaaaggcggaggcggaagtggaggcggaggatctggcggcggaggctctagggcacacctggtgcagtctggcaccgccatgaagaaacctggcgcttccgtcagagtgtcctgtcagacaagcggctacaccttcacagcccacatcctgttctggttcagacaggccccaggcagaggactggaatgggtcggatggatcaagccccagtacggggccgtgaatttcggcggaggcttcagagacagagtgaccctgaccagggacgtgtaccgggaaatcgcctacatggacatccggggcctgaagcctgatgacaccgccgtgtactactgcgccagggatagaagctacggcgacagctcttgggctctcgatgcttggggacagggcacaacagtggtggtgtctgctacgcgtggaatgaggactgaggatcttcccaaagctgtcgtctttctcgaaccccaatggtatcgggtgctcgaaaaagactctgtgacactgaaatgccaaggggcctactctcccgaggacaactccacacagtggtttcataatgagtccctcatcagctctcaggccagctcttatttcattgatgccgctacagtggacgactccggcgagtatcggtgtcagaccaatctgtctacactgtctgaccccgtgcagcttgaggtccacattggatggttgctcttgcaagccccacgctgggttttcaaagaggaagatccaatccatctgcggtgccacagctggaaaaacaccgctctccacaaagtcacatacctgcaaaatggcaaaggacgcaaatacttccatcacaattccgatttttacattccgaaggctaccctgaaagacagcggcagctatttctgccggggactcgtcggctccaagaatgtgtcctccgaaaccgtgaatatcacgattacccaaggactggctgtgcctacaatctctagcttctttccgcctggataccaagtctccttctgtcttgtgatggtcctcctgtttgctgtggacacaggactgtacttttccgtg

SEQ ID NO: 1439 - DNA, 1443 bp, synthetic construct
  source 1..1443: mol_type = other DNA
atggccttaccagtgaccgccttgctcctgccgctggccttgctgctccacgccgccaggccggacatcgtgctgacccagagccctctgagcctggccgtgtctctgggacagcctgccatcatcagctgcaaggccagccagagcgtgtcctttgccggcacctctctgatgcactggtatcaccagaagcccggccagcagcccagactgctgatctacagagccagcaacctggaagccggcgtgcccgatagattttccggcagcggcagcaagaccgacttcaccctgaccatcagccccgtggaagccgaagatgccgccacctactactgccagcagagcagagagtacccctacaccttcggcggaggcaccaagctggaaatcaagaggggcggaggcggaagtggaggcggaggatctggcggcggaggctctcaggtccaactggtgcagagcggagccgaggtcgtgaagcctggcgcttccgtgaagattagctgcaaagccagcggctacacctttaccggctactttatgaactgggtcaagcagagccctggccagagcctggaatggatcggcagaatccacccctacgacggcgacaccttctacaaccagaagttccagggcaaggccaccctgacagtggacaagagcagcaacaccgcccacatggaactgctgagcctgaccagcgaggacttcgccgtgtactactgcaccagatacgacggcagccgggctatggactattggggccagggcaccaccgtgaccgtgtctagtacgcgtggaatgaggactgaggatcttcccaaagctgtcgtctttctcgaaccccaatggtatcgggtgctcgaaaaagactctgtgacactgaaatgccaaggggcctactctcccgaggacaactccacacagtggtttcataatgagtccctcatcagctctcaggccagctcttatttcattgatgccgctacagtggacgactccggcgagtatcggtgtcagaccaatctgtctacactgtctgaccccgtgcagcttgaggtccacattggatggttgctcttgcaagccccacgctgggttttcaaagaggaagatccaatccatctgcggtgccacagctggaaaaacaccgctctccacaaagtcacatacctgcaaaatggcaaaggacgcaaatacttccatcacaattccgatttttacattccgaaggctaccctgaaagacagcggcagctatttctgccggggactcgtcggctccaagaatgtgtcctccgaaaccgtgaatatcacgattacccaaggactggctgtgcctacaatctctagcttctttccgcctggataccaagtctccttctgtcttgtgatggtcctcctgtttgctgtggacacaggactgtacttttccgtg

SEQ ID NO: 1440 - DNA, 1431 bp, synthetic construct
  source 1..1431: mol_type = other DNA
atggccttaccagtgaccgccttgctcctgccgctggccttgctgctccacgccgccaggccggacgttgtgatgacccagacccccctgagcctgcctgtgacacctggcgaacctgccagcatcagctgtcggagcagccagagcctggtgcacagaaacggcaacacctacctgcactggtatctccagaagcccggccagagccccaagctgctgatccacaaggtgtccaacagattcagcggcgtgcccgacagattctccggcagcggctctggcaccgacttcaccctgaagatcagccgggtggaagccgaggacctgggcgtgtacttctgtagccagagcacccatgtgccccccctgacatttggagccggcaccaagctggaactgaagggcggaggcggaagtggaggcggaggatctggcggcggaggctctgaagtgcagctggtgcagtctggcgctgaggtggaaaagcctggggccagcgtgaagattagctgcaaggccagcggcagcagcttcaccggctacaacatgaactgggtgcgccagaacatcggcaagagcctggaatggatcggagccatcgacccctactacggcggcaccagctacaaccagaagttcaagggcagagccaccctgaccgtggacaagagcaccagcaccgcctacatgcacctgaagtccctgcggagcgaggacaccgccgtgtactactgtgtgtccggcatggaatattggggccagggcaccagcgtgaccgtgtctagtacgcgtggaatgaggactgaggatcttcccaaagctgtcgtctttctcgaaccccaatggtatcgggtgctcgaaaaagactctgtgacactgaaatgccaaggggcctactctcccgaggacaactccacacagtggtttcataatgagtccctcatcagctctcaggccagctcttatttcattgatgccgctacagtggacgactccggcgagtatcggtgtcagaccaatctgtctacactgtctgaccccgtgcagcttgaggtccacattggatggttgctcttgcaagccccacgctgggttttcaaagaggaagatccaatccatctgcggtgccacagctggaaaaacaccgctctccacaaagtcacatacctgcaaaatggcaaaggacgcaaatacttccatcacaattccgatttttacattccgaaggctaccctgaaagacagcggcagctatttctgccggggactcgtcggctccaagaatgtgtcctccgaaaccgtgaatatcacgattacccaaggactggctgtgcctacaatctctagcttctttccgcctggataccaagtctccttctgtcttgtgatggtcctcctgtttgctgtggacacaggactgtacttttccgtg

SEQ ID NO: 1441 - DNA, 1425 bp, synthetic construct
  source 1..1425: mol_type = other DNA
atggccttaccagtgaccgccttgctcctgccgctggccttgctgctccacgccgccaggccggagatcgtgatgacccagacccctgccaccctgtctgtgtctgccggcgagagagtgaccattacctgcaaggccagccagagcgtgtccaacgacgtgacctggtatcagcagaagcccggccaggcccccagactgctgatctacagcgccagcaacagatacagcggcgtgcccgccagattttccggcagcggctacggcaccgagttcaccttcaccatcagcagcgtgcagagcgaggacttcgccgtgtacttctgtcagcaagactacagcagcttcggccagggcaccaagctggaaatcaagaggggcggaggcggaagtggaggcggaggatctggcggcggaggctctcaggtgcagctggtggaatctggacctggcgtggtgcagcctggcagaagcctgagaatcagctgtgccgtgtccggcttcagcgtgaccaactacggcgtgcactgggtgcgccagccacctggaaaaggactggaatggctgggcgtgatctgggctggcggcatcaccaactacaacagcgccttcatgtcccggctgaccatctccaaggacaacagcaagaacaccgtgtacctccagatgaacagcctgcgggccgaggacaccgccatgtactactgtgcttccagaggcggccactacggctacgccctggattattggggccagggaaccctcgtgaccgtgtcctctacgcgtggaatgaggactgaggatcttcccaaagctgtcgtctttctcgaaccccaatggtatcgggtgctcgaaaaagactctgtgacactgaaatgccaaggggcctactctcccgaggacaactccacacagtggtttcataatgagtccctcatcagctctcaggccagctcttatttcattgatgccgctacagtggacgactccggcgagtatcggtgtcagaccaatctgtctacactgtctgaccccgtgcagcttgaggtccacattggatggttgctcttgcaagccccacgctgggttttcaaagaggaagatccaatccatctgcggtgccacagctggaaaaacaccgctctccacaaagtcacatacctgcaaaatggcaaaggacgcaaatacttccatcacaattccgatttttacattccgaaggctaccctgaaagacagcggcagctatttctgccggggactcgtcggctccaagaatgtgtcctccgaaaccgtgaatatcacgattacccaaggactggctgtgcctacaatctctagcttctttccgcctggataccaagtctccttctgtcttgtgatggtcctcctgtttgctgtggacacaggactgtacttttccgtg

SEQ ID NO: 1442 - DNA, 1434 bp, synthetic construct
  source 1..1434: mol_type = other DNA
atggccttaccagtgaccgccttgctcctgccgctggccttgctgctccacgccgccaggccggacatccagatgacccagaccgccagcagcctgcctgcctctctgggcgacagagtgaccatctcctgtagcgccagccaggacatcagcaactacctgaactggtatcagcagaaacccgacggcaccgtgaagctgctgatcttctacagcagcaacctgcacagcggcgtgcccagcagattttctggcggcggaagcggcaccgactacagcctgaccatcagcaatctggaacccgaggacattgccacctacttttgccaccagtacagcaagctgccctggacctttggcggaggcaccaagctggaaatcaagagaggcggaggcggaagtggaggcggaggatctggcggcggaggctctgaagtgaccctggtggaaagcggcggagacttcgtgaagcctggcggctctctgaaggtgtcctgtgccgccagcggcttcgcctttagccactacgccatgagctgggtgcgccagacccctgccaagagactggaatgggtggcctacatcagcagcggcggctccggcacctactactccgatagcgtgaagggccggttcaccatcagccgggacaacgccaagaacaccctgtacctccagatgcggagcctgcggagcgaggacagcgccatgtatttctgcaccagagtgaagctgggcacctattacttcgactcttggggccagggcaccaccctgaccgtgtcatctacgcgtggaatgaggactgaggatcttcccaaagctgtcgtctttctcgaaccccaatggtatcgggtgctcgaaaaagactctgtgacactgaaatgccaaggggcctactctcccgaggacaactccacacagtggtttcataatgagtccctcatcagctctcaggccagctcttatttcattgatgccgctacagtggacgactccggcgagtatcggtgtcagaccaatctgtctacactgtctgaccccgtgcagcttgaggtccacattggatggttgctcttgcaagccccacgctgggttttcaaagaggaagatccaatccatctgcggtgccacagctggaaaaacaccgctctccacaaagtcacatacctgcaaaatggcaaaggacgcaaatacttccatcacaattccgatttttacattccgaaggctaccctgaaagacagcggcagctatttctgccggggactcgtcggctccaagaatgtgtcctccgaaaccgtgaatatcacgattacccaaggactggctgtgcctacaatctctagcttctttccgcctggataccaagtctccttctgtcttgtgatggtcctcctgtttgctgtggacacaggactgtacttttccgtg

SEQ ID NO: 1443 - DNA, 1440 bp, synthetic construct
  source 1..1440: mol_type = other DNA
atggccttaccagtgaccgccttgctcctgccgctggccttgctgctccacgccgccaggccgcagttcgtgctgacccagagcccttctgcctctgctgccctgggagcctctgccaagctgacctgtacactgagcagcgcccacaagacctacaccatcgactggtatcagcagcagaagggaaaggcccccagatacctgatccaagtgaagtccgacggcacctacacaaaggccaccggcgtgcccgatagattcagcggcagtagcagcggagccgatagatacctgattatccccagcgtgcaggccgacgacgaggccgattactactgcggcaccgattacaccggcggctacgtgttcggcggaggcacacaactgaccgtgacaggcggaggcggaagtggaggcggaggatctggcggcggaggctctgagcaactgaaagagtctggcggcggactgttcaagcccaccgataccctgaccctgacctgcaccgtgtccggcttcagcctgagctactacggcgtgaactgggtgcgccaggcccctggcaatggcctggaatggatcggcacaatcggcggcagcggcgacacctactatgcctcttgggccaagtccagaagcaccatcatcagaaacaccaacgagaacaccgtgaccctgaagatgaccagcctgacagccgccgacaccgccacctacttttgcgtcagatacgccaacatcggctacgagtatttcaacgtgtggggacccggcaccctcgtgaccgtgtcatctacgcgtggaatgaggactgaggatcttcccaaagctgtcgtctttctcgaaccccaatggtatcgggtgctcgaaaaagactctgtgacactgaaatgccaaggggcctactctcccgaggacaactccacacagtggtttcataatgagtccctcatcagctctcaggccagctcttatttcattgatgccgctacagtggacgactccggcgagtatcggtgtcagaccaatctgtctacactgtctgaccccgtgcagcttgaggtccacattggatggttgctcttgcaagccccacgctgggttttcaaagaggaagatccaatccatctgcggtgccacagctggaaaaacaccgctctccacaaagtcacatacctgcaaaatggcaaaggacgcaaatacttccatcacaattccgatttttacattccgaaggctaccctgaaagacagcggcagctatttctgccggggactcgtcggctccaagaatgtgtcctccgaaaccgtgaatatcacgattacccaaggactggctgtgcctacaatctctagcttctttccgcctggataccaagtctccttctgtcttgtgatggtcctcctgtttgctgtggacacaggactgtacttttccgtg

SEQ ID NO: 1444 - DNA, 1437 bp, synthetic construct
  source 1..1437: mol_type = other DNA
atggccttaccagtgaccgccttgctcctgccgctggccttgctgctccacgccgccaggccggacatccagatgacccagagccccagcagcctgtctgccagcgtgggcgacagagtgaccatcacctgtagagccagccagggcatcagctcttggctggcctggtatcagcagaagcccgagaaggcccccaagagcctgatctacgccgcctctagtctccagagcggcgtgcccagcagattttctggcagcggctccggcaccgacttcaccctgacaatcagctccctccagcccgaggacttcgccacctactactgccagcagtacaacagctacccccccacctttggcggaggcaccaaggtggaaatcaagggcggaggcggaagtggaggcggaggatctggcggcggaggctctgaagtgcaactggtggaatcaggcggcggactggtgcagcctggcgagtctctgagactgagctgtgtggcctccggcttcaccttcagccggtacaagatgaactgggtgcgccaggcccctggcaagggactggaatgggtgtcctacatcagccgcagcggcagagacatctactacgccgacagcgtgaagggccggttcaccatcagcagagacaacgccaagaacagcctgtacctccagatgaactccctgcgggacgaggacaccgccgtgtactactgtgccggaaccgtgaccacctattactacttcggcatggacgtgtggggccacggcaccaccgtgacagtgtcatctacgcgtggaatgaggactgaggatcttcccaaagctgtcgtctttctcgaaccccaatggtatcgggtgctcgaaaaagactctgtgacactgaaatgccaaggggcctactctcccgaggacaactccacacagtggtttcataatgagtccctcatcagctctcaggccagctcttatttcattgatgccgctacagtggacgactccggcgagtatcggtgtcagaccaatctgtctacactgtctgaccccgtgcagcttgaggtccacattggatggttgctcttgcaagccccacgctgggttttcaaagaggaagatccaatccatctgcggtgccacagctggaaaaacaccgctctccacaaagtcacatacctgcaaaatggcaaaggacgcaaatacttccatcacaattccgatttttacattccgaaggctaccctgaaagacagcggcagctatttctgccggggactcgtcggctccaagaatgtgtcctccgaaaccgtgaatatcacgattacccaaggactggctgtgcctacaatctctagcttctttccgcctggataccaagtctccttctgtcttgtgatggtcctcctgtttgctgtggacacaggactgtacttttccgtg

SEQ ID NO: 1445 - DNA, 1434 bp, synthetic construct
  source 1..1434: mol_type = other DNA
atggccttaccagtgaccgccttgctcctgccgctggccttgctgctccacgccgccaggccgcagtctgtggtcacacagccacctagcatgtctgccgctccaggccagcaagtgaccatctcttgtagcggcggcaacagcaacatcgagcggaactacgtgtcctggtatctgcaactgcctggcacagcccctaagctggtcatcttcgacaacgacagacggcccagcggcatccccgatagattttctggcagcaagagcggcaccagcgccacactgggaattaccggacttcagacaggcgacgaggccgactactactgtggcacatgggactctagcctgagaggctgggttttcggcggaggcacaaagctgacagtgcttggtggcggaggcggaagtggaggcggaggatctggcggcggaggctctgaagtgcagctcgttgagtctggcggcggactgattcaacctggcggaagcctgagactgagctgtgccgcttccggcttcaccttcagcaactacgccatgaactgggttcgacaggcccctggcaaaggactggaatgggtgtccaccatcaacggcagaggcagcagcaccatctacgccgattctgtgaagggcagattcaccatcagccgggacaacagcaagaacaccctgtacctccagatgaactccctgagagccgaggacaccgccacctattactgtgcccggtacatcagcagaggactgggcgattcttggggccagggcacactggttacagtgacgcgtggaatgaggactgaggatcttcccaaagctgtcgtctttctcgaaccccaatggtatcgggtgctcgaaaaagactctgtgacactgaaatgccaaggggcctactctcccgaggacaactccacacagtggtttcataatgagtccctcatcagctctcaggccagctcttatttcattgatgccgctacagtggacgactccggcgagtatcggtgtcagaccaatctgtctacactgtctgaccccgtgcagcttgaggtccacattggatggttgctcttgcaagccccacgctgggttttcaaagaggaagatccaatccatctgcggtgccacagctggaaaaacaccgctctccacaaagtcacatacctgcaaaatggcaaaggacgcaaatacttccatcacaattccgatttttacattccgaaggctaccctgaaagacagcggcagctatttctgccggggactcgtcggctccaagaatgtgtcctccgaaaccgtgaatatcacgattacccaaggactggctgtgcctacaatctctagcttctttccgcctggataccaagtctccttctgtcttgtgatggtcctcctgtttgctgtggacacaggactgtacttttccgtg

SEQ ID NO: 1446 - DNA, 1437 bp, synthetic construct
  source 1..1437: mol_type = other DNA
atggccttaccagtgaccgccttgctcctgccgctggccttgctgctccacgccgccaggccgcagtctgtgctgacacagcctccatctgcctctggcacacctggacagagagtgaccatcagctgtagcggcagcagaagcaacgtcggcggcaactacgtgttctggtatcagcaggtcccaggcgctacccctaagctgctgatctacagaagcaatcagcggcctagcggcgtgcccgatagatttgccggaagcaagagcggcagctctgccagccttgccatctctggactgagaagcgaggacgaggccgactactactgtgccacctgggatgatagcctgagcggcttcgtgtttggcaccggcaccaaagtgacagtgcttggtggcggaggcggaagtggaggcggaggatctggcggcggaggctctgaagttcagctggttgaatctggcggcggactggttaagcctggcggatctctgagactgtcttgtgccgccagcggcttcaccttcagcgattactacatgagctggatcagacaggcccctggcaaaggactggaatgggtgtcctacatcagcagcagcggctccaccatctactacgccgatagcgtgaagggcagattcaccatcagccgggacaacgccaagaacagcctgtacctccagatgaactccctgagagccgaggacaccgccgtgtactattgcgccagaggctacggcaaagcctacgatcaatggggccagggcacactggtcaccgtttcttctacgcgtggaatgaggactgaggatcttcccaaagctgtcgtctttctcgaaccccaatggtatcgggtgctcgaaaaagactctgtgacactgaaatgccaaggggcctactctcccgaggacaactccacacagtggtttcataatgagtccctcatcagctctcaggccagctcttatttcattgatgccgctacagtggacgactccggcgagtatcggtgtcagaccaatctgtctacactgtctgaccccgtgcagcttgaggtccacattggatggttgctcttgcaagccccacgctgggttttcaaagaggaagatccaatccatctgcggtgccacagctggaaaaacaccgctctccacaaagtcacatacctgcaaaatggcaaaggacgcaaatacttccatcacaattccgatttttacattccgaaggctaccctgaaagacagcggcagctatttctgccggggactcgtcggctccaagaatgtgtcctccgaaaccgtgaatatcacgattacccaaggactggctgtgcctacaatctctagcttctttccgcctggataccaagtctccttctgtcttgtgatggtcctcctgtttgctgtggacacaggactgtacttttccgtg

SEQ ID NO: 1447 - DNA, 1434 bp, synthetic construct
  source 1..1434: mol_type = other DNA
atggccttaccagtgaccgccttgctcctgccgctggccttgctgctccacgccgccaggccggacatccagatgacccagagccccagcagcctgtctgccagcgtgggcgacagagtgaccatcacctgtagagccagccaggacgtgaacaccgccgtggcctggtatcagcagaagcctggcaaggcccccaagctgctgatctacagcgccagcttcctggaaagcggcgtgcccagcagattcagcggaagcagaagcggcaccgacttcaccctgaccatcagctccctccagcccgaggacttcgccacctactactgccagcagcactacaccacccctcccaccttcggccagaccaaggtggaaatcaagagaggcggaggcggaagtggaggcggaggatctggcggcggaggctctgaagtgcaactggtggaatctggcggcggactggtgcagcctggcggatctctgagactgagctgtgccgccagcggcttcaacatcaaggacacctacatccactgggtgcgccaggcccctggaaagggactggaatgggtggcccggatctaccccaccaacggctacaccagatacgccgacagcgtgaagggccggttcaccatcagcgccgacaccagcaagaataccgcctacctccagatgaacagcctgcgggccgaggataccgccgtgtactactgctcaagatggggaggcgacggcttctacgctatggacgtgtggggccagggcacccttgtgaccgtgtcatctacgcgtggaatgaggactgaggatcttcccaaagctgtcgtctttctcgaaccccaatggtatcgggtgctcgaaaaagactctgtgacactgaaatgccaaggggcctactctcccgaggacaactccacacagtggtttcataatgagtccctcatcagctctcaggccagctcttatttcattgatgccgctacagtggacgactccggcgagtatcggtgtcagaccaatctgtctacactgtctgaccccgtgcagcttgaggtccacattggatggttgctcttgcaagccccacgctgggttttcaaagaggaagatccaatccatctgcggtgccacagctggaaaaacaccgctctccacaaagtcacatacctgcaaaatggcaaaggacgcaaatacttccatcacaattccgatttttacattccgaaggctaccctgaaagacagcggcagctatttctgccggggactcgtcggctccaagaatgtgtcctccgaaaccgtgaatatcacgattacccaaggactggctgtgcctacaatctctagcttctttccgcctggataccaagtctccttctgtcttgtgatggtcctcctgtttgctgtggacacaggactgtacttttccgtg

SEQ ID NO: 1448 - DNA, 1473 bp, synthetic construct
  source 1..1473: mol_type = other DNA
atggccttaccagtgaccgccttgctcctgccgctggccttgctgctccacgccgccaggccgcagtctgccctgacacagcctcctagcgcctctggctctcccggccagagcatcaccatcagctgtaccggcaccagcaacaacttcgtgtcctggtatcagcagcacgccggcaaggcccccaagctcgtgatctacgacgtgaacaagcggcccagcggcgtgcccgatagattcagcggcagcaagagcggcaacaccgccagcctgacagtgtctggcctccagaccgatgacgaggccgtgtactactgcggcagcctcgtgggcaactgggacgtgatctttggcggaggcaccaagctgaccgtgctgggcggaggcggaagtggaggcggaggatctggcggcggaggctctcagccccagctccaggaatctggccccacactggtggaagccagcgagacactgagcctgacctgtgccgtgtccggcgattctaccgccgcctgcaatagcttctggggctgggtgcgccagcctcctggaaagggactggaatgggtgggaagcctgagccactgcgccagctattggaaccggggctggacctaccacaaccccagcctgaagtccagactgaccctggccctggacacccccaagaacctggtgttcctgaagctgaacagcgtgacagccgccgacaccgccacctactactgtgccagatttggcggcgaggtgctgcggtacaccgactggcctaaacctgcctgggtggacctgtggggcagaggaacactcgtgaccgtgtccagcacgcgtggaatgaggactgaggatcttcccaaagctgtcgtctttctcgaaccccaatggtatcgggtgctcgaaaaagactctgtgacactgaaatgccaaggggcctactctcccgaggacaactccacacagtggtttcataatgagtccctcatcagctctcaggccagctcttatttcattgatgccgctacagtggacgactccggcgagtatcggtgtcagaccaatctgtctacactgtctgaccccgtgcagcttgaggtccacattggatggttgctcttgcaagccccacgctgggttttcaaagaggaagatccaatccatctgcggtgccacagctggaaaaacaccgctctccacaaagtcacatacctgcaaaatggcaaaggacgcaaatacttccatcacaattccgatttttacattccgaaggctaccctgaaagacagcggcagctatttctgccggggactcgtcggctccaagaatgtgtcctccgaaaccgtgaatatcacgattacccaaggactggctgtgcctacaatctctagcttctttccgcctggataccaagtctccttctgtcttgtgatggtcctcctgtttgctgtggacacaggactgtacttttccgtg

SEQ ID NO: 1449 - DNA, 1458 bp, synthetic construct
  source 1..1458: mol_type = other DNA
atggccttaccagtgaccgccttgctcctgccgctggccttgctgctccacgccgccaggccggagctggtgctgacacagagccctggcaccctgtctctgtctgccggcgaaagagccaccctgagctgtagagccagccagagcgtgtcctctggcagcctggcttggtatcagcagaagccaggccaggcccccagactgctgatctacggcgcttctaccagagccaccggcatccccgatagattcagcggctctggctccggcaccgacttcaccctgacaatcggcagactggaacccgaggacctggccgtgtactactgccagcagtacggcaccagcccctacacattcggccagggcaccaagctggaaatcggcggaggcggaagtggaggcggaggatctggcggcggaggctctctggaacagagcggagccgaagtgaagaaacccggcagcagcgtgcaggtgtcctgcaaagcaagcggcggcaccttctctatgtacggcttcaactgggtgcgccaggctcctggacacggcctggaatggatgggcggcatcatccccatcttcggcacctccaactacgcccagaaattccggggcagagtgaccttcaccgccgaccaggccacaagcaccgcctacatggaactgaccaacctgcggagcgacgacaccgccgtgtattattgcgccagagacttcggccccgactgggaggatggcgacagctacgatggcagcggcagaggcttcttcgacttctggggccagggaacccttgtgaccgtgtcctcaacgcgtggaatgaggactgaggatcttcccaaagctgtcgtctttctcgaaccccaatggtatcgggtgctcgaaaaagactctgtgacactgaaatgccaaggggcctactctcccgaggacaactccacacagtggtttcataatgagtccctcatcagctctcaggccagctcttatttcattgatgccgctacagtggacgactccggcgagtatcggtgtcagaccaatctgtctacactgtctgaccccgtgcagcttgaggtccacattggatggttgctcttgcaagccccacgctgggttttcaaagaggaagatccaatccatctgcggtgccacagctggaaaaacaccgctctccacaaagtcacatacctgcaaaatggcaaaggacgcaaatacttccatcacaattccgatttttacattccgaaggctaccctgaaagacagcggcagctatttctgccggggactcgtcggctccaagaatgtgtcctccgaaaccgtgaatatcacgattacccaaggactggctgtgcctacaatctctagcttctttccgcctggataccaagtctccttctgtcttgtgatggtcctcctgtttgctgtggacacaggactgtacttttccgtg

SEQ ID NO: 1450 - DNA, 1398 bp, synthetic construct
  source 1..1398: mol_type = other DNA
atggccttaccagtgaccgccttgctcctgccgctggccttgctgctccacgccgccaggccggacatccagatgacccagagccccagcagcctgtctgccagcgtgggcgacagagtgaccatcacctgtcaggccagccaggacatcaacaactacctgaactggtatcagcagaagcccggcaaggcccccaagctgctgatctacgacgccagcaatctgcagaccggcgtgcccagcagattttccggctctggcagcggcaccgacttcaccttcaccatcgaggacattgccacctactactgccagcagtacaccttcggccctggcaccaaggtggacatcaaaggcggaggcggaagtggaggcggaggatctggcggcggaggctctgaagtgcaactgctggaatctggcggcggactggtgcagcctggcggatctctgagactgagctgtgccgccagcggcttcacctttagctggtacagcatgacctgggtgcgccaggcccctggcaaaggactggaatgggtgtccagcatcgtgccctggggcgatttcacccagtacgccgatagcgtgaagggccggttcaccatcagccgggacaacagcaagaacaccctgtacctgcagatgaacagcctgcgggccgaggacaccgccgtgtactattgtgccaagggacctggctggggcagcttcgatctgtggggcagaggaacccttgtgaccgtgtccagcacgcgtggaatgaggactgaggatcttcccaaagctgtcgtctttctcgaaccccaatggtatcgggtgctcgaaaaagactctgtgacactgaaatgccaaggggcctactctcccgaggacaactccacacagtggtttcataatgagtccctcatcagctctcaggccagctcttatttcattgatgccgctacagtggacgactccggcgagtatcggtgtcagaccaatctgtctacactgtctgaccccgtgcagcttgaggtccacattggatggttgctcttgcaagccccacgctgggttttcaaagaggaagatccaatccatctgcggtgccacagctggaaaaacaccgctctccacaaagtcacatacctgcaaaatggcaaaggacgcaaatacttccatcacaattccgatttttacattccgaaggctaccctgaaagacagcggcagctatttctgccggggactcgtcggctccaagaatgtgtcctccgaaaccgtgaatatcacgattacccaaggactggctgtgcctacaatctctagcttctttccgcctggataccaagtctccttctgtcttgtgatggtcctcctgtttgctgtggacacaggactgtacttttccgtg

SEQ ID NO: 1451 - DNA, 1428 bp, synthetic construct
  source 1..1428: mol_type = other DNA
atggccttaccagtgaccgccttgctcctgccgctggccttgctgctccacgccgccaggccggacatccagatgacccagagccccagcagcctgtctgccagcgtgggcgacagagtgaccatcacctgtaccgccagcctgagcgtgtccagcacctacctgcactggtatcagcagaagcccggcagcagccccaagctgtggatctacagcaccagcaacctggcctccggcgtgcccagcagattttctggcagcggctctggcaccagctacaccctgaccatcagctccctccagcccgaggacttcgccacctactactgccaccagtaccacagaagccccctgacctttggcggaggcaccaaggtggaaatcaagagaggcggaggcggaagtggaggcggaggatctggcggcggaggctctgaagtgcaactggtggaatctggcggcggactggtgcagcctggcggatctctgagactgagctgtgccgccagcggcttcagcctgaccaaatacggcgtgcactgggtgcgccaggcccctggaaaaggactggaatgggtgggagtgaagtgggctggcggctccaccgactacaacagcgccctgatgagccggttcaccatcagcaaggacaacgccaagaacagcctgtacctccagatgaactccctgcgggccgaggacaccgccgtgtactactgtgccagagatcaccgggacgctatggactactggggccagggaacactcgtgaccgtgtcctctacgcgtggaatgaggactgaggatcttcccaaagctgtcgtctttctcgaaccccaatggtatcgggtgctcgaaaaagactctgtgacactgaaatgccaaggggcctactctcccgaggacaactccacacagtggtttcataatgagtccctcatcagctctcaggccagctcttatttcattgatgccgctacagtggacgactccggcgagtatcggtgtcagaccaatctgtctacactgtctgaccccgtgcagcttgaggtccacattggatggttgctcttgcaagccccacgctgggttttcaaagaggaagatccaatccatctgcggtgccacagctggaaaaacaccgctctccacaaagtcacatacctgcaaaatggcaaaggacgcaaatacttccatcacaattccgatttttacattccgaaggctaccctgaaagacagcggcagctatttctgccggggactcgtcggctccaagaatgtgtcctccgaaaccgtgaatatcacgattacccaaggactggctgtgcctacaatctctagcttctttccgcctggataccaagtctccttctgtcttgtgatggtcctcctgtttgctgtggacacaggactgtacttttccgtg

SEQ ID NO: 1452 - DNA, 1440 bp, synthetic construct
  source 1..1440: mol_type = other DNA
atggccttaccagtgaccgccttgctcctgccgctggccttgctgctccacgccgccaggccggacatccagatgacccagagccccagcagcctgtctgccagcgtgggcgacagagtgaccatcacatgcaaggccagccaggacgtgggaacagccgtggcctggtatcagcagaagcctggcaaggcccccaagctgctgatctacagcgccagctacagatccaccggcgtgcccagcagattttccggctctggcagcggcaccgacttcaccctgaccatctctagcctccagcccgaggacttcgccacctactactgccagcaccactactccgccccctggacatttggcggaggcaccaaggtggaaatcaagggcggaggcggaagtggaggcggaggatctggcggcggaggctctgaagtgcaactggtggaatcaggcggcggactggtgcagcctggcggatctctgagactgagctgtgccgccagcggcttcaccttcagcagaaacggcatgagctgggtgcgccaggcccctggaaaaggactggaatgggtggcaaccgtgtccagcggcggcagctacatctactacgccgacagcgtgaagggccggttcaccatctccagagacaacgccaagaacagcctgtacctccagatgaactccctgcgggccgaggacaccgccgtgtactattgtgccagacagggcaccaccgccctggctaccagattcttcgatgtgtggggccagggcaccctcgtgaccgtgtcatctacgcgtggaatgaggactgaggatcttcccaaagctgtcgtctttctcgaaccccaatggtatcgggtgctcgaaaaagactctgtgacactgaaatgccaaggggcctactctcccgaggacaactccacacagtggtttcataatgagtccctcatcagctctcaggccagctcttatttcattgatgccgctacagtggacgactccggcgagtatcggtgtcagaccaatctgtctacactgtctgaccccgtgcagcttgaggtccacattggatggttgctcttgcaagccccacgctgggttttcaaagaggaagatccaatccatctgcggtgccacagctggaaaaacaccgctctccacaaagtcacatacctgcaaaatggcaaaggacgcaaatacttccatcacaattccgatttttacattccgaaggctaccctgaaagacagcggcagctatttctgccggggactcgtcggctccaagaatgtgtcctccgaaaccgtgaatatcacgattacccaaggactggctgtgcctacaatctctagcttctttccgcctggataccaagtctccttctgtcttgtgatggtcctcctgtttgctgtggacacaggactgtacttttccgtg

SEQ ID NO: 1453 - DNA, 1428 bp, synthetic construct
  source 1..1428: mol_type = other DNA
atggccttaccagtgaccgccttgctcctgccgctggccttgctgctccacgccgccaggccggacatccagatgacccagagcttcagcagcctgagcgccagcgtgggcgacagagtgaccatcacctgtagagccagccaggacatcagcaactacctgaactggtatcagcagaagcccggcaaggcccccaagctgctgatctactacaccagcagactgcacagcggcgtgcccagcagattttctggcagcggctccggcaccgactacaccctgacaatcagctccctgcagcccgaggacttcgctacctacttctgtcagcaaggcaacaccctgccctggacctttggcggaggcaccaagctggaaatcaagagaggcggaggcggaagtggaggcggaggatctggcggcggaggctctgaagtgcaactggtgcagtccggcggagggctggtgcagagcggaggatctctgagactgagctgcagagccagcggctacaccttcacccggtactggatgctgtgggtgcgccagaggccaggcaagggactggaatgggtggccgagatcaacccccggaacgaccggaccaactacaacgagaagttcaagacccggttcaccatcagcgtggacagaagcaagaacaccctgtacctgcagatggacagcctgcgggccgaggataccgccgtgtacttttgtgctctgggaggcggctacgctatggactactggggccagggaacccttgtgaccgtgtcctctacgcgtggaatgaggactgaggatcttcccaaagctgtcgtctttctcgaaccccaatggtatcgggtgctcgaaaaagactctgtgacactgaaatgccaaggggcctactctcccgaggacaactccacacagtggtttcataatgagtccctcatcagctctcaggccagctcttatttcattgatgccgctacagtggacgactccggcgagtatcggtgtcagaccaatctgtctacactgtctgaccccgtgcagcttgaggtccacattggatggttgctcttgcaagccccacgctgggttttcaaagaggaagatccaatccatctgcggtgccacagctggaaaaacaccgctctccacaaagtcacatacctgcaaaatggcaaaggacgcaaatacttccatcacaattccgatttttacattccgaaggctaccctgaaagacagcggcagctatttctgccggggactcgtcggctccaagaatgtgtcctccgaaaccgtgaatatcacgattacccaaggactggctgtgcctacaatctctagcttctttccgcctggataccaagtctccttctgtcttgtgatggtcctcctgtttgctgtggacacaggactgtacttttccgtg

SEQ ID NO: 1454 - DNA, 1428 bp, synthetic construct
  source 1..1428: mol_type = other DNA
atggccttaccagtgaccgccttgctcctgccgctggccttgctgctccacgccgccaggccggacatccagatgacccagagcccccctagcctgtctgcctctgtgggcggcaaagtgaccatcacatgcaaggccagccaggacatcgaccgctacatggcctggtatcaggacaagcccggcaagggacccaagctgctgatccacgataccagcaccctccagcccggcatccccagcagattttctggcagcggctccggcagagactacagcttcagcatcagcaacctggaacccgaggacattgccacctactactgcctccagtacgacaacctgtggaccttcggcggaggcaccaagctggaaatcaagagaggcggaggcggaagtggaggcggaggatctggcggcggaggctctcaggtgcaactggtgcagagcggagccgagcttgtgaagcctggcgcttccgtgaagatgagctgcaaagccagcggctacatcttcaccaactacaacatccactgggtcaagaagtccccaggccagggcctggaatggatcggagccatctaccccggaaacggcgacgccccttacagccagaagttccaggacagagccaccctgaccgccgacaccagcagcagcaccacctacatggaactgagcagcctgaccagcgaggacagcgccgtgtactattgcgtgcgggccaactgggatgtggccttcgcctattggggccagggcacactggtgtccgtgtcctctacgcgtggaatgaggactgaggatcttcccaaagctgtcgtctttctcgaaccccaatggtatcgggtgctcgaaaaagactctgtgacactgaaatgccaaggggcctactctcccgaggacaactccacacagtggtttcataatgagtccctcatcagctctcaggccagctcttatttcattgatgccgctacagtggacgactccggcgagtatcggtgtcagaccaatctgtctacactgtctgaccccgtgcagcttgaggtccacattggatggttgctcttgcaagccccacgctgggttttcaaagaggaagatccaatccatctgcggtgccacagctggaaaaacaccgctctccacaaagtcacatacctgcaaaatggcaaaggacgcaaatacttccatcacaattccgatttttacattccgaaggctaccctgaaagacagcggcagctatttctgccggggactcgtcggctccaagaatgtgtcctccgaaaccgtgaatatcacgattacccaaggactggctgtgcctacaatctctagcttctttccgcctggataccaagtctccttctgtcttgtgatggtcctcctgtttgctgtggacacaggactgtacttttccgtg

SEQ ID NO: 1455 - DNA, 1431 bp, synthetic construct
  source 1..1431: mol_type = other DNA
atggccttaccagtgaccgccttgctcctgccgctggccttgctgctccacgccgccaggccggacatccagatgacccagagccctgccagcctgtctgcctctgtgggcgagacagtgaccatcacctgtcgggtgtccggcaacatccacaactacctggcctggtatcagcagaagcagggcaagagcccccaactgctggtgtacaacgccaagaccctggccgatggcgtgcccagcagattttctggctctggcagcggcacccagtacagcctgaagatcaacagcctccagcccgaggacttcggcagctactactgccagcacttctggtccaacccctacaccttcggcggaggcaccaagctggaaatcaagggcggaggcggaagtggaggcggaggatctggcggcggaggctctcaggtgcaactccagcagtctggcgcttccgtgaaggtgtcctgcaaggccagcgaactcgtgcggcctggcacaggctacgccttcaccaattacctgatcgagtgggtcaagcagaggcccggacagggcctggaatggatcggagtgattaacccaggcagcggcggcaccaactacaacgagaagttcaagggcaaggccaccctgaccgccgacaagagcagcagcacagcctacatgcaactgagcagcctgaccagcgacgacagcgccgtgtacttctgcgcccggtacagaagctacgactggtacttcgacgtgtggggagccggcaccaccgtgacagtgtcatctacgcgtggaatgaggactgaggatcttcccaaagctgtcgtctttctcgaaccccaatggtatcgggtgctcgaaaaagactctgtgacactgaaatgccaaggggcctactctcccgaggacaactccacacagtggtttcataatgagtccctcatcagctctcaggccagctcttatttcattgatgccgctacagtggacgactccggcgagtatcggtgtcagaccaatctgtctacactgtctgaccccgtgcagcttgaggtccacattggatggttgctcttgcaagccccacgctgggttttcaaagaggaagatccaatccatctgcggtgccacagctggaaaaacaccgctctccacaaagtcacatacctgcaaaatggcaaaggacgcaaatacttccatcacaattccgatttttacattccgaaggctaccctgaaagacagcggcagctatttctgccggggactcgtcggctccaagaatgtgtcctccgaaaccgtgaatatcacgattacccaaggactggctgtgcctacaatctctagcttctttccgcctggataccaagtctccttctgtcttgtgatggtcctcctgtttgctgtggacacaggactgtacttttccgtg

SEQ ID NO: 1456 - DNA, 1431 bp, synthetic construct
  source 1..1431: mol_type = other DNA
atggccttaccagtgaccgccttgctcctgccgctggccttgctgctccacgccgccaggccggacatccagatgacacagtctccggcgtcactgtccgcctccgtgggggagactgtgactattatttgtagggcatcagttaacatctactcttatttggcctggtaccagcagaagcaaggcaagagtcctcagctgctggtgtataatgcgaagatcctggcagagggcgtgccgagccggttctccggcagcggctcaggtacccaattttccctcaagatcaattcactgcagccagaggactttggcagttactattgtcaacaccactacggcacattcactttcgggtccggtacaaaattggagattaagcgaggcggaggcggaagtggaggcggaggatctggcggcggaggctctcaggtacagttgaaagaaagcgggcctggactggtagcgccttcccaatctctctccatcacgtgcaccatctctggcttctccctgacttcctatggagttcactgggtgaggcagccccccggcaagggactggaatggctggtcgtcatctggtccgacgggtccacaacctacaactccgctctgaaaagtcggctctctatttctaaagataatagcaagagccaggtgtttctgaaaatgaactctctgcagaccgatgatacggccatttactactgcgcttcacactatggctcaaccttggcattcgcttcctggggccacggaacactggtgaccgtttccgcagccacgcgtggaatgaggactgaggatcttcccaaagctgtcgtctttctcgaaccccaatggtatcgggtgctcgaaaaagactctgtgacactgaaatgccaaggggcctactctcccgaggacaactccacacagtggtttcataatgagtccctcatcagctctcaggccagctcttatttcattgatgccgctacagtggacgactccggcgagtatcggtgtcagaccaatctgtctacactgtctgaccccgtgcagcttgaggtccacattggatggttgctcttgcaagccccacgctgggttttcaaagaggaagatccaatccatctgcggtgccacagctggaaaaacaccgctctccacaaagtcacatacctgcaaaatggcaaaggacgcaaatacttccatcacaattccgatttttacattccgaaggctaccctgaaagacagcggcagctatttctgccggggactcgtcggctccaagaatgtgtcctccgaaaccgtgaatatcacgattacccaaggactggctgtgcctacaatctctagcttctttccgcctggataccaagtctccttctgtcttgtgatggtcctcctgtttgctgtggacacaggactgtacttttccgtg

SEQ ID NO: 1457 - DNA, 1455 bp, synthetic construct
  source 1..1455: mol_type = other DNA
atggccttaccagtgaccgccttgctcctgccgctggccttgctgctccacgccgccaggccggacattgtgatgacccagtctcacaaattcatgtccacatcagtaggagacagggtcagcgtcacctgcaaggccagtcagaatgtgggtaataatgtagcctggtatcaacagaaaccagggcaatctcctaaagtactgatttactcggcatcctaccggtacagtggagtccctgatcgcttcacaggcagtggatctgggacagatttcactctcaccatcagtaatgtgcagtctgaagacttggcagagtatttctgtcagcaatataacacctatccattcacgttcggctcggggacaaagttggaaataaaaggcggaggcggaagtggaggcggaggatctggcggcggaggctctgaggtacagctggaggaaagcggtggaggactggtgcaacctggagggtctatgaagctctcttgcgtagcttctgggttcacgttctccaattactggatgaactgggtgcggcagtcccccgagaaaggcctggaatgggtagcagaaattcggttcaagtcccataactatgctacacactttgccgagtctgtcaaaggccggttcactattagtcgagacgacagcaagtcttcagtctacctgcagatgaataacttgcgggcagaggacacaggtatctactactgcaccaggagaatcggcaactccgactatgactggtggtactttgacgtctggggagcaggcaccagcgtgacggtgagttcagcctcaacgcgtggaatgaggactgaggatcttcccaaagctgtcgtctttctcgaaccccaatggtatcgggtgctcgaaaaagactctgtgacactgaaatgccaaggggcctactctcccgaggacaactccacacagtggtttcataatgagtccctcatcagctctcaggccagctcttatttcattgatgccgctacagtggacgactccggcgagtatcggtgtcagaccaatctgtctacactgtctgaccccgtgcagcttgaggtccacattggatggttgctcttgcaagccccacgctgggttttcaaagaggaagatccaatccatctgcggtgccacagctggaaaaacaccgctctccacaaagtcacatacctgcaaaatggcaaaggacgcaaatacttccatcacaattccgatttttacattccgaaggctaccctgaaagacagcggcagctatttctgccggggactcgtcggctccaagaatgtgtcctccgaaaccgtgaatatcacgattacccaaggactggctgtgcctacaatctctagcttctttccgcctggataccaagtctccttctgtcttgtgatggtcctcctgtttgctgtggacacaggactgtacttttccgtg

SEQ ID NO: 1458 - DNA, 1431 bp, synthetic construct
  source 1..1431: mol_type = other DNA
atggccttaccagtgaccgccttgctcctgccgctggccttgctgctccacgccgccaggccggacatccagatgacccagagcagcagcagcttcagcgtgtccctgggcgacagagtgaccatcacatgcaaggccagcgaggacatctacatccggctggcctggtatcagcagaagcccggcaacgcccccagactgctgattagcgccgccacctctctggaaaccggcatccccagcagattctccggctctggcagcggcgaggactacaccctgacaatcaccagcctccagaccgaggacgtggcaacctactactgccagcagtattggaccaccccctggacctttggcggaggcaccaagctggaaatcaagagaggcggaggcggaagtggaggcggaggatctggcggcggaggctctgatgtgcagctccaggaatctggccccggactcgtgaagcctagccagagcctgagcctgacatgcaccgtgaccggctacagcatcaccatcgactacacctggaactggatcagacagttccccggcaacaaactggaatggatgggctacatcacctacagcggcagcaccgactacaaccccagcctgaagtccagaagctccatcaccagagacacctctatgaaccagttcttcttgcagctgaacagcgtgaccaccgaggacaccgccacctactattgcgccagactgggcagaagatacgccctggactattggggccagggcaccagcgtgacagtgtcctctacgcgtggaatgaggactgaggatcttcccaaagctgtcgtctttctcgaaccccaatggtatcgggtgctcgaaaaagactctgtgacactgaaatgccaaggggcctactctcccgaggacaactccacacagtggtttcataatgagtccctcatcagctctcaggccagctcttatttcattgatgccgctacagtggacgactccggcgagtatcggtgtcagaccaatctgtctacactgtctgaccccgtgcagcttgaggtccacattggatggttgctcttgcaagccccacgctgggttttcaaagaggaagatccaatccatctgcggtgccacagctggaaaaacaccgctctccacaaagtcacatacctgcaaaatggcaaaggacgcaaatacttccatcacaattccgatttttacattccgaaggctaccctgaaagacagcggcagctatttctgccggggactcgtcggctccaagaatgtgtcctccgaaaccgtgaatatcacgattacccaaggactggctgtgcctacaatctctagcttctttccgcctggataccaagtctccttctgtcttgtgatggtcctcctgtttgctgtggacacaggactgtacttttccgtg

SEQ ID NO: 1459 - DNA, 1428 bp, synthetic construct
  source 1..1428: mol_type = other DNA
atggccttaccagtgaccgccttgctcctgccgctggccttgctgctccacgccgccaggccggatgtgcagctccaggaaagcggccctggcctcgtgaagcctagccagagcctgagcctgacatgcaccgtgaccggctacagcatcaccagcgactacacctggaactggatcagacagttccccggcaacaagctggaatggatgggctacatcacctacagcggcagcaccagctacaaccccagcctgaagtcccggaactccatcaccagagacaccagcaagaaccagttcttcttgcagctgaacagcgtgaccaccgaggacaccgccacctactactgcgccagactgggcagacggtacaccatggactattggggccagggcacctccgtgaccgtgtctagcggaggcggaggaagtggcggcggaggatctgggggaggcggaagcgatatccagatgacccagtccagcagcagcttcagcgtgtccctgggcgacagagtgaccatcacctgtatggcctccgaggacatctacatccggctggcctggtatcagcagaagcccggcaacgcccccagactgctgattagcgccgccacctctctggaaaccggcgtgccaagcagattcagcggctctggcagcggcaaggactacaccctgagcatcacctccttgcagaccgaggacgtgggcacctactattgccagcagtattggagcagcccctggacctttggcggaggcacaaagctggaaatcaacacgcgtggaatgaggactgaggatcttcccaaagctgtcgtctttctcgaaccccaatggtatcgggtgctcgaaaaagactctgtgacactgaaatgccaaggggcctactctcccgaggacaactccacacagtggtttcataatgagtccctcatcagctctcaggccagctcttatttcattgatgccgctacagtggacgactccggcgagtatcggtgtcagaccaatctgtctacactgtctgaccccgtgcagcttgaggtccacattggatggttgctcttgcaagccccacgctgggttttcaaagaggaagatccaatccatctgcggtgccacagctggaaaaacaccgctctccacaaagtcacatacctgcaaaatggcaaaggacgcaaatacttccatcacaattccgatttttacattccgaaggctaccctgaaagacagcggcagctatttctgccggggactcgtcggctccaagaatgtgtcctccgaaaccgtgaatatcacgattacccaaggactggctgtgcctacaatctctagcttctttccgcctggataccaagtctccttctgtcttgtgatggtcctcctgtttgctgtggacacaggactgtacttttccgtg

SEQ ID NO: 1460 - DNA, 1428 bp, synthetic construct
  source 1..1428: mol_type = other DNA
atggccttaccagtgaccgccttgctcctgccgctggccttgctgctccacgccgccaggccggacatccagatgacccagagcagcagcagcttcagcgtgagcctgggcgacagagtgaccatcacctgcatggccagcgaggacatctacatcagactggcctggtaccagcagaagcccggcaacgcccccagactgctgatcagcgccgccaccagcctggagaccggcgtgcccagcagattcagcggcagcggcagcggcaaggactacaccctgagcatcaccagcctgcagaccgaggacgtgggcacctactactgccagcagtactggagcagcccctggaccttcggcggcggcaccaagctggagatcaacggcggaggcggaagtggaggcggaggatctggcggcggaggctctgacgtgcagctgcaggagagcggccccggcctggtgaagcccagccagagcctgagcctgacctgcaccgtgaccggctacagcatcaccagcgactacacctggaactggatcagacagttccccggcaacaagctggagtggatgggctacatcacctacagcggcagcaccagctacaaccccagcctgaagagcagaaacagcatcaccagagacaccagcaagaaccagttcttcctgcagctgaacagcgtgaccaccgaggacaccgccacctactactgcgccagactgggcagaagatacacaatggactactggggccagggcaccagcgtgaccgtgagcagcacgcgtggaatgaggactgaggatcttcccaaagctgtcgtctttctcgaaccccaatggtatcgggtgctcgaaaaagactctgtgacactgaaatgccaaggggcctactctcccgaggacaactccacacagtggtttcataatgagtccctcatcagctctcaggccagctcttatttcattgatgccgctacagtggacgactccggcgagtatcggtgtcagaccaatctgtctacactgtctgaccccgtgcagcttgaggtccacattggatggttgctcttgcaagccccacgctgggttttcaaagaggaagatccaatccatctgcggtgccacagctggaaaaacaccgctctccacaaagtcacatacctgcaaaatggcaaaggacgcaaatacttccatcacaattccgatttttacattccgaaggctaccctgaaagacagcggcagctatttctgccggggactcgtcggctccaagaatgtgtcctccgaaaccgtgaatatcacgattacccaaggactggctgtgcctacaatctctagcttctttccgcctggataccaagtctccttctgtcttgtgatggtcctcctgtttgctgtggacacaggactgtacttttccgtg

SEQ ID NO: 1461 - DNA, 1434 bp, synthetic construct
  source 1..1434: mol_type = other DNA
atggccttaccagtgaccgccttgctcctgccgctggccttgctgctccacgccgccaggccggaccagatcgtgctgacccagtcccccgctattatgtccgcatcaccgggcgaaaaagtgacgatctcctgtagcgcttcatctagcgtctcctacatgtattggtatcaacagaaacctgggtctagcccaaagccgtggatctacagaaccagtaaccttgccagtggggtgccagcccgcttcagcggtagtggcagtggaacttcctatagcctcacaataagcaacatggaggctgaagatgccgctgcctattactgccagcagtaccacagttacccaaccacgttcggcgggggaactaagctcgaagtaaaaggcggaggcggaagtggaggcggaggatctggcggcggaggctctgaggtgcagctggtggaatctgggggcggcctggtccaacctaagggatcactcaagctctcttgtgcggccagcggattctctttcaatacctatgctatgaattgggtgagacaggcgcccggaaagggcctcgaatggatagcccatatccggtcaaaatcaaacaatttcgcaacctactatgcggactccgtgaaggaccgattttccatctcccgagatgcctccgagaatattctgttcctgcagatgaataacctcaagacagaggacaccgccatgtactactgtgtgcgccagggcggtgactttcccatggattactgggggcaggggaccagcgtgaccgtgagctctacgcgtggaatgaggactgaggatcttcccaaagctgtcgtctttctcgaaccccaatggtatcgggtgctcgaaaaagactctgtgacactgaaatgccaaggggcctactctcccgaggacaactccacacagtggtttcataatgagtccctcatcagctctcaggccagctcttatttcattgatgccgctacagtggacgactccggcgagtatcggtgtcagaccaatctgtctacactgtctgaccccgtgcagcttgaggtccacattggatggttgctcttgcaagccccacgctgggttttcaaagaggaagatccaatccatctgcggtgccacagctggaaaaacaccgctctccacaaagtcacatacctgcaaaatggcaaaggacgcaaatacttccatcacaattccgatttttacattccgaaggctaccctgaaagacagcggcagctatttctgccggggactcgtcggctccaagaatgtgtcctccgaaaccgtgaatatcacgattacccaaggactggctgtgcctacaatctctagcttctttccgcctggataccaagtctccttctgtcttgtgatggtcctcctgtttgctgtggacacaggactgtacttttccgtg

SEQ ID NO: 1462 - DNA, 1437 bp, synthetic construct
  source 1..1437: mol_type = other DNA
atggccttaccagtgaccgccttgctcctgccgctggccttgctgctccacgccgccaggccggacatccagatgacccagagccccagcagcctgtctgccagcgtgggcgacagagtgaccatcacctgtagagccagccagagcatcagcagctacctgaactggtatcagcagaagcccggcaaggcccccaaactgctgatctacgacgccagcaacctggaaaccggcgtgcccagcagattttccggcagcggctctggcaccgacttcaccttcaccatcagctccctccagcccgaggacattgccacctactactgccagcagtacgacaacctgcccctgacctttggcggaggcaccaaggtggacatcaagagaggcggaggcggaagtggaggcggaggatctggcggcggaggctctcaggtgcaactggtggaatctggcggcggagtggtgcagcctggcagaagcctgagactgagctgtgccgccagcggcttcacctttagcagctacgccatgcactgggtgcgccaggcccctggaaaaggcctggaatgggtggccgtgatctcctacgacggctccaacaagtattacgccgacagcgtgaagggccggttcaccatctccagagacaacagcaagaacaccctgtacctccagatgaacagcctgcgggccgaggacaccgccgtgtactattgtgccagggctcacaacagcagctcttggagcttcgactactggggccagggcaccctcgtgaccgtgtcatctacgcgtggaatgaggactgaggatcttcccaaagctgtcgtctttctcgaaccccaatggtatcgggtgctcgaaaaagactctgtgacactgaaatgccaaggggcctactctcccgaggacaactccacacagtggtttcataatgagtccctcatcagctctcaggccagctcttatttcattgatgccgctacagtggacgactccggcgagtatcggtgtcagaccaatctgtctacactgtctgaccccgtgcagcttgaggtccacattggatggttgctcttgcaagccccacgctgggttttcaaagaggaagatccaatccatctgcggtgccacagctggaaaaacaccgctctccacaaagtcacatacctgcaaaatggcaaaggacgcaaatacttccatcacaattccgatttttacattccgaaggctaccctgaaagacagcggcagctatttctgccggggactcgtcggctccaagaatgtgtcctccgaaaccgtgaatatcacgattacccaaggactggctgtgcctacaatctctagcttctttccgcctggataccaagtctccttctgtcttgtgatggtcctcctgtttgctgtggacacaggactgtacttttccgtg

SEQ ID NO: 1463 - DNA, 1464 bp, synthetic construct
  source 1..1464: mol_type = other DNA
atggccttaccagtgaccgccttgctcctgccgctggccttgctgctccacgccgccaggccggacgtcgtgatgacccagagccctctgagcctgcctgtgtccctgggcgatcaggccagcatctcctgcagatccagccagagactggtgcacagcaacggcaacacctacctgcactggtatctgcagaagcccggccagagccccaagctgctgatctaccgggtgtccaacagattccccggcgtgcccgatagattcagcggctctggcagcggcaccgacttcaccctgaagatcagccgggtggaagccgaggacctgggcatctatttctgcagccagagcacccacgtgccctacacctttggcggaggcaccaagctggaaatcaagcggggcggaggcggaagtggaggcggaggatctggcggcggaggctctgaagtgcggctgcagcagtctggccccgacctgattaagcctggggccagcgtgaagatgagctgcaaggccagcggctacaccttcaccggctacgtgatgcactgggtcaagcagaggccaggccagggcctggaatggatcggcttcatcaacccctacaacgacgacatccagagcaacgagcggttccggggcaaggccaccctgaccagcgataagagcagcaccaccgcctacatggaactgagcagcctgacctccgaggacagcgccgtgtactactgtgctaggggagccggctacaacttcgacggggcctacagattcttcgacttttggggccagggcaccacactgaccgtgtcctctacgcgtggaatgaggactgaggatcttcccaaagctgtcgtctttctcgaaccccaatggtatcgggtgctcgaaaaagactctgtgacactgaaatgccaaggggcctactctcccgaggacaactccacacagtggtttcataatgagtccctcatcagctctcaggccagctcttatttcattgatgccgctacagtggacgactccggcgagtatcggtgtcagaccaatctgtctacactgtctgaccccgtgcagcttgaggtccacattggatggttgctcttgcaagccccacgctgggttttcaaagaggaagatccaatccatctgcggtgccacagctggaaaaacaccgctctccacaaagtcacatacctgcaaaatggcaaaggacgcaaatacttccatcacaattccgatttttacattccgaaggctaccctgaaagacagcggcagctatttctgccggggactcgtcggctccaagaatgtgtcctccgaaaccgtgaatatcacgattacccaaggactggctgtgcctacaatctctagcttctttccgcctggataccaagtctccttctgtcttgtgatggtcctcctgtttgctgtggacacaggactgtacttttccgtg

SEQ ID NO: 1464 - DNA, 1437 bp, synthetic construct
  source 1..1437: mol_type = other DNA
atggccttaccagtgaccgccttgctcctgccgctggccttgctgctccacgccgccaggccgagctacgagctgacccagcctcctagcgtgtccgtgtctcctggacagaccgccaccatctcttgcagcggcgatcaactgggcgggaagtacggccactggtatcagaagaagcccggccagagccccgtgctggtgctgtaccaggacagaaaacggcctgccggcatccccgagagattcagcggaagcagcagcggcaacaccatcaccctgaccatcagcggcacccaggccgtggatgaggccgactactactgccaggcttgggacaccaatctgggcggcgtgttcggcggaggcaccaaagtgacagtgctgggacagggcggaggcggaagtggaggcggaggatctggcggcggaggctctcaggtgcaactggtggaaagcggagccgaagtgaagaaacctggggccagcgtgaaggtgtcctgcaaggccagcggctacacctttaccggctactacatgcactgggtgcgccaggctccaggccagggactggaatggatgggccggatcaaccccaatagcggcggcaccaactacgcccagaaattccagggcagagtgaccatgaccagagacaccagcatcagcaccgcctacatggaactgagccggctgagaagcgacgacaccgccgtgtactactgcgccagccctagaggcagaggcagcgccttcgatatttggggccagggcacactcgtgaccgtgtcctctacgcgtggaatgaggactgaggatcttcccaaagctgtcgtctttctcgaaccccaatggtatcgggtgctcgaaaaagactctgtgacactgaaatgccaaggggcctactctcccgaggacaactccacacagtggtttcataatgagtccctcatcagctctcaggccagctcttatttcattgatgccgctacagtggacgactccggcgagtatcggtgtcagaccaatctgtctacactgtctgaccccgtgcagcttgaggtccacattggatggttgctcttgcaagccccacgctgggttttcaaagaggaagatccaatccatctgcggtgccacagctggaaaaacaccgctctccacaaagtcacatacctgcaaaatggcaaaggacgcaaatacttccatcacaattccgatttttacattccgaaggctaccctgaaagacagcggcagctatttctgccggggactcgtcggctccaagaatgtgtcctccgaaaccgtgaatatcacgattacccaaggactggctgtgcctacaatctctagcttctttccgcctggataccaagtctccttctgtcttgtgatggtcctcctgtttgctgtggacacaggactgtacttttccgtg

SEQ ID NO: 1465 - DNA, 1446 bp, synthetic construct
  source 1..1446: mol_type = other DNA
atggccttaccagtgaccgccttgctcctgccgctggccttgctgctccacgccgccaggccgaacttcatgctgacccagccccacagcgtgtccgagagccctggcaagaccgtgaccatctcctgcaccagaagcagcggctctatcgccagcaaatacgtgcagtggtatcagcagaggcccggcagcagccctaccaccgtgatctacgaggacaaccagaggcctagcggcgtgcccgatagattcagcggcagcatcgacaccagcagcaacagcgccagcctgaccatcagcggcctgagaacagaggacgaggccgactactactgccacagctacgacagcaacaaccactccgtgttcggcggaggcaccaaagtgacagtgctgggacagggcggaggcggaagtggaggcggaggatctggcggcggaggctctgaagtgcaactggtggaaagcgggggaggcgtggtgcagccaggcggatctctgagactgagctgtgccgccagcggcttcaccttcagcagctacgccatgagctgggtgcgccaggcccctggaaaaggcctggaatgggtgtccgccatctctggctctggcggcagcacctactacgccgatagcgtgaagggccggttcagcatcagccgggacaacagcaagaacaccctgtacctccagatgaacagcctgcgggccgaggacaccgccgtgtactactgtgccagaaccagaagctccggggccttcgacatctggggccagggaacactcgtgaccgtgtcctctacgcgtggaatgaggactgaggatcttcccaaagctgtcgtctttctcgaaccccaatggtatcgggtgctcgaaaaagactctgtgacactgaaatgccaaggggcctactctcccgaggacaactccacacagtggtttcataatgagtccctcatcagctctcaggccagctcttatttcattgatgccgctacagtggacgactccggcgagtatcggtgtcagaccaatctgtctacactgtctgaccccgtgcagcttgaggtccacattggatggttgctcttgcaagccccacgctgggttttcaaagaggaagatccaatccatctgcggtgccacagctggaaaaacaccgctctccacaaagtcacatacctgcaaaatggcaaaggacgcaaatacttccatcacaattccgatttttacattccgaaggctaccctgaaagacagcggcagctatttctgccggggactcgtcggctccaagaatgtgtcctccgaaaccgtgaatatcacgattacccaaggactggctgtgcctacaatctctagcttctttccgcctggataccaagtctccttctgtcttgtgatggtcctcctgtttgctgtggacacaggactgtacttttccgtg

SEQ ID NO: 1466 - DNA, 1434 bp, synthetic construct
  source 1..1434: mol_type = other DNA
atggccttaccagtgaccgccttgctcctgccgctggccttgctgctccacgccgccaggccggacatccagatgaaccagagccccagcagcctgagcgccagcctgggcgataccatcaccatcacctgtcacgccagccagaacatcaacgtgtggctgagctggtatcagcagaagcccggcaacatccccaagctgctgatctacaaggccagcaacctgcacaccggcgtgcccagcagattttctggcagcggctctggcaccggcttcaccattaccatcagctccctccagcccgaggacattgccacctactactgccagcagggccagagctacccctggacatttggcggaggcaccaagctggaaatcaagagaggcggaggcggaagtggaggcggaggatctggcggcggaggctctgaagtgcaactccagcagagcggcccagagcttgtgaagcctggcgcttccgtgaagattagctgcaaagccagcggctacagcttcaccggctacttcatgaactgggtcaagcagagccacggcaagagcctggagtacatcggcagattcaacccctacaacggcgagacactgtacaaccagaagttcaagggcaaggccaccctgaccgtggacaagagcagcagcaccgtgcacatggaactgctgagcgtgaccagcgaggacagcgccgtgtactactgtggcagaagcggcaacgacgacgctatggactattggggccagggcaccagcgtgaccgtgtctagtgctacgcgtggaatgaggactgaggatcttcccaaagctgtcgtctttctcgaaccccaatggtatcgggtgctcgaaaaagactctgtgacactgaaatgccaaggggcctactctcccgaggacaactccacacagtggtttcataatgagtccctcatcagctctcaggccagctcttatttcattgatgccgctacagtggacgactccggcgagtatcggtgtcagaccaatctgtctacactgtctgaccccgtgcagcttgaggtccacattggatggttgctcttgcaagccccacgctgggttttcaaagaggaagatccaatccatctgcggtgccacagctggaaaaacaccgctctccacaaagtcacatacctgcaaaatggcaaaggacgcaaatacttccatcacaattccgatttttacattccgaaggctaccctgaaagacagcggcagctatttctgccggggactcgtcggctccaagaatgtgtcctccgaaaccgtgaatatcacgattacccaaggactggctgtgcctacaatctctagcttctttccgcctggataccaagtctccttctgtcttgtgatggtcctcctgtttgctgtggacacaggactgtacttttccgtg

SEQ ID NO: 1467 - DNA, 1425 bp, synthetic construct
  source 1..1425: mol_type = other DNA
atggccttaccagtgaccgccttgctcctgccgctggccttgctgctccacgccgccaggccggacatcctgctgacacagagccccgccatcctgtccgtgtctccaggcgagagagtgtcctttagctgccgggccagccagaacatcggcaccagcatccactggtatcagcagcggaccaacggcagccccagactgctgattaagtacgccagcgagtccgtgtccggcatccccagcagattttctggcagcggctccggcaccgacttcaccctgagcatcaacagcgtggaaagcgaggacattgccgactactactgccagcacaccaatagctggcccaccacctttggcggaggcaccaagctggaaatcaagagaggcggaggcggaagtggaggcggaggatctggcggcggaggctctcaggtgcaactccagcagtccgacgccgagcttgtgaagcctggcgcttccgtgaagattagctgcaaggccagcggctacaccttcaccgaccacgccattcactgggtcaagcagaagcccgagcagggcctggaatggatcggctacttcagccccggcaacggcgacatcaagtacaacgagaagttcaagggcaaggccaccctgaccgccgacaagagcagcagcacagcctacatgcaactgaacagcctgaccagcgaggactccgccgtgtacttctgcaagcggagctacggcaactacgactactggggccagggcaccacactgaccgtgtctagtacgcgtggaatgaggactgaggatcttcccaaagctgtcgtctttctcgaaccccaatggtatcgggtgctcgaaaaagactctgtgacactgaaatgccaaggggcctactctcccgaggacaactccacacagtggtttcataatgagtccctcatcagctctcaggccagctcttatttcattgatgccgctacagtggacgactccggcgagtatcggtgtcagaccaatctgtctacactgtctgaccccgtgcagcttgaggtccacattggatggttgctcttgcaagccccacgctgggttttcaaagaggaagatccaatccatctgcggtgccacagctggaaaaacaccgctctccacaaagtcacatacctgcaaaatggcaaaggacgcaaatacttccatcacaattccgatttttacattccgaaggctaccctgaaagacagcggcagctatttctgccggggactcgtcggctccaagaatgtgtcctccgaaaccgtgaatatcacgattacccaaggactggctgtgcctacaatctctagcttctttccgcctggataccaagtctccttctgtcttgtgatggtcctcctgtttgctgtggacacaggactgtacttttccgtg

SEQ ID NO: 1468 - DNA, 1440 bp, synthetic construct
  source 1..1440: mol_type = other DNA
atggccttaccagtgaccgccttgctcctgccgctggccttgctgctccacgccgccaggccggacatcgtgatgacccagagccccgatagcctggccgtgtctctgggagagagagccaccatcaactgcaagagcagccagagcctgctgaacagcggcgaccagaagaactacctgacctggtatcagcagaagcccggccagccccccaagctgctgatctactgggccagcaccagagaaagcggcgtgcccgatagattcagcggcagcggaagtggcaccgacttcaccctgaccatcagttctcttcaggccgaggacgtggccgtgtactactgccagaacgactacagctaccccctgaccttcggccagggcaccaaggtggaaatcaagggcggaggcggaagtggaggcggaggatctggcggcggaggctctcaggtgcagctggtgcagtctggggccgaagtgaagaaaaccggcagcagcgtgaaggtgtcctgcaaggccagcggctacacctttaccgaccacgccattcacgtgtggcggcaggctccaggacaggccctggaatggatgggccacttcagccccggcaacaccgacatcaagtacaacgacaagttcaagggcagagtgaccctgaccgtggaccgcagcatgagcaccgcctacatggaactgagcagcctgcggagcgaggacaccgccatgtactattgcaagaccagcaccttctttttcgactactggggccagggaacaatggtcaccgtgtccagcacgcgtggaatgaggactgaggatcttcccaaagctgtcgtctttctcgaaccccaatggtatcgggtgctcgaaaaagactctgtgacactgaaatgccaaggggcctactctcccgaggacaactccacacagtggtttcataatgagtccctcatcagctctcaggccagctcttatttcattgatgccgctacagtggacgactccggcgagtatcggtgtcagaccaatctgtctacactgtctgaccccgtgcagcttgaggtccacattggatggttgctcttgcaagccccacgctgggttttcaaagaggaagatccaatccatctgcggtgccacagctggaaaaacaccgctctccacaaagtcacatacctgcaaaatggcaaaggacgcaaatacttccatcacaattccgatttttacattccgaaggctaccctgaaagacagcggcagctatttctgccggggactcgtcggctccaagaatgtgtcctccgaaaccgtgaatatcacgattacccaaggactggctgtgcctacaatctctagcttctttccgcctggataccaagtctccttctgtcttgtgatggtcctcctgtttgctgtggacacaggactgtacttttccgtg

SEQ ID NO: 1469 - DNA, 1437 bp, synthetic construct
  source 1..1437: mol_type = other DNA
atggccttaccagtgaccgccttgctcctgccgctggccttgctgctccacgccgccaggccggacatccagatgacccagagccccagcagcctgtctgccagcgtgggcgacagagtgaccatcacatgcaaggccagccaggacgtgtccattgccgtggcctggtatcagcagaagcccggcaaggcccccaaggtgctgatctacagcgccagctacagatacaccggcgtgcccgacagattcagcggctctggcagcggcaccgacttcaccttcaccatcagctccctccagcccgaggatattgccgtgtactactgccagcagcactacatcacccccctgacctttggcggaggcaccaaggtggaaatcaagggcggaggcggaagtggaggcggaggatctggcggcggaggctctcagatccaactggtgcagagcggccacgaagtgaagaaacctggggccagcgtgaaggtgtcctgcaaagccagcggctacacctttaccaactacggcatgaactgggtgcgccaggcccctggacagggcctggaatggatgggctggatcaacaccaagaccggcgagcccacctacgccgaagagttcaagggcagattcgtgttcagcctggaaaccagcgcctccaccgcctacctccagatcagctctctgaaggccgaggacaccgccatgtacttttgcggcagaggcggctacggcagcagctactggtacttcgatgtgtggggccagggcaccaccgtgaccgtgtcatctacgcgtggaatgaggactgaggatcttcccaaagctgtcgtctttctcgaaccccaatggtatcgggtgctcgaaaaagactctgtgacactgaaatgccaaggggcctactctcccgaggacaactccacacagtggtttcataatgagtccctcatcagctctcaggccagctcttatttcattgatgccgctacagtggacgactccggcgagtatcggtgtcagaccaatctgtctacactgtctgaccccgtgcagcttgaggtccacattggatggttgctcttgcaagccccacgctgggttttcaaagaggaagatccaatccatctgcggtgccacagctggaaaaacaccgctctccacaaagtcacatacctgcaaaatggcaaaggacgcaaatacttccatcacaattccgatttttacattccgaaggctaccctgaaagacagcggcagctatttctgccggggactcgtcggctccaagaatgtgtcctccgaaaccgtgaatatcacgattacccaaggactggctgtgcctacaatctctagcttctttccgcctggataccaagtctccttctgtcttgtgatggtcctcctgtttgctgtggacacaggactgtacttttccgtg

SEQ ID NO: 1470 - DNA, 1446 bp, synthetic construct
  source 1..1446: mol_type = other DNA
atggccttaccagtgaccgccttgctcctgccgctggccttgctgctccacgccgccaggccgcaggctgtcgtgacacagcctcctagcgcctctggcacaccaggccagagagtgaccatctcctgtagcggcagcagcagcaacatcggcagcaacaccgtgaactggtatcagcaggtgcccggcaccgctcccaagctgctgatctacagcaacaaccagcggcccagcggcgtgcccgatagattttctggcagcaagagcggcaccagcgccagcctggctatctctggactccagtccgaggacgaggccgactactattgcgccgcctgggacgatagcctgaacggctgggtgttcggcggaggcaccaagctgacagtgctgggcggaggcggaagtggaggcggaggatctggcggcggaggctctcagatgcaactggtgcagagcggagccgaagtgaaagagcctggcgagagcctgcggatctcctgcaagggcagcggctacagcttcaccaatttctggatctcttgggtgcgccagatgcccggcaagggcctggaatggatgggcagagtggaccccggctactcctacagcacctacagccctagcttccagggccacgtgaccatcagcgccgacaagagcaccagcaccgcctacctccagtggaacagcctgaaggccagcgacaccgccatgtactactgcgccagagtgcagtacagcggctattacgattggttcgacccctggggccagggcacactcgtgacagtgtcaagcacgcgtggaatgaggactgaggatcttcccaaagctgtcgtctttctcgaaccccaatggtatcgggtgctcgaaaaagactctgtgacactgaaatgccaaggggcctactctcccgaggacaactccacacagtggtttcataatgagtccctcatcagctctcaggccagctcttatttcattgatgccgctacagtggacgactccggcgagtatcggtgtcagaccaatctgtctacactgtctgaccccgtgcagcttgaggtccacattggatggttgctcttgcaagccccacgctgggttttcaaagaggaagatccaatccatctgcggtgccacagctggaaaaacaccgctctccacaaagtcacatacctgcaaaatggcaaaggacgcaaatacttccatcacaattccgatttttacattccgaaggctaccctgaaagacagcggcagctatttctgccggggactcgtcggctccaagaatgtgtcctccgaaaccgtgaatatcacgattacccaaggactggctgtgcctacaatctctagcttctttccgcctggataccaagtctccttctgtcttgtgatggtcctcctgtttgctgtggacacaggactgtacttttccgtg

SEQ ID NO: 1471 - DNA, 1428 bp, synthetic construct
  source 1..1428: mol_type = other DNA
atggccttaccagtgaccgccttgctcctgccgctggccttgctgctccacgccgccaggccggacatccagatgacccagagccccagcacactgagcgccagcgtgggcgacagagtgaccatcacctgtcgggccagccagaacatcaacaagtggctggcctggtatcagcagaggcccggaaaagccccccagctgctgatctacaaggccagcagcctggaaagcggcgtgcccagcagattttctggcagcggctctggcaccgagtacaccctgaccatcagctccctccagcccgacgacttcgccacctactactgccagcagtacaacagctacgccaccttcggccagggcaccaaggtggaaatcaagagaggcggaggcggaagtggaggcggaggatctggcggcggaggctctcaggtgcagctggtgcagtctggggccgaagtgaagaagcctggcgagagcctgaagatcagctgcaagggctccggctacaacttctctaacaagtggatcggctgggtgcgccagctgcctggcagaggactggaatggatcgccatcatctaccccggctacagcgacatcacctacagccccagcttccagggccgcgtgacaatcagcgccgacaccagcatcaacaccgcctacctgcactggcacagcctgaaggccagcgacaccgccatgtactactgcgtgcggcatacagccctggctggcttcgattattggggcctgggcaccctcgtgaccgtgtctagtacgcgtggaatgaggactgaggatcttcccaaagctgtcgtctttctcgaaccccaatggtatcgggtgctcgaaaaagactctgtgacactgaaatgccaaggggcctactctcccgaggacaactccacacagtggtttcataatgagtccctcatcagctctcaggccagctcttatttcattgatgccgctacagtggacgactccggcgagtatcggtgtcagaccaatctgtctacactgtctgaccccgtgcagcttgaggtccacattggatggttgctcttgcaagccccacgctgggttttcaaagaggaagatccaatccatctgcggtgccacagctggaaaaacaccgctctccacaaagtcacatacctgcaaaatggcaaaggacgcaaatacttccatcacaattccgatttttacattccgaaggctaccctgaaagacagcggcagctatttctgccggggactcgtcggctccaagaatgtgtcctccgaaaccgtgaatatcacgattacccaaggactggctgtgcctacaatctctagcttctttccgcctggataccaagtctccttctgtcttgtgatggtcctcctgtttgctgtggacacaggactgtacttttccgtg

SEQ ID NO: 1472 - DNA, 1443 bp, synthetic construct
  source 1..1443: mol_type = other DNA
atggccttaccagtgaccgccttgctcctgccgctggccttgctgctccacgccgccaggccgcagagcgtcgtgacacagcctcctagcgtgtcagtggcccctggcaagaccgccagaatcacctgtggccggaacaacatcggcagcaagagcgtgcactggtatcagcagaagcccggccaggctcctgtgctggtggtgtacgacgacagcgacagacccagcggcatccccgagagattcagcggcagcaactccggcaataccgccaccctgaccatcagcagagtggaagccggcgacgaggccgactactactgccaagtgtgggacagcagcagcgatcacgtggtgtttggcggaggcaccaagctgacagtgctgggtggcggaggcggaagtggaggcggaggatctggcggcggaggctctgaagtgcaactggtgcagtctggcggaggggtcgtgcggcctggcggatctctgagactgtcttgtgccgccagcggcttcaccttcgacgactacggcatgagctgggtgcgccaggcccctggaaaaggcctggaatgggtgtccggcatcaactggaatggcggcagcaccggctacgccgattctgtgcggggcagattcaccatcagccgggacaacgccaagaacagcctgtacctgcagatgaactccctgcgggccgaggacaccgccctgtactattgcgccagagagcggggctacggctaccacgaccctcacgattattggggccagggcacccttgtcaccgtgtcctctacgcgtggaatgaggactgaggatcttcccaaagctgtcgtctttctcgaaccccaatggtatcgggtgctcgaaaaagactctgtgacactgaaatgccaaggggcctactctcccgaggacaactccacacagtggtttcataatgagtccctcatcagctctcaggccagctcttatttcattgatgccgctacagtggacgactccggcgagtatcggtgtcagaccaatctgtctacactgtctgaccccgtgcagcttgaggtccacattggatggttgctcttgcaagccccacgctgggttttcaaagaggaagatccaatccatctgcggtgccacagctggaaaaacaccgctctccacaaagtcacatacctgcaaaatggcaaaggacgcaaatacttccatcacaattccgatttttacattccgaaggctaccctgaaagacagcggcagctatttctgccggggactcgtcggctccaagaatgtgtcctccgaaaccgtgaatatcacgattacccaaggactggctgtgcctacaatctctagcttctttccgcctggataccaagtctccttctgtcttgtgatggtcctcctgtttgctgtggacacaggactgtacttttccgtg

SEQ ID NO: 1473 - DNA, 1440 bp, synthetic construct
  source 1..1440: mol_type = other DNA
atggccttaccagtgaccgccttgctcctgccgctggccttgctgctccacgccgccaggccggacatcgtgctgacacagagccctgcttctctggccgtgtctctgggacagagagccaccatcagctgtagagccagcgagagcgtggacaactacggcaacaccttcatgcactggtatcagcagaagcccggccagcctcctaagctgctgatctacagagccagcaacctggaaagcggcatccccgccagattttctggcagcggcagcagaaccgacttcaccctgaccatcaatcccgtggaagccgacgacgtggcaacctactactgccagcagagcaacgaggaccctcctacatttggagccggcaccaagctggaactgaaaggcggaggcggaagtggaggcggaggatctggcggcggaggctctcagattcagctggtgcagtctggccccgagctgaagaaacctggcgagacagtgaagatcagctgcaaggccagcggctacatcttcaccaattacggcatgaactgggtcaagcaggcccctggcaagagcttcaagtggatgggctggatcaacacctacaccggcgagagcacatacagcgccgacttcaagggcagattcgccttcagcctggaaaccagcgccagcacagcctacctgcacatcaacgacctgaagaacgaggacaccgccacctacttttgcgccagaagcggcggctacgaccctatggattattggggccagggcaccagcgtgaccgtttcttctacgcgtggaatgaggactgaggatcttcccaaagctgtcgtctttctcgaaccccaatggtatcgggtgctcgaaaaagactctgtgacactgaaatgccaaggggcctactctcccgaggacaactccacacagtggtttcataatgagtccctcatcagctctcaggccagctcttatttcattgatgccgctacagtggacgactccggcgagtatcggtgtcagaccaatctgtctacactgtctgaccccgtgcagcttgaggtccacattggatggttgctcttgcaagccccacgctgggttttcaaagaggaagatccaatccatctgcggtgccacagctggaaaaacaccgctctccacaaagtcacatacctgcaaaatggcaaaggacgcaaatacttccatcacaattccgatttttacattccgaaggctaccctgaaagacagcggcagctatttctgccggggactcgtcggctccaagaatgtgtcctccgaaaccgtgaatatcacgattacccaaggactggctgtgcctacaatctctagcttctttccgcctggataccaagtctccttctgtcttgtgatggtcctcctgtttgctgtggacacaggactgtacttttccgtg

SEQ ID NO: 1474 - DNA, 1434 bp, synthetic construct
  source 1..1434: mol_type = other DNA
atggccttaccagtgaccgccttgctcctgccgctggccttgctgctccacgccgccaggccggagatcgtgctgacacagagccctggcaccctgagcctgtctccaggcgaaagagccacactgagctgtcgggccagccagagcgtgtccaatacctacctggcctggtatcaccagaggcccggacaggctccccggctgctgatctatggcgcttctagcagagccaccggcatccccgatagattcagcggctctggcagcggcaccgacttcgccctgacaatcagctccctggaacccgaggacttcgccgtgtactactgccagcagtacagcaactcctggaccttcggccagggcaccaaggtggaaatcaagagaggcggaggcggaagtggaggcggaggatctggcggcggaggctctcaggtgcaactggtggaatctggcgggggagtggtgcagcctggcagaagcctgagactgtcttgtgccgccagcggcttcaccttcagcagctacgacatgcactgggtgcgccaggcccctggcaaaggactggaatgggtggccgtgatctcctacgacggcaccaacgagtattacgccgacagcgtgaagggccggttcaccatctccagagacaccagcaagaacaccctgtacctccagatgaacagcctgcgggccgaggacacagccgtgtattattgcgccagagagcggtacttcgactggtccttcgactactggggccagggaaccctggtgtccgtgtctagtacgcgtggaatgaggactgaggatcttcccaaagctgtcgtctttctcgaaccccaatggtatcgggtgctcgaaaaagactctgtgacactgaaatgccaaggggcctactctcccgaggacaactccacacagtggtttcataatgagtccctcatcagctctcaggccagctcttatttcattgatgccgctacagtggacgactccggcgagtatcggtgtcagaccaatctgtctacactgtctgaccccgtgcagcttgaggtccacattggatggttgctcttgcaagccccacgctgggttttcaaagaggaagatccaatccatctgcggtgccacagctggaaaaacaccgctctccacaaagtcacatacctgcaaaatggcaaaggacgcaaatacttccatcacaattccgatttttacattccgaaggctaccctgaaagacagcggcagctatttctgccggggactcgtcggctccaagaatgtgtcctccgaaaccgtgaatatcacgattacccaaggactggctgtgcctacaatctctagcttctttccgcctggataccaagtctccttctgtcttgtgatggtcctcctgtttgctgtggacacaggactgtacttttccgtg

SEQ ID NO: 1475 - DNA, 1431 bp, synthetic construct
  source 1..1431: mol_type = other DNA
atggccttaccagtgaccgccttgctcctgccgctggccttgctgctccacgccgccaggccggagctgacacaggaccctgctgtgtctgttgccctgggccagacagtgcggattacctgtcaaggcgacagcctgagaagcaactacgccaactggtatcagcagaagcccggacaggctcccgtgctggttatctacggccagaacaacagacccagcggcatccccgatagattcagcggctctagctctggcaataccgccagcctgacaatcactggcgctcaggctgccgatgaggccgactactactgcgatagcagagtgtccaccggcaatcacgtggtgtttggcggcggaacaaagctgacagtgctcggacaaggcggaggcggaagtggaggcggaggatctggcggcggaggctctgaagttcagctggtgcagagcggagccgaagtgaagaaacctggggcctctgtgaaggtgtcctgcaaggcttccggctacacctttaccagctacgccatgcactgggtccgacaggcacctggacaacggcttgaatggatgggctggatcaacgccggcaacggcaacaccaagtacagccagaaattccagggccgcgtgaccatcaccagagatacaagcgccagcaccgcctacatggaactgtctagcctgagatccgaggacaccgccgtgtactactgtgccagagacatcagctacggcagcttcgactattggggccagggcacactggtcaccgttagctctacgcgtggaatgaggactgaggatcttcccaaagctgtcgtctttctcgaaccccaatggtatcgggtgctcgaaaaagactctgtgacactgaaatgccaaggggcctactctcccgaggacaactccacacagtggtttcataatgagtccctcatcagctctcaggccagctcttatttcattgatgccgctacagtggacgactccggcgagtatcggtgtcagaccaatctgtctacactgtctgaccccgtgcagcttgaggtccacattggatggttgctcttgcaagccccacgctgggttttcaaagaggaagatccaatccatctgcggtgccacagctggaaaaacaccgctctccacaaagtcacatacctgcaaaatggcaaaggacgcaaatacttccatcacaattccgatttttacattccgaaggctaccctgaaagacagcggcagctatttctgccggggactcgtcggctccaagaatgtgtcctccgaaaccgtgaatatcacgattacccaaggactggctgtgcctacaatctctagcttctttccgcctggataccaagtctccttctgtcttgtgatggtcctcctgtttgctgtggacacaggactgtacttttccgtg

SEQ ID NO: 1476 - DNA, 1419 bp, synthetic construct
  source 1..1419: mol_type = other DNA
atggccttaccagtgaccgccttgctcctgccgctggccttgctgctccacgccgccaggccggacatccagatgacacagagccctagcagcctgtctgccagcgtgggagacagagtgaccatcacctgtagcgccaccagcagcatcagctacatgcactggtatcagcagaagcccggcaaggcccctaaaggctggatctacgataccagcaaactggcccacggcgtgcccagcagattttctggttctggcagcggcaccgacttcaccctgacaatatctagcctccagcctgaggacttcgccacctactactgccaccagagaagaagctaccccttcaccttcggccagggcaccaaggtggaaatcaaaggcggaggcggaagtggaggcggaggatctggcggcggaggctctgaagtgcaactggttcagagcggagccgaagtgaagaaacctggggcctctgtgaaggtgtcctgcaaggcttccggctacacctttaccaatttctggattcactgggtccgacaggctccaggccaaggactggaatggatcggagagatcgaccccagcgacagctacaccaactacaaccagaaattcaaaggccgggtcaccatcaccagagacaccagcacaagcaccgcctacctggaactgagcagcctgagaagcgaggacaccgccgtgtactactgcgccagggaaatcaccaccgtggattattggggccagggaaccctggtcaccgtgtcatctacgcgtggaatgaggactgaggatcttcccaaagctgtcgtctttctcgaaccccaatggtatcgggtgctcgaaaaagactctgtgacactgaaatgccaaggggcctactctcccgaggacaactccacacagtggtttcataatgagtccctcatcagctctcaggccagctcttatttcattgatgccgctacagtggacgactccggcgagtatcggtgtcagaccaatctgtctacactgtctgaccccgtgcagcttgaggtccacattggatggttgctcttgcaagccccacgctgggttttcaaagaggaagatccaatccatctgcggtgccacagctggaaaaacaccgctctccacaaagtcacatacctgcaaaatggcaaaggacgcaaatacttccatcacaattccgatttttacattccgaaggctaccctgaaagacagcggcagctatttctgccggggactcgtcggctccaagaatgtgtcctccgaaaccgtgaatatcacgattacccaaggactggctgtgcctacaatctctagcttctttccgcctggataccaagtctccttctgtcttgtgatggtcctcctgtttgctgtggacacaggactgtacttttccgtg

SEQ ID NO: 1477 - DNA, 1440 bp, synthetic construct
  source 1..1440: mol_type = other DNA
atggccttaccagtgaccgccttgctcctgccgctggccttgctgctccacgccgccaggccggacatccagatgacacagagccctagcagcctgtctgccagcgtgggagacagagtgaccatcacatgcaaggccagccagggcttcaacaaatacgtggcctggtatcagcagaagcccggcaaggctcctaagctgctgatctactacaccagcacactccagcctggcgtgcccagcagattttctggctctggcagcggcagagactacaccctgacaatatccagcctccagccagaggacttcgccacctactactgtctccagtacggcaacctgctgtacgcctttggacagggcaccaaggtggaaatcaagagaggcggaggcggaagtggaggcggaggatctggcggcggaggctctgaagttcagcttgtgcagagcggagccgaagtgaagaaacctggggcctctgtgaaggtgtcctgcaaagccagcggctacacctttaccagctactggatcggctgggtccgacaggctcctggacaaggactggaatggatcggcgacatctatcccggcggaggctacaccaactacaacgagaagttcaagggccgcgtgacaatcaccagagacacctctacaagcaccgcctacctggaactgagcagcctgagaagcgaggacaccgccgtgtactactgcgccagactggatggcagcagctacagaggcgctatggattcttggggccagggcacactggtcaccgtttcttctacgcgtggaatgaggactgaggatcttcccaaagctgtcgtctttctcgaaccccaatggtatcgggtgctcgaaaaagactctgtgacactgaaatgccaaggggcctactctcccgaggacaactccacacagtggtttcataatgagtccctcatcagctctcaggccagctcttatttcattgatgccgctacagtggacgactccggcgagtatcggtgtcagaccaatctgtctacactgtctgaccccgtgcagcttgaggtccacattggatggttgctcttgcaagccccacgctgggttttcaaagaggaagatccaatccatctgcggtgccacagctggaaaaacaccgctctccacaaagtcacatacctgcaaaatggcaaaggacgcaaatacttccatcacaattccgatttttacattccgaaggctaccctgaaagacagcggcagctatttctgccggggactcgtcggctccaagaatgtgtcctccgaaaccgtgaatatcacgattacccaaggactggctgtgcctacaatctctagcttctttccgcctggataccaagtctccttctgtcttgtgatggtcctcctgtttgctgtggacacaggactgtacttttccgtg

SEQ ID NO: 1478 - DNA, 1428 bp, synthetic construct
  source 1..1428: mol_type = other DNA
atggccttaccagtgaccgccttgctcctgccgctggccttgctgctccacgccgccaggccggacatccagatgacacagagccctagcagcctgtctgccagcgtgggagacagagtgaccatcacctgtagagccagccaggacatccggtactacctgaactggtatcagcagaagcccggcaaggcccctaagctgctgatctatgtggcctccagcctccagagcggagtgccttctagattttctggcagcggctccggcaccgagtttaccctgacagtgtctagcttgcagcccgaggacttcgccacctactactgcctgcaagtgtacagcacccctcggacctttggacagggcaccaaggtggaaatcaaaggcggaggcggaagtggaggcggaggatctggcggcggaggctctgaagtgcagcttgttgaatctggcggcggactggctaagcctggcggatctctgagactgtcttgtgccgccagcggcttccggttcaccttcaacaactactacatggactgggtccgacaggcccctggacaaggacttgaatgggtgtccagaatcagcagcagcggcgaccctacttggtacgccgattctgtgaagggcagattcaccatcagcagagagaacgccaagaacaccctgttcctccagatgaactccctgagagccgaggacaccgccgtgtactattgtgcctctctgaccaccggcagcgattcttggggacagggcgtgctggttaccgtgtcatctacgcgtggaatgaggactgaggatcttcccaaagctgtcgtctttctcgaaccccaatggtatcgggtgctcgaaaaagactctgtgacactgaaatgccaaggggcctactctcccgaggacaactccacacagtggtttcataatgagtccctcatcagctctcaggccagctcttatttcattgatgccgctacagtggacgactccggcgagtatcggtgtcagaccaatctgtctacactgtctgaccccgtgcagcttgaggtccacattggatggttgctcttgcaagccccacgctgggttttcaaagaggaagatccaatccatctgcggtgccacagctggaaaaacaccgctctccacaaagtcacatacctgcaaaatggcaaaggacgcaaatacttccatcacaattccgatttttacattccgaaggctaccctgaaagacagcggcagctatttctgccggggactcgtcggctccaagaatgtgtcctccgaaaccgtgaatatcacgattacccaaggactggctgtgcctacaatctctagcttctttccgcctggataccaagtctccttctgtcttgtgatggtcctcctgtttgctgtggacacaggactgtacttttccgtg

SEQ ID NO: 1479 - DNA, 1431 bp, synthetic construct
  source 1..1431: mol_type = other DNA
atggccttaccagtgaccgccttgctcctgccgctggccttgctgctccacgccgccaggccggagatcgtgatgacacagagccccgccacactgagtgtgtctccaggcgaaagagccacactgtcctgtagagccagccagagcgtgtccagaaacctggcctggtatcagcagaagcctggacaggctccccggctgttgatctacggcgcttctacaagagccaccggcattcccgccagattttctggctctggcagcggcaccgagttcaccctgacaatcggaagcctccagagcgaggacttcgccgtgtactactgccagcagtacaagacctggcctcggacctttggacagggcaccaacgtggaaatcaaaggcggaggcggaagtggaggcggaggatctggcggcggaggctctcaagttcagctgcaacaatggggagccggcctgctgaagcctagcgaaacactgtctctgacctgcgccgtgttcggcggctctttcagcggctactactggtcctggatcagacagcctcctggcaaaggactggaatggatcggcgagatcaaccaccggggcaacaccaacgacaaccccagcctgaaaagcagagtgaccatcagcgtggacaccagcaagaaccagttcgccctgaagctgagcagcgtgacagccgctgataccgccgtgtattattgcgccagagagcggggctacacctacggcaatttcgatcactggggccagggcaccctggtcacagtttcttctacgcgtggaatgaggactgaggatcttcccaaagctgtcgtctttctcgaaccccaatggtatcgggtgctcgaaaaagactctgtgacactgaaatgccaaggggcctactctcccgaggacaactccacacagtggtttcataatgagtccctcatcagctctcaggccagctcttatttcattgatgccgctacagtggacgactccggcgagtatcggtgtcagaccaatctgtctacactgtctgaccccgtgcagcttgaggtccacattggatggttgctcttgcaagccccacgctgggttttcaaagaggaagatccaatccatctgcggtgccacagctggaaaaacaccgctctccacaaagtcacatacctgcaaaatggcaaaggacgcaaatacttccatcacaattccgatttttacattccgaaggctaccctgaaagacagcggcagctatttctgccggggactcgtcggctccaagaatgtgtcctccgaaaccgtgaatatcacgattacccaaggactggctgtgcctacaatctctagcttctttccgcctggataccaagtctccttctgtcttgtgatggtcctcctgtttgctgtggacacaggactgtacttttccgtg

SEQ ID NO: 1480 - DNA, 1449 bp, synthetic construct
  source 1..1449: mol_type = other DNA
atggccttaccagtgaccgccttgctcctgccgctggccttgctgctccacgccgccaggccggacatccagatgacccagagccccagcagcctgtctgccagcgtgggcgacagagtgaccatcacatgcaaggccagcaagaacatcagaagctacctggcctggtatcagcagaagcccggcaaggcccccaagctgctgatctacagcggcagcacactgcacagcggcgtgcccagcagattttccggctctggcagcggcaccgacttcaccctgaccatctctagcctccagcccgaggacttcgccacctactactgccagcagcaccacgagtaccccctgacattcggccagggcaccaaggtggaaatcaagagaggcggaggcggaagtggaggcggaggatctggcggcggaggctctcaggtgcaactccaggaatctggccccggactcgtgaagcccagcgagacactgagcctgacctgtaccgtgtccggctacaccatcaccagcggctacgactggtcctggatcagacagcctcctggcaagggcctggaatggatcggctacatcaactacggcggctccaccaactacaagcccagcctgggaagccgcgtgacaatcagcgtggacacctccaagaaccagttcagcctgaagctgagcagcgtgacagccgccgataccgccgtgtactactgcgcccggtacaacgagtacaagagctacatctacgattggtacttcgacttctggggccagggaaccctcgtgaccgtgtctagtacgcgtggaatgaggactgaggatcttcccaaagctgtcgtctttctcgaaccccaatggtatcgggtgctcgaaaaagactctgtgacactgaaatgccaaggggcctactctcccgaggacaactccacacagtggtttcataatgagtccctcatcagctctcaggccagctcttatttcattgatgccgctacagtggacgactccggcgagtatcggtgtcagaccaatctgtctacactgtctgaccccgtgcagcttgaggtccacattggatggttgctcttgcaagccccacgctgggttttcaaagaggaagatccaatccatctgcggtgccacagctggaaaaacaccgctctccacaaagtcacatacctgcaaaatggcaaaggacgcaaatacttccatcacaattccgatttttacattccgaaggctaccctgaaagacagcggcagctatttctgccggggactcgtcggctccaagaatgtgtcctccgaaaccgtgaatatcacgattacccaaggactggctgtgcctacaatctctagcttctttccgcctggataccaagtctccttctgtcttgtgatggtcctcctgtttgctgtggacacaggactgtacttttccgtg

SEQ ID NO: 1481 - DNA, 1455 bp, synthetic construct
  source 1..1455: mol_type = other DNA
atggccttaccagtgaccgccttgctcctgccgctggccttgctgctccacgccgccaggccgcagtctgtggtcacacagcctccatccgtgtctgctgcccctggacagaaagtgaccatctcctgtagcggcagcagcagcaacatcggcaacaactacgtgtcctggtatcagcagctccccggcacagctcccaaactgctgatctacgacaacaacaagcggcccagcggcatccccgatagattttctggcagcaagagcggcaccagcgccacactgggaattaccggacttcagacaggcgacgaggccgactactactgtggcacatgggatggcagcctgtacaccatgcttttcggcggaggcaccaagctgacagtgcttggcggaggcggaagtggaggcggaggatctggcggcggaggctctgaagtgcaactggtggaatctggcggcggactggttaagcctggcggatctctgagactgtcttgtgccgccagcggcttcaccttcagcaatgcctggatgagctgggttcgacaggcccctggaaaaggactggaatgggtcggattcatccggtccaaagcctacggcggcaccacagaatatgccgcctctgtgaagggcagattcaccatcagccgggacgacagcaagtctatcgcctacctccagatgaacaacctgaaaaccgaggacaccgccgtgtactactgcgccagagatggcctgtacagcagctcttggtacgacagcgattactggggccagggcacactggtcacagtgtcatctacgcgtggaatgaggactgaggatcttcccaaagctgtcgtctttctcgaaccccaatggtatcgggtgctcgaaaaagactctgtgacactgaaatgccaaggggcctactctcccgaggacaactccacacagtggtttcataatgagtccctcatcagctctcaggccagctcttatttcattgatgccgctacagtggacgactccggcgagtatcggtgtcagaccaatctgtctacactgtctgaccccgtgcagcttgaggtccacattggatggttgctcttgcaagccccacgctgggttttcaaagaggaagatccaatccatctgcggtgccacagctggaaaaacaccgctctccacaaagtcacatacctgcaaaatggcaaaggacgcaaatacttccatcacaattccgatttttacattccgaaggctaccctgaaagacagcggcagctatttctgccggggactcgtcggctccaagaatgtgtcctccgaaaccgtgaatatcacgattacccaaggactggctgtgcctacaatctctagcttctttccgcctggataccaagtctccttctgtcttgtgatggtcctcctgtttgctgtggacacaggactgtacttttccgtg

SEQ ID NO: 1482 - DNA, 1470 bp, synthetic construct
  source 1..1470: mol_type = other DNA
atggccttaccagtgaccgccttgctcctgccgctggccttgctgctccacgccgccaggccgcagtctgtgctgacacagcctcctagtgtgtctggcgctcctggacagagagtgaccatctcttgtaccggcagcagcagcaatatcggagccggctatgacgtgcactggtatcagcagctccctggcacagcccctaaactgctgatcttcggcaacagcaacagacccagcggcgtgcccgatagattcagcggctttaagagcggcacaagcgccagcctggctatcactggactgcaagccgaggacgaggccgactacttctgccagagctacgatagcagcctgagcggcagcggagtgtttggcacaggcaccaaagtgacagtgcttggcggcggaggcggaagtggaggcggaggatctggcggcggaggctctcaaatgcaactggttcaaagcggcggtggcctggtgcaacctggaagaagtctgagactgagctgtgccgccagcggcttcaccttcgatgattacgccatgcactgggtccgacaggcccctggaaaaggactggaatgggtgtccggcatctcctggaatagcggctctatcggctacgccgacagcgtgaagggcagattcaccatcagccgggacaacgccaagaacagcctgtacctccagatgaactccctgagagccgaggatacagccctgtactactgcgccaaggacatccacagcggcagctactacggcctgctgtactacgctatggacgtgtggggccagggcacaaccgtgacagtttcttctacgcgtggaatgaggactgaggatcttcccaaagctgtcgtctttctcgaaccccaatggtatcgggtgctcgaaaaagactctgtgacactgaaatgccaaggggcctactctcccgaggacaactccacacagtggtttcataatgagtccctcatcagctctcaggccagctcttatttcattgatgccgctacagtggacgactccggcgagtatcggtgtcagaccaatctgtctacactgtctgaccccgtgcagcttgaggtccacattggatggttgctcttgcaagccccacgctgggttttcaaagaggaagatccaatccatctgcggtgccacagctggaaaaacaccgctctccacaaagtcacatacctgcaaaatggcaaaggacgcaaatacttccatcacaattccgatttttacattccgaaggctaccctgaaagacagcggcagctatttctgccggggactcgtcggctccaagaatgtgtcctccgaaaccgtgaatatcacgattacccaaggactggctgtgcctacaatctctagcttctttccgcctggataccaagtctccttctgtcttgtgatggtcctcctgtttgctgtggacacaggactgtacttttccgtg

SEQ ID NO: 1483 - DNA, 1470 bp, synthetic construct
  source 1..1470: mol_type = other DNA
atggccttaccagtgaccgccttgctcctgccgctggccttgctgctccacgccgccaggccgctgcctgttctgacacagcctccatctgcctctggcacacctggacagagagtgaccatcagctgtagcggcagaagcagcaacatcggcagcaacagcgtgaactggtacagacagcttcctggcgctgcccctaagctgctgatctacagcaacaaccagcggcctcctggcgtgccagtcagattttctggcagcaagagcggcacaagcgccagcctggctatttctggactccagtctgaggacgaggccacctactactgtgccacctgggacgacaacctgaacgtgcactacgtgttcggcaccggcaccaaagtgacagtgcttggaagtagaggcggaggcggaagtggaggcggaggatctggcggcggaggctctcttgaaatggctcaggtgcagctggtgcagagcggagccgaagtgaagaaacctggcagcagcgtgaaggtgtcctgcaaagcttctggcggcaccttcagcagctacgccatctcttgggttcgacaggcccctggacaaggactggaatggatgggcagaatcatccccatcctgggaatcgccaactacgcccagaaattccagggcagagtgacaatcaccgccgacaagagcaccagcaccgcctacatggaactgagcagcctgagaagcgaggacaccgccgtgtactattgtgcaagaggcggctactacagccacgacatgtggagcgaagattggggccagggcacactggtcacagtgtcatctacgcgtggaatgaggactgaggatcttcccaaagctgtcgtctttctcgaaccccaatggtatcgggtgctcgaaaaagactctgtgacactgaaatgccaaggggcctactctcccgaggacaactccacacagtggtttcataatgagtccctcatcagctctcaggccagctcttatttcattgatgccgctacagtggacgactccggcgagtatcggtgtcagaccaatctgtctacactgtctgaccccgtgcagcttgaggtccacattggatggttgctcttgcaagccccacgctgggttttcaaagaggaagatccaatccatctgcggtgccacagctggaaaaacaccgctctccacaaagtcacatacctgcaaaatggcaaaggacgcaaatacttccatcacaattccgatttttacattccgaaggctaccctgaaagacagcggcagctatttctgccggggactcgtcggctccaagaatgtgtcctccgaaaccgtgaatatcacgattacccaaggactggctgtgcctacaatctctagcttctttccgcctggataccaagtctccttctgtcttgtgatggtcctcctgtttgctgtggacacaggactgtacttttccgtg

SEQ ID NO: 1484 - DNA, 1437 bp, synthetic construct
  source 1..1437: mol_type = other DNA
atggccttaccagtgaccgccttgctcctgccgctggccttgctgctccacgccgccaggccggacatcgtgctgacacagagccctgcttctctggccgtgtctctgggagagagagccaccatcaactgtagagccagcgagagcgtgtccgtgattggagcccacctgatccactggtatcagcagaagcctggacagcctcctaagctgctgatctacctggcctccaacctggaaacaggcgtgccagccagattttctggcagcggctctggcaccgatttcaccctgacaatcagcagcctccaggccgaagatgccgccatctactactgcctccagagccggatcttccccagaacctttggacagggcaccaagctggaaatcaaaggcggaggcggaagtggaggcggaggatctggcggcggaggctctcaagttcagctggtgcagtctggctccgagctgaagaaacctggcgagtccgtgaagatcagctgcaaggccagcggctacaccttcaccgactacagcatcaactgggtcaagcaggcccctggacagggactgaaatggatgggctggatcaacaccgagacaagagagcccgcctacgcctacgacttcagaggcagattcgtgttctccctggacaccagcgccagcacagcctatctccagatcagctctctgaaggccgaggataccgccgtgtacttctgcgccctggactacagctacgctatggactattggggccagggcaccctggtcacagtctcttctacgcgtggaatgaggactgaggatcttcccaaagctgtcgtctttctcgaaccccaatggtatcgggtgctcgaaaaagactctgtgacactgaaatgccaaggggcctactctcccgaggacaactccacacagtggtttcataatgagtccctcatcagctctcaggccagctcttatttcattgatgccgctacagtggacgactccggcgagtatcggtgtcagaccaatctgtctacactgtctgaccccgtgcagcttgaggtccacattggatggttgctcttgcaagccccacgctgggttttcaaagaggaagatccaatccatctgcggtgccacagctggaaaaacaccgctctccacaaagtcacatacctgcaaaatggcaaaggacgcaaatacttccatcacaattccgatttttacattccgaaggctaccctgaaagacagcggcagctatttctgccggggactcgtcggctccaagaatgtgtcctccgaaaccgtgaatatcacgattacccaaggactggctgtgcctacaatctctagcttctttccgcctggataccaagtctccttctgtcttgtgatggtcctcctgtttgctgtggacacaggactgtacttttccgtg

SEQ ID NO: 1485 - DNA, 1440 bp, synthetic construct
  source 1..1440: mol_type = other DNA
atggccttaccagtgaccgccttgctcctgccgctggccttgctgctccacgccgccaggccggacatcgtgctgacacagtctcccgccacactgtcactgagccctggcgatagagccacactgagctgtagagccagcgagagcgtgacaatcctgggcagccacctgatctactggtatcagcagaagcccggacaggcccctagactgctgattcagctcgccagcaatgtgcagacaggcatccctgccagattttccggcagcggcagcagaaccgatttcaccctgaccataagcagcctggaacctgaggacttcgccgtgtactactgcctccagagccggacaatccccagaacctttggacagggcaccaagctggaaatcaagagaggcggaggcggaagtggaggcggaggatctggcggcggaggctctcaagttcaactggtgcagagcggctccgagctgaagaaacctggcgagtccgtgaagattagctgcaaggccagcggctacaccttcacacactacagcatgaactgggtccgacaggctccaggccaaggactggaatggatgggcagaatcaacaccgagacaggcgagcccctgtacgccgacgatttcaagggcagattcgtgttcagcctggacaccagcgccagcacagcctatctccagatcagctctctgaaggccgaggacaccgccgtgtattattgcagcaacgactacctgtactccctggactattggggccagggcacactggtcacagtgtctagtacgcgtggaatgaggactgaggatcttcccaaagctgtcgtctttctcgaaccccaatggtatcgggtgctcgaaaaagactctgtgacactgaaatgccaaggggcctactctcccgaggacaactccacacagtggtttcataatgagtccctcatcagctctcaggccagctcttatttcattgatgccgctacagtggacgactccggcgagtatcggtgtcagaccaatctgtctacactgtctgaccccgtgcagcttgaggtccacattggatggttgctcttgcaagccccacgctgggttttcaaagaggaagatccaatccatctgcggtgccacagctggaaaaacaccgctctccacaaagtcacatacctgcaaaatggcaaaggacgcaaatacttccatcacaattccgatttttacattccgaaggctaccctgaaagacagcggcagctatttctgccggggactcgtcggctccaagaatgtgtcctccgaaaccgtgaatatcacgattacccaaggactggctgtgcctacaatctctagcttctttccgcctggataccaagtctccttctgtcttgtgatggtcctcctgtttgctgtggacacaggactgtacttttccgtg

SEQ ID NO: 1486 - DNA, 1452 bp, synthetic construct
  source 1..1452: mol_type = other DNA
atggccttaccagtgaccgccttgctcctgccgctggccttgctgctccacgccgccaggccggacttcgtgatgacacagagccctgatagcctggccgtgtctctcggcgagcgagtgaccatgagctgcaagtctagccagagcctgctgaacagcggcaaccagaagaactacctgacctggtatcagcagaagcccggccagcctcctaagctgctgatctactgggccagcaccagagaaagcggcgtgcccgatagattttctggctctggcagcggcaccgacttcaccctgacaatttctagcctgcaagccgaggacgtggccgtgtactactgccagaacgactacagctacccctacaccttcggccagggcaccaagctggaaatcaaaggcggaggcggaagtggaggcggaggatctggcggcggaggctctgaagtgcaactggttcagagcggagccgagctgaagaaacctggggccagcgtgaaggtgtcctgtaaagccagcggctacacctttaccgactactacatgaaatgggtccgacaggccccaggccagggactcgaatggatcggcgatattatccccagcaacggggccaccttctacaaccagaaattcaagggccgcgtgaccatcaccgtggacaagagcacaagcaccgcctacatggaactgagcagcctgagaagcgaggacaccgccgtgtattattgcgccagaagccatctgctgcgggccagttggttcgcctattggggacagggaaccctggtcaccgttagctctacgcgtggaatgaggactgaggatcttcccaaagctgtcgtctttctcgaaccccaatggtatcgggtgctcgaaaaagactctgtgacactgaaatgccaaggggcctactctcccgaggacaactccacacagtggtttcataatgagtccctcatcagctctcaggccagctcttatttcattgatgccgctacagtggacgactccggcgagtatcggtgtcagaccaatctgtctacactgtctgaccccgtgcagcttgaggtccacattggatggttgctcttgcaagccccacgctgggttttcaaagaggaagatccaatccatctgcggtgccacagctggaaaaacaccgctctccacaaagtcacatacctgcaaaatggcaaaggacgcaaatacttccatcacaattccgatttttacattccgaaggctaccctgaaagacagcggcagctatttctgccggggactcgtcggctccaagaatgtgtcctccgaaaccgtgaatatcacgattacccaaggactggctgtgcctacaatctctagcttctttccgcctggataccaagtctccttctgtcttgtgatggtcctcctgtttgctgtggacacaggactgtacttttccgtg

SEQ ID NO: 1487 - DNA, 1452 bp, synthetic construct
  source 1..1452: mol_type = other DNA
atggccttaccagtgaccgccttgctcctgccgctggccttgctgctccacgccgccaggccggacttcgtgatgacacagagccctgatagcctggccgtgtctctcggcgagcgagtgaccatgagctgcaagtctagccagagcctgctgaacagcggcaaccagaagaactacctgacctggtatcagcagaagcccggccagcctcctaagctgctgatctactgggccagcaccagagaaagcggcgtgcccgatagattttctggctctggcagcggcaccgacttcaccctgacaatttctagcctgcaagccgaggacgtggccgtgtactactgccagaacgactacagctacccctacaccttcggccagggcaccaagctggaaatcaaaggcggaggcggaagtggaggcggaggatctggcggcggaggctctcaagtgcaactggttcagagcggagccgagctgaagaaacctggggccagcgtgaaggtgtcctgtaaagccagcggctacacctttaccgactactacatgaaatgggtccgacaggccccaggccagggactcgaatggatcggcgatattatccccagcaacggggccaccttctacaaccagaaattcaagggccgcgtgaccatcaccgtggacaagagcacaagcaccgcctacatggaactgagcagcctgagaagcgaggacaccgccgtgtattattgcgccagaagccatctgctgcgggccagttggttcgcctattggggacagggaaccctggtcaccgttagctctacgcgtggaatgaggactgaggatcttcccaaagctgtcgtctttctcgaaccccaatggtatcgggtgctcgaaaaagactctgtgacactgaaatgccaaggggcctactctcccgaggacaactccacacagtggtttcataatgagtccctcatcagctctcaggccagctcttatttcattgatgccgctacagtggacgactccggcgagtatcggtgtcagaccaatctgtctacactgtctgaccccgtgcagcttgaggtccacattggatggttgctcttgcaagccccacgctgggttttcaaagaggaagatccaatccatctgcggtgccacagctggaaaaacaccgctctccacaaagtcacatacctgcaaaatggcaaaggacgcaaatacttccatcacaattccgatttttacattccgaaggctaccctgaaagacagcggcagctatttctgccggggactcgtcggctccaagaatgtgtcctccgaaaccgtgaatatcacgattacccaaggactggctgtgcctacaatctctagcttctttccgcctggataccaagtctccttctgtcttgtgatggtcctcctgtttgctgtggacacaggactgtacttttccgtg

SEQ ID NO: 1488 - DNA, 1422 bp, synthetic construct
  source 1..1422: mol_type = other DNA
atggccttaccagtgaccgccttgctcctgccgctggccttgctgctccacgccgccaggccggacgtgcagatcacacagagccctagctacctggctgcctctcctggcgagacaatcaccatcaactgtcgggccagcaagagcatcagcaaggacctggcctggtatcaagagaagcccggcaagaccaacaagctgctgatctacagcggcagcacactccagtctggcatccccagcagattttccggctctggcagcggcaccgatttcaccctgaccataagcagcctggaacctgaggacttcgccatgtactactgccagcagcacaacaagtacccctacacctttggcggaggcaccaagctggaaatcaagagaggcggaggcggaagtggaggcggaggatctggcggcggaggctctcaagttcaactgcaacagcctggggccgagcttgttagacctggcgcttctgtgaagctgagctgcaaggccagcggctacaccttcaccagctactggatgaactgggtcaagcagcggcctgaccagggcctcgaatggatcggcagaatcgacccctacgacagcgagacacactacaaccagaagttcaaggacaaggccatcctgaccgtggacaagagcagctccaccgcctacatgcaactgagcagcctgacctctgaggatagcgccgtgtactattgcgccagaggcaactgggacgactattggggccagggcacaaccctgacagtgtctagtacgcgtggaatgaggactgaggatcttcccaaagctgtcgtctttctcgaaccccaatggtatcgggtgctcgaaaaagactctgtgacactgaaatgccaaggggcctactctcccgaggacaactccacacagtggtttcataatgagtccctcatcagctctcaggccagctcttatttcattgatgccgctacagtggacgactccggcgagtatcggtgtcagaccaatctgtctacactgtctgaccccgtgcagcttgaggtccacattggatggttgctcttgcaagccccacgctgggttttcaaagaggaagatccaatccatctgcggtgccacagctggaaaaacaccgctctccacaaagtcacatacctgcaaaatggcaaaggacgcaaatacttccatcacaattccgatttttacattccgaaggctaccctgaaagacagcggcagctatttctgccggggactcgtcggctccaagaatgtgtcctccgaaaccgtgaatatcacgattacccaaggactggctgtgcctacaatctctagcttctttccgcctggataccaagtctccttctgtcttgtgatggtcctcctgtttgctgtggacacaggactgtacttttccgtg

SEQ ID NO: 1489 - DNA, 1428 bp, synthetic construct
  source 1..1428: mol_type = other DNA
atggccttaccagtgaccgccttgctcctgccgctggccttgctgctccacgccgccaggccggagatcgtgctgacacagagccctaccagcatgacagcctctccaggcgagcaagtgaccatcacctgtagagccagcagcagcatcaactacatgcactggtatcagcagaagcctggcgcaagccccagaccttggatctacgagacaagcaagctggcctccggcgtgcccgatagattttctggatctgccagcggcaccagctacagcctgaccatcaacaacatggaagccgaggacgccgccacctactactgccagcagtggaattacccctcctggacctttggcggaggcaccaagctggaacttaaaggcggaggcggaagtggaggcggaggatctggcggcggaggctctgaagtgcagctcgttgagtctggtggcggactggttcagcctggaagaagcctgaagctgagctgtgccgccagcggcttcaccttcagcgactacaatatggcctgggtccgacaggcccctaagaaaggactggaatgggtcgccaccatcctgtacgatggcggcagaacctactaccggggcagcgtgaagggcagattcaccatcagcagagacaacgccaagagcaccctgtacctgcggatggactctctgagaagcgaggataccgccacatattactgtgccacacacagccggggcaccgactactttgattattggggccagggcgtgatggttaccgtgtctagtacgcgtggaatgaggactgaggatcttcccaaagctgtcgtctttctcgaaccccaatggtatcgggtgctcgaaaaagactctgtgacactgaaatgccaaggggcctactctcccgaggacaactccacacagtggtttcataatgagtccctcatcagctctcaggccagctcttatttcattgatgccgctacagtggacgactccggcgagtatcggtgtcagaccaatctgtctacactgtctgaccccgtgcagcttgaggtccacattggatggttgctcttgcaagccccacgctgggttttcaaagaggaagatccaatccatctgcggtgccacagctggaaaaacaccgctctccacaaagtcacatacctgcaaaatggcaaaggacgcaaatacttccatcacaattccgatttttacattccgaaggctaccctgaaagacagcggcagctatttctgccggggactcgtcggctccaagaatgtgtcctccgaaaccgtgaatatcacgattacccaaggactggctgtgcctacaatctctagcttctttccgcctggataccaagtctccttctgtcttgtgatggtcctcctgtttgctgtggacacaggactgtacttttccgtg

SEQ ID NO: 1490 - DNA, 1455 bp, synthetic construct
  source 1..1455: mol_type = other DNA
atggccttaccagtgaccgccttgctcctgccgctggccttgctgctccacgccgccaggccggacatcgtgatgacacagagcccttctagcctggccgtgtctgagggcgagacagtgaccatcaactgcaagagcagccagagcttcctgtctagcggcgacggcaagaattacgtggcctggtatcagtacaagcccggacagagccccaagctgctgatctactgggccagcacaagacagagcggcgtgcccgatagattcatcggctctggcagcggcaccgacttcaccctgacaatctctacagtgcaggccgaggacctggctatctactactgccagcagtattacgacacccctctgacctttggctccggcaccaagctggaaatcaaaggcggaggcggaagtggaggcggaggatctggcggcggaggctctgaagtgaagctgcaagagtctggccccagcctggtgcagagtagccaaacactgagcctgacctgtaccgtgtccggctttagcctgaccagctaccacatccactgggtccgacagacccctggcaaaggactggaatggatgggcgtgatgtggagcgacggcgacaccagctataacagcgccctgaagtcccggctgagcatcagcagagatacaagccagagccaggtgttcctgaagatgaacagcctccagaccgaggacaccgccacctactattgtgccagaggctactacagcagctacctgtacctttggttcgcctattggggccagggcaccctggttacagtcagctctacgcgtggaatgaggactgaggatcttcccaaagctgtcgtctttctcgaaccccaatggtatcgggtgctcgaaaaagactctgtgacactgaaatgccaaggggcctactctcccgaggacaactccacacagtggtttcataatgagtccctcatcagctctcaggccagctcttatttcattgatgccgctacagtggacgactccggcgagtatcggtgtcagaccaatctgtctacactgtctgaccccgtgcagcttgaggtccacattggatggttgctcttgcaagccccacgctgggttttcaaagaggaagatccaatccatctgcggtgccacagctggaaaaacaccgctctccacaaagtcacatacctgcaaaatggcaaaggacgcaaatacttccatcacaattccgatttttacattccgaaggctaccctgaaagacagcggcagctatttctgccggggactcgtcggctccaagaatgtgtcctccgaaaccgtgaatatcacgattacccaaggactggctgtgcctacaatctctagcttctttccgcctggataccaagtctccttctgtcttgtgatggtcctcctgtttgctgtggacacaggactgtacttttccgtg

SEQ ID NO: 1491 - DNA, 1467 bp, synthetic construct
  source 1..1467: mol_type = other DNA
atggccttaccagtgaccgccttgctcctgccgctggccttgctgctccacgccgccaggccggacgtgctgatgacccagacacctgtgtctctgccagtgtctctcggaggccaggtgtccatctcctgtagaagcagccagagcctggtgcactccgacggcgatacctacctgcactggtatctccagaagcctggacagagccctcagctcctgatctaccgggtgtccaacagattcagcggcgtgcccgatagattttccggcagcggctctggcaccgacttcaccctgaagatcagcagagtggaacccgaggacctgggcctgtactactgtctccagaccacacacttcccaccttggacctttggcggaggcaccaagctggaaatgaaaggcggaggcggaagtggaggcggaggatctggcggcggaggctctcaggttcagctccagcagtctggacccgagcttagaaggccaggatctagcgtcagactgagctgcaaggccagcggctaccggatcaaggacttcctgatccactggattaagaacagacccgagcacggcctggaatggatcggatggattgaccctgaggacggcgagactaagtacgcccagaagttccagaccaaggccacactgaccgccgacacctctagcaacaccgcctacatgcaactgagcagcctgaccagcgaggacaccgccacctacttttgtgctagatggggcgacgtgtactacggcctgatgagaggccatgtgatggatgcctggggccagggaacaagcgtgacagtctcttctacgcgtggaatgaggactgaggatcttcccaaagctgtcgtctttctcgaaccccaatggtatcgggtgctcgaaaaagactctgtgacactgaaatgccaaggggcctactctcccgaggacaactccacacagtggtttcataatgagtccctcatcagctctcaggccagctcttatttcattgatgccgctacagtggacgactccggcgagtatcggtgtcagaccaatctgtctacactgtctgaccccgtgcagcttgaggtccacattggatggttgctcttgcaagccccacgctgggttttcaaagaggaagatccaatccatctgcggtgccacagctggaaaaacaccgctctccacaaagtcacatacctgcaaaatggcaaaggacgcaaatacttccatcacaattccgatttttacattccgaaggctaccctgaaagacagcggcagctatttctgccggggactcgtcggctccaagaatgtgtcctccgaaaccgtgaatatcacgattacccaaggactggctgtgcctacaatctctagcttctttccgcctggataccaagtctccttctgtcttgtgatggtcctcctgtttgctgtggacacaggactgtacttttccgtg

SEQ ID NO: 1492 - DNA, 1455 bp, synthetic construct
  source 1..1455: mol_type = other DNA
atggccttaccagtgaccgccttgctcctgccgctggccttgctgctccacgccgccaggccggacatcgtgatgacccaggccgctcccagcatccctgtgacacctggcgagagcgtgtccatctcctgccggtctagcaagagcctgctgaacagcaacggcaatacctacctgtactggttcctccagcggccaggccagtctccccaactgctgatctaccggatgagcaacctggcctccggcgtgcccgatagattttctggcagcggctccggcaccgccttcaccctgagaatcagcagagtggaagccgaggacgtgggcgtgtactactgtatgcagcacctggaataccccttcaccttcggagccggcaccaagctggaactgaagagaggcggaggcggaagtggaggcggaggatctggcggcggaggctctgaagtgcaactccagcagagcggccctgagctgattaagcctggggccagcgtgaagatgagctgcaaggccagcggctacaccttcaccagctacgtgatgcactgggtcaagcagaagcccggccagggcctggaatggatcggctacatcaacccctacaacgatggcaccaagtacaacgagaagttcaagggcaaggccaccctgaccagcgacaagagcagcagcaccgcctacatggaactgagcagcctgacaagcgaggacagcgccgtgtactattgcgccagaggcacctactactacggcagccgggtgttcgactattggggccagggcaccacactgaccgtgtcctctacgcgtggaatgaggactgaggatcttcccaaagctgtcgtctttctcgaaccccaatggtatcgggtgctcgaaaaagactctgtgacactgaaatgccaaggggcctactctcccgaggacaactccacacagtggtttcataatgagtccctcatcagctctcaggccagctcttatttcattgatgccgctacagtggacgactccggcgagtatcggtgtcagaccaatctgtctacactgtctgaccccgtgcagcttgaggtccacattggatggttgctcttgcaagccccacgctgggttttcaaagaggaagatccaatccatctgcggtgccacagctggaaaaacaccgctctccacaaagtcacatacctgcaaaatggcaaaggacgcaaatacttccatcacaattccgatttttacattccgaaggctaccctgaaagacagcggcagctatttctgccggggactcgtcggctccaagaatgtgtcctccgaaaccgtgaatatcacgattacccaaggactggctgtgcctacaatctctagcttctttccgcctggataccaagtctccttctgtcttgtgatggtcctcctgtttgctgtggacacaggactgtacttttccgtg

SEQ ID NO: 1493 - DNA, 1455 bp, synthetic construct; identical to SEQ ID NO: 1492
  source 1..1455: mol_type = other DNA

SEQ ID NO: 1494 - DNA, 1509 bp, synthetic construct
  source 1..1509: mol_type = other DNA
atggccttaccagtgaccgccttgctcctgccgctggccttgctgctccacgccgccaggccgatcaacatctacaacgccgagcctgccaatcctagcgagaagaacagccccgaattcgacatcgtgatgacacagagccccgccacactgtcactgtctccaggcgaaagagccacactgagctgtcggagcagcaagagcctccagaacgtgaacggcaacacctacctgtactggttccagcagaagcccggccagtctcctcagctcctgatctacagaatgagcaacctgaacagcggcgtgcccgacagattttctggcagcggaagcggcaccgagttcaccctgaccataagcagcctggaacctgaggacttcgccgtgtactactgtatgcagcacctggaataccccatcaccttcggagccggcaccaagctggaaatcaaaggcggaggcggaagtggaggcggaggatctggcggcggaggctctgaagtgcaactggttgaatctggcggcggactggttaagcctggcggatctctgaagctgagctgtgccgccagcggctacacctttaccagctacgtgatgcactgggtccgacaggcccctggcaaaggacttgagtggatcggctacatcaacccctacaacgatggcaccaagtacaacgagaagttccagggcagagtgaccatcagctccgacaagagcatcagcaccgcctacatggaactgagcagcctgagaagcgaggataccgccatgtactattgcgccagaggcacctactactacggcaccagagtgttcgactactggggccagggaaccctggtcacagtctcttctacgcgtggaatgaggactgaggatcttcccaaagctgtcgtctttctcgaaccccaatggtatcgggtgctcgaaaaagactctgtgacactgaaatgccaaggggcctactctcccgaggacaactccacacagtggtttcataatgagtccctcatcagctctcaggccagctcttatttcattgatgccgctacagtggacgactccggcgagtatcggtgtcagaccaatctgtctacactgtctgaccccgtgcagcttgaggtccacattggatggttgctcttgcaagccccacgctgggttttcaaagaggaagatccaatccatctgcggtgccacagctggaaaaacaccgctctccacaaagtcacatacctgcaaaatggcaaaggacgcaaatacttccatcacaattccgatttttacattccgaaggctaccctgaaagacagcggcagctatttctgccggggactcgtcggctccaagaatgtgtcctccgaaaccgtgaatatcacgattacccaaggactggctgtgcctacaatctctagcttctttccgcctggataccaagtctccttctgtcttgtgatggtcctcctgtttgctgtggacacaggactgtacttttccgtg

SEQ ID NO: 1495 - DNA, 1440 bp, synthetic construct
  source 1..1440: mol_type = other DNA
atggccttaccagtgaccgccttgctcctgccgctggccttgctgctccacgccgccaggccggacatccagatgacacagagccctagcagcctgtctgccagcgtgggagacagagtgaccatcacatgcaaggccagcgaccacatcaacaactggctggcctggtatcagcagaagcctggacaggcccctaagctgctgatctacggcgctaccacactggaaacaggcgtgcccagcagattttctggcagcggctctggcaccgactacaccctgacaatatccagcctccagcctgaggacttcgccacctactactgtcagcagagctggaacaccccttggacattcggccagggcaccaagctggaaatcaagagaggcggaggcggaagtggaggcggaggatctggcggcggaggctctcaagttcagcttcaacagcctggcgctgagctggtcaaacctggcgcttctgtgaagatgagctgcaaagccagcggctacgccttcagcagctactggatcaactggatgaagcagaaacccggccagggactcgaatggatcggccaaatctatcccggcgacggcgacaccaactacaacggcaagttcaagggcagagccacactgaccgccgatacctctagcagcacagcctacatgcagctgagcagcctgaccagcgaagatagcgccgtgtacttctgtgcccggtccatcacaacagtcgtgggctgcgctatggactattggggccagggaacaagcgtgaccgtgtctagtacgcgtggaatgaggactgaggatcttcccaaagctgtcgtctttctcgaaccccaatggtatcgggtgctcgaaaaagactctgtgacactgaaatgccaaggggcctactctcccgaggacaactccacacagtggtttcataatgagtccctcatcagctctcaggccagctcttatttcattgatgccgctacagtggacgactccggcgagtatcggtgtcagaccaatctgtctacactgtctgaccccgtgcagcttgaggtccacattggatggttgctcttgcaagccccacgctgggttttcaaagaggaagatccaatccatctgcggtgccacagctggaaaaacaccgctctccacaaagtcacatacctgcaaaatggcaaaggacgcaaatacttccatcacaattccgatttttacattccgaaggctaccctgaaagacagcggcagctatttctgccggggactcgtcggctccaagaatgtgtcctccgaaaccgtgaatatcacgattacccaaggactggctgtgcctacaatctctagcttctttccgcctggataccaagtctccttctgtcttgtgatggtcctcctgtttgctgtggacacaggactgtacttttccgtg

SEQ ID NO: 1496 - DNA, 1446 bp, synthetic construct
  source 1..1446: mol_type = other DNA
atggccttaccagtgaccgccttgctcctgccgctggccttgctgctccacgccgccaggccgcagatcgtgctgtctcagtctcctgccatcctgagcgcttccccaggcgagaaagtgaccatgacctgtagagccagcagcagcgtgtcctacatgcactggtatcagcagaagcccggcagcagccctaagccttggatctacgccaccagcaatctggcctctggcgtgccagccagattttctggctctggcagcggcaccagctacagcttcacaatcagcagagtggaagccgaggacgccgccacctactattgtcagcagtggaccttcaatcctcctaccttcggcggaggcacccggctggaaatcaaaagaacagtggctgctggcggaggcggaagtggaggcggaggatctggcggcggaggctctcaggcttatctgcaacagagcggagccgaactcgtcagacctggcgcttctgtgaagatgagctgcaaggccagcggctacaccttcaccagctataatatgcactgggtcaagcagacccctcggcagggactcgaatggatcggcggaatctatcccggcaacggcgacacctcctacaaccagaagttcaagggcaaagccacactgaccgtgggcaagagcagcagcaccgcctatatgcagctcagcagcctgaccagcgaggacagcgccgtgtacttctgcgccagatacgactacaactacgctatggactactggggccagggcaccagcgtgacagttagctctgccagcacgcgtggaatgaggactgaggatcttcccaaagctgtcgtctttctcgaaccccaatggtatcgggtgctcgaaaaagactctgtgacactgaaatgccaaggggcctactctcccgaggacaactccacacagtggtttcataatgagtccctcatcagctctcaggccagctcttatttcattgatgccgctacagtggacgactccggcgagtatcggtgtcagaccaatctgtctacactgtctgaccccgtgcagcttgaggtccacattggatggttgctcttgcaagccccacgctgggttttcaaagaggaagatccaatccatctgcggtgccacagctggaaaaacaccgctctccacaaagtcacatacctgcaaaatggcaaaggacgcaaatacttccatcacaattccgatttttacattccgaaggctaccctgaaagacagcggcagctatttctgccggggactcgtcggctccaagaatgtgtcctccgaaaccgtgaatatcacgattacccaaggactggctgtgcctacaatctctagcttctttccgcctggataccaagtctccttctgtcttgtgatggtcctcctgtttgctgtggacacaggactgtacttttccgtg

SEQ ID NO: 1497 - DNA, 1443 bp, synthetic construct
  source 1..1443: mol_type = other DNA
atggccttaccagtgaccgccttgctcctgccgctggccttgctgctccacgccgccaggccggacgagatcgtgctgacacagagccctgccaccctgtctctgagccctggcgaaagagccaccctgagctgtagagccagccagagcgtgtccagctacctggcctggtatcagcagaagcccggccaggctccccggctgctgatctacgatgccagcaatagagccaccggcatccccgccagattttccggctctggcagcggcaccgacttcaccctgaccatcagctccctggaacccgaggacttcgccgtgtactactgccagcagcggagcaactggcccatcacattcggccagggcacccggctggaaatcaaaggcggaggcggaagtggaggcggaggatctggcggcggaggctctgaggtgcagcttgttgagtctggcggaggactggtgcagcccgatagaagcctgagactgtcttgtgccgccagcggcttcaccttccacgattatgccatgcactgggtccgacaggcccctggcaaaggacttgaatgggtgtccaccatctcttggaacagcggcacaatcggctacgccgactctgtgaagggcagattcaccatcagccgggacaacgccaagaacagcctgtacctccagatgaactccctgagagccgaggacacagccctgtactactgcgccaaggacatccagtacggcaactactactacggcatggacgtgtggggccagggcacaacagtgacagtctcttctacgcgtggaatgaggactgaggatcttcccaaagctgtcgtctttctcgaaccccaatggtatcgggtgctcgaaaaagactctgtgacactgaaatgccaaggggcctactctcccgaggacaactccacacagtggtttcataatgagtccctcatcagctctcaggccagctcttatttcattgatgccgctacagtggacgactccggcgagtatcggtgtcagaccaatctgtctacactgtctgaccccgtgcagcttgaggtccacattggatggttgctcttgcaagccccacgctgggttttcaaagaggaagatccaatccatctgcggtgccacagctggaaaaacaccgctctccacaaagtcacatacctgcaaaatggcaaaggacgcaaatacttccatcacaattccgatttttacattccgaaggctaccctgaaagacagcggcagctatttctgccggggactcgtcggctccaagaatgtgtcctccgaaaccgtgaatatcacgattacccaaggactggctgtgcctacaatctctagcttctttccgcctggataccaagtctccttctgtcttgtgatggtcctcctgtttgctgtggacacaggactgtacttttccgtg

SEQ ID NO: 1498 - DNA, 1425 bp, synthetic construct
  source 1..1425: mol_type = other DNA
atggccttaccagtgaccgccttgctcctgccgctggccttgctgctccacgccgccaggccggacatccagatgacacagagccctagcagcctgtctgccagcgtgggagatagagtgaccatcaactgcaaggccagccaggacatcaacagctacctgagctggttccagcagaagcctggcaaggcccctaagacactgatctaccgggccaacagactggtggatggcgtgccaagcagattttctggcagcggcagcggccaggattacaccctgacaatatccagcctccagcctgaggacttcgccacctactactgcctccagtacgacgagttccctctgacctttggcggaggcaccaaggtggaaatcaaaggcggaggcggaagtggaggcggaggatctggcggcggaggctctcaggtgcaactggtgcagtctggggccgaagtgaagaaacctggggcctctgtgaaggtgtcctgcaaagccagcggctacacctttaccaactacgacatcaactgggtccgacaggctccaggccaaggactggaatggatcggctggatctatcctggcgacggcagcaccaagtacaacgagaagttcaaggccaaggccacactgaccgccgataccagcacaagcaccgcctacatggaactgcggagcctgagaagcgacgacaccgccgtgtactattgtgcctccggctacgaggacgctatggactattggggccagggcaccaccgtgacagtgtctagtacgcgtggaatgaggactgaggatcttcccaaagctgtcgtctttctcgaaccccaatggtatcgggtgctcgaaaaagactctgtgacactgaaatgccaaggggcctactctcccgaggacaactccacacagtggtttcataatgagtccctcatcagctctcaggccagctcttatttcattgatgccgctacagtggacgactccggcgagtatcggtgtcagaccaatctgtctacactgtctgaccccgtgcagcttgaggtccacattggatggttgctcttgcaagccccacgctgggttttcaaagaggaagatccaatccatctgcggtgccacagctggaaaaacaccgctctccacaaagtcacatacctgcaaaatggcaaaggacgcaaatacttccatcacaattccgatttttacattccgaaggctaccctgaaagacagcggcagctatttctgccggggactcgtcggctccaagaatgtgtcctccgaaaccgtgaatatcacgattacccaaggactggctgtgcctacaatctctagcttctttccgcctggataccaagtctccttctgtcttgtgatggtcctcctgtttgctgtggacacaggactgtacttttccgtg

SEQ ID NO: 1499 - DNA, 1431 bp, synthetic construct
  source 1..1431: mol_type = other DNA
atggccttaccagtgaccgccttgctcctgccgctggccttgctgctccacgccgccaggccggacatcgtgatgacccagacacctctgagcctgagcgtgacacctggacagcctgccagcattagctgcaagagcagccagtctctgctggacggcgacggcaagacctacctgaattggctgctccagaagcctggacagagccctcagcggctgatctacctggtgtccaagctggatagcggcgtgcccgatagattttctggcagcggctctggcaccgacttcaccctgaagatcagcagagtggaagccgaggacgtgggcgtgtactactgttggcagggcacacacttccccagaacattcggccagggcacaaagctggaaatcaaaggcggaggcggaagtggaggcggaggatctggcggcggaggctctcaagtgcaactggttcagagcggagccgaagtgaagaaacctggggcctctgtgaaggtgtcctgcaaggccagcggctacaccttcaaggacacctacatccactgggtccgacaggcccctggacaaggacttgagtggatgggcagaatcgaccccgccaacggcaacaccaaatacgaccccaagttccagggcagagtgaccatgaccagagacaccagcatcagcaccgcctacatggaactgagccggctgagatccgatgacaccgccgtgtactattgcgctagaagaggcggagtggattggggccagggaacactggttaccgtgtctagtacgcgtggaatgaggactgaggatcttcccaaagctgtcgtctttctcgaaccccaatggtatcgggtgctcgaaaaagactctgtgacactgaaatgccaaggggcctactctcccgaggacaactccacacagtggtttcataatgagtccctcatcagctctcaggccagctcttatttcattgatgccgctacagtggacgactccggcgagtatcggtgtcagaccaatctgtctacactgtctgaccccgtgcagcttgaggtccacattggatggttgctcttgcaagccccacgctgggttttcaaagaggaagatccaatccatctgcggtgccacagctggaaaaacaccgctctccacaaagtcacatacctgcaaaatggcaaaggacgcaaatacttccatcacaattccgatttttacattccgaaggctaccctgaaagacagcggcagctatttctgccggggactcgtcggctccaagaatgtgtcctccgaaaccgtgaatatcacgattacccaaggactggctgtgcctacaatctctagcttctttccgcctggataccaagtctccttctgtcttgtgatggtcctcctgtttgctgtggacacaggactgtacttttccgtg

SEQ ID NO: 1500 - DNA, 1434 bp, synthetic construct
  source 1..1434: mol_type = other DNA
atggccttaccagtgaccgccttgctcctgccgctggccttgctgctccacgccgccaggccggacatccagatgacacagagccctagcagcctgtctgccagcgtgggagacagagtgaccatcacatgcaaggccagccaggatgtgtctacagccgtggcctggttccagcagaagcctggaaaagcccctaagctgctgatctacagccccagctacagatacaccggcgtgcccagcagattttctggcagcggctctggcaccgacttcaccctgacaatatccagcctccagcctgaggacttcacctactactgccagcagctctacagcaccccttacacattcggccagggcaccaaggtggaaatcaaaggcggaggcggaagtggaggcggaggatctggcggcggaggctctgaagtgcaactggttcagagcggagccgaagtgaagaaacctggggcctctgtgaaggtgtcctgcaaagccagcggctacacctttaccgactactacctggacgtggtcgtgcggcaagctcctggacaaggactggaatggatcggcagagtgaacccctacaacggcggcaccatctacaaccagaaattcaagggaagagtgaccctgaccagagacaccagcacctccacagcctacctggaactgagcagcctgagaagcgaagataccgccgtgtactactgcgccagggaccactacagatatgaccctctgctggactactggggccagggaaccctggttacagtgtctagtacgcgtggaatgaggactgaggatcttcccaaagctgtcgtctttctcgaaccccaatggtatcgggtgctcgaaaaagactctgtgacactgaaatgccaaggggcctactctcccgaggacaactccacacagtggtttcataatgagtccctcatcagctctcaggccagctcttatttcattgatgccgctacagtggacgactccggcgagtatcggtgtcagaccaatctgtctacactgtctgaccccgtgcagcttgaggtccacattggatggttgctcttgcaagccccacgctgggttttcaaagaggaagatccaatccatctgcggtgccacagctggaaaaacaccgctctccacaaagtcacatacctgcaaaatggcaaaggacgcaaatacttccatcacaattccgatttttacattccgaaggctaccctgaaagacagcggcagctatttctgccggggactcgtcggctccaagaatgtgtcctccgaaaccgtgaatatcacgattacccaaggactggctgtgcctacaatctctagcttctttccgcctggataccaagtctccttctgtcttgtgatggtcctcctgtttgctgtggacacaggactgtacttttccgtg

SEQ ID NO: 1501 - DNA, 1452 bp, synthetic construct
  source 1..1452: mol_type = other DNA
atggccttaccagtgaccgccttgctcctgccgctggccttgctgctccacgccgccaggccggacatccagatgacacagagccctagcagcctgtctgccagcgtgggagacagagtgaccatcacctgtagagccagccagagcgtgtccaccagcagctacaactacatgcactggtatcagcagaagcccggcaagcctcctaagctgctgattaagtacgccagcaacctggaaagcggcgtgcccagcagattttctggcagcggctctggcaccgacttcaccctgacaatatccagcctccagcctgaggacttcgccacctactactgtcagcactcctgggagatccctctgacattcggccagggcaccaaggtggaaatcaaaggcggaggcggaagtggaggcggaggatctggcggcggaggctctgaagtgcaactggttcagagcggagccgaagtgaagaaacctggggcctctgtgaaggtgtcctgcaaggccagcggctacagcttcaccgactattatatgcactgggtccgacaggctccaggccagggacttgagtggatcggcagaatcaacccctacaacggcgctgccttctacagccagaacttcaaggatagagtgaccctgaccgtggacaccagcaccagcacagcctacctggaactgagcagcctgagaagcgaggacaccgccgtgtactactgcgccattgagagaggcgctgacctggaaggctacgctatggattattggggccagggaaccctggtcaccgtgtcatctacgcgtggaatgaggactgaggatcttcccaaagctgtcgtctttctcgaaccccaatggtatcgggtgctcgaaaaagactctgtgacactgaaatgccaaggggcctactctcccgaggacaactccacacagtggtttcataatgagtccctcatcagctctcaggccagctcttatttcattgatgccgctacagtggacgactccggcgagtatcggtgtcagaccaatctgtctacactgtctgaccccgtgcagcttgaggtccacattggatggttgctcttgcaagccccacgctgggttttcaaagaggaagatccaatccatctgcggtgccacagctggaaaaacaccgctctccacaaagtcacatacctgcaaaatggcaaaggacgcaaatacttccatcacaattccgatttttacattccgaaggctaccctgaaagacagcggcagctatttctgccggggactcgtcggctccaagaatgtgtcctccgaaaccgtgaatatcacgattacccaaggactggctgtgcctacaatctctagcttctttccgcctggataccaagtctccttctgtcttgtgatggtcctcctgtttgctgtggacacaggactgtacttttccgtg

SEQ ID NO: 1502 - DNA, 1446 bp, synthetic construct
  source 1..1446: mol_type = other DNA
atggccttaccagtgaccgccttgctcctgccgctggccttgctgctccacgccgccaggccggagatcgtgctgacacagtctccagccacactgagcgcttctccaggcgagagagtgaccctgacctgtagagccagcagcaacgtgatctccagctacgtgcactggtatcagcagaagcctggcagcagccccagactgtttctgtacagcaccagcaatctggcctccggcgtgccaagcagattttctggctctggcagcggcaccgacttcacctttaccatctctagcctggaagccgaggacgccgccacctactactgtcagcagtacagcggctaccctctgaccttcggccagggcacaagactggaaatcaaaggcggaggcggaagtggaggcggaggatctggcggcggaggctctcaagttcagctgcaagagtctggccctggcctggtcaagcctagcgaaacactgagcctgacctgcgccgtgtctggctactctatcaccagcgcctactattggaactggatcagacagcctcctggcaaaggactggaatggatcggctacatcagctacgacggcagaaacaactacaaccccagcctgaagaaccggatcaccatcaatcccgacaccagcaagaaccagttcagcctccagctgaacagcgtgacccctgaggataccgccgtgtactactgtgccagagaaggcgactacgacgtgggcaactactacgctatggactactggggccagggaaccctggtcacagtctcttctacgcgtggaatgaggactgaggatcttcccaaagctgtcgtctttctcgaaccccaatggtatcgggtgctcgaaaaagactctgtgacactgaaatgccaaggggcctactctcccgaggacaactccacacagtggtttcataatgagtccctcatcagctctcaggccagctcttatttcattgatgccgctacagtggacgactccggcgagtatcggtgtcagaccaatctgtctacactgtctgaccccgtgcagcttgaggtccacattggatggttgctcttgcaagccccacgctgggttttcaaagaggaagatccaatccatctgcggtgccacagctggaaaaacaccgctctccacaaagtcacatacctgcaaaatggcaaaggacgcaaatacttccatcacaattccgatttttacattccgaaggctaccctgaaagacagcggcagctatttctgccggggactcgtcggctccaagaatgtgtcctccgaaaccgtgaatatcacgattacccaaggactggctgtgcctacaatctctagcttctttccgcctggataccaagtctccttctgtcttgtgatggtcctcctgtttgctgtggacacaggactgtacttttccgtg

SEQ ID NO: 1503 - DNA, 1446 bp, synthetic construct
  source 1..1446: mol_type = other DNA
atggccttaccagtgaccgccttgctcctgccgctggccttgctgctccacgccgccaggccggagatcgtgctgacacagtctcccgccacactgtcactgtctccaggcgaaagagccacactgagctgtagagccagcagcaacgtgatctccagctacgtgcactggtatcagcagaagcctggacaggcccctcggctgctgatctacagcacaagcaatctggcctctggcatccccgccagattttctggctctggaagcggcaccgacttcaccctgaccataagcagcctggaacctgaggacttcgccgtgtactactgccagcagtatagcggctaccctctgaccttcggccagggcacaagactggaaatcaaaggcggaggcggaagtggaggcggaggatctggcggcggaggctctgaagtgcaactggtggaaagtggcggcggactggtgcaacctggaagaagcctgagactgtcctgtgccgccagcggctactctatcacaagcgcctactactggaactgggtccgacaggctcctggcaaaggactggaatgggtgtcctacatcagctacgacggcagaaacaactacaaccccagcctgaagaaccgcttcaccatcagccgggacaacgccaagaagtccctgtacctccagatgaacagcctgagagccgaggacacagccctgtactattgcgccaaagagggcgactacgacgtcggcaactactacgctatggactactggggccagggaaccaccgtgactgtctcttctacgcgtggaatgaggactgaggatcttcccaaagctgtcgtctttctcgaaccccaatggtatcgggtgctcgaaaaagactctgtgacactgaaatgccaaggggcctactctcccgaggacaactccacacagtggtttcataatgagtccctcatcagctctcaggccagctcttatttcattgatgccgctacagtggacgactccggcgagtatcggtgtcagaccaatctgtctacactgtctgaccccgtgcagcttgaggtccacattggatggttgctcttgcaagccccacgctgggttttcaaagaggaagatccaatccatctgcggtgccacagctggaaaaacaccgctctccacaaagtcacatacctgcaaaatggcaaaggacgcaaatacttccatcacaattccgatttttacattccgaaggctaccctgaaagacagcggcagctatttctgccggggactcgtcggctccaagaatgtgtcctccgaaaccgtgaatatcacgattacccaaggactggctgtgcctacaatctctagcttctttccgcctggataccaagtctccttctgtcttgtgatggtcctcctgtttgctgtggacacaggactgtacttttccgtg

SEQ ID NO: 1504 - DNA, 1473 bp, synthetic construct
  source 1..1473: mol_type = other DNA
atggccttaccagtgaccgccttgctcctgccgctggccttgctgctccacgccgccaggccggacgtggtcatgacacagaccccactgagcctgcctgtgtctctgggagatcaggccagcatctcctgtagaagcagccagagcctggtgcacagcaacggcaacacctacctgcggtggtatctccagaagcctggacagagccccaaggtgctgatctacaaggtgtccaacagagtgtccggcgtgcccgatagattttctggcagcggctctggcaccgacttcaccctgaagatcaatagagtggaagccgaggacctgggcgtgtacttctgtagccagagcacccatgtgccttggacctttggcggaggcaccaagctggaaatcaagagcagcgccgacgacgccaagaaggacgccgccaaaaaggatgatgccaagaaagacgatgctaaaaaagacggcggcgtgaagctggacgagacaggcggaggacttgttcaacctggcggagccatgaagctgagctgtgtgaccagcggctttaccttcggccactactggatgaactgggtccgacagtcccctgagaaaggactggaatgggtcgcccagttcagaaacaagccctacaactacgaaacctactacagcgacagcgtgaagggcagattcaccatcagccgggacgacagcaagtccagcgtgtacctccagatgaacaacctgcgcgtggaagataccggcatctactactgtaccggggccagctacggcatggaatatctcggccagggcaccagcgtgaccgtgtctacaacgcgtggaatgaggactgaggatcttcccaaagctgtcgtctttctcgaaccccaatggtatcgggtgctcgaaaaagactctgtgacactgaaatgccaaggggcctactctcccgaggacaactccacacagtggtttcataatgagtccctcatcagctctcaggccagctcttatttcattgatgccgctacagtggacgactccggcgagtatcggtgtcagaccaatctgtctacactgtctgaccccgtgcagcttgaggtccacattggatggttgctcttgcaagccccacgctgggttttcaaagaggaagatccaatccatctgcggtgccacagctggaaaaacaccgctctccacaaagtcacatacctgcaaaatggcaaaggacgcaaatacttccatcacaattccgatttttacattccgaaggctaccctgaaagacagcggcagctatttctgccggggactcgtcggctccaagaatgtgtcctccgaaaccgtgaatatcacgattacccaaggactggctgtgcctacaatctctagcttctttccgcctggataccaagtctccttctgtcttgtgatggtcctcctgtttgctgtggacacaggactgtacttttccgtg

SEQ ID NO: 1505 - DNA, 1461 bp, synthetic construct
  source 1..1461: mol_type = other DNA
atggccttaccagtgaccgccttgctcctgccgctggccttgctgctccacgccgccaggccgcaggtgcaactggtggaatctggcggcaatctggttcagcctggcggctctctgagactgtcttgtgccgccagcggcttcaccttcggcagcttttctatgagctgggtccgacaagctcctggcggaggacttgaatgggtggcaggactgtctgccagaagcagcctgacacactacgccgactctgtgaagggcagattcaccatcagccgggacaacgccaagaacagcgtgtacctccagatgaacagcctgagagtggaagataccgccgtgtactactgcgccagaagaagctacgacagcagcggctactggggccacttctacagctacatggatgtgtggggccagggcaccctggttacagtttctggcggaggcggaagtggaggcggaggatctggcggcggaggctcttctgtgctgacccagcctagctccgtgtctgctgctcctggacagaaagtgaccatctcctgtagcggcagcaccagcaacatcggcaacaactacgtgtcctggtatcagcagcaccccggcaaggcccctaagctgatgatctacgacgtgtccaagaggcccagcggcgtgccagatagattttccggcagcaagagcggcaacagcgccagcctggatattagcggactccagtctgaggacgaggccgactactattgcgccgcctgggatgatagcctgagcgagtttctgtttggcaccggcaccaagctgacagtgcttggaacgcgtggaatgaggactgaggatcttcccaaagctgtcgtctttctcgaaccccaatggtatcgggtgctcgaaaaagactctgtgacactgaaatgccaaggggcctactctcccgaggacaactccacacagtggtttcataatgagtccctcatcagctctcaggccagctcttatttcattgatgccgctacagtggacgactccggcgagtatcggtgtcagaccaatctgtctacactgtctgaccccgtgcagcttgaggtccacattggatggttgctcttgcaagccccacgctgggttttcaaagaggaagatccaatccatctgcggtgccacagctggaaaaacaccgctctccacaaagtcacatacctgcaaaatggcaaaggacgcaaatacttccatcacaattccgatttttacattccgaaggctaccctgaaagacagcggcagctatttctgccggggactcgtcggctccaagaatgtgtcctccgaaaccgtgaatatcacgattacccaaggactggctgtgcctacaatctctagcttctttccgcctggataccaagtctccttctgtcttgtgatggtcctcctgtttgctgtggacacaggactgtacttttccgtg

SEQ ID NO: 1506 - DNA, 1434 bp, synthetic construct
  source 1..1434: mol_type = other DNA
atggccttaccagtgaccgccttgctcctgccgctggccttgctgctccacgccgccaggccgcagtctgtggtcacacagcctccatctgtgtctggcgctccaggccagagagtgaccatctcttgtaccggcagcagcagcaatatcggagccggctatgacgtgcactggtatcagcagctccctggcacagcccctaaactgctgatctacggcaacagcaacagacccagcggcgtgcccgatagattttccggctctaagagcggcacaagcgccagcctggctattactggactccaggccgaggacgaggccgactactactgtcagagctacgacagcagcctgagcggcagctatgtgtttggcaccggcaccaagctgacagtgcttggaggcggaggcggaagtggaggcggaggatctggcggcggaggctctgaagttcaactggtggaaaccggcggcaacctggttcaacctggcgcttctctgagactgagctgtgccgccagcggctttagctttagcggaacagccatgcactgggtccgacaggcacctggcaaaggactggaatgggtgtccaccatcagcagcacaggcagaagcacctactaccgggacagcgtgaagggcagattcaccatctccagagacaacagcaagaacaccctgtacctccagatgaacagcctgagaggcgaggacaccgccgtgtactattgtgccagagtgtccttcgactactggggccagggaaccctggtcacagtctcttctacgcgtggaatgaggactgaggatcttcccaaagctgtcgtctttctcgaaccccaatggtatcgggtgctcgaaaaagactctgtgacactgaaatgccaaggggcctactctcccgaggacaactccacacagtggtttcataatgagtccctcatcagctctcaggccagctcttatttcattgatgccgctacagtggacgactccggcgagtatcggtgtcagaccaatctgtctacactgtctgaccccgtgcagcttgaggtccacattggatggttgctcttgcaagccccacgctgggttttcaaagaggaagatccaatccatctgcggtgccacagctggaaaaacaccgctctccacaaagtcacatacctgcaaaatggcaaaggacgcaaatacttccatcacaattccgatttttacattccgaaggctaccctgaaagacagcggcagctatttctgccggggactcgtcggctccaagaatgtgtcctccgaaaccgtgaatatcacgattacccaaggactggctgtgcctacaatctctagcttctttccgcctggataccaagtctccttctgtcttgtgatggtcctcctgtttgctgtggacacaggactgtacttttccgtg

SEQ ID NO: 1507 - DNA, 1440 bp, synthetic construct
  source 1..1440: mol_type = other DNA
atggccttaccagtgaccgccttgctcctgccgctggccttgctgctccacgccgccaggccgcagtctgtggttacacagcctgcctccgtgtctggctctcctggccagagcatcaccatcagctgtaccggcaccagctctgatgtcggcggctacaattacgtgtcctggtatcagcagcaccccggcaaggcccctaagctgatgatctacgacgtgtccaagaggcccagcggcgtgtccaatagattcagcggcagcaagagcggcaacaccgccagcctgacaatttctggactgcaagccgaggacgaggccgactactactgtagcagctacaccagcagcagcacactggtgtttggcggaggcaccaagctgacagttcttggaggcggaggcggaagtggaggcggaggatctggcggcggaggctctgaagttcagctggttgaaagcggcggagcctttgttcagcctggcggatctctgagactgagctgtgccgccagcggcttcacattttccagctacgccatgacctgggtccgacaggctcctggcaaaggactggaatgggtgtccaccatctccggcagaggcagaagcaccttctacgccgatagcgtgaagggcagattcacaatcagccgggacaacagcaagaacaccctgtacctccagatgaacagcctgagagccgaggataccgccgtgtactactgtgcccggtactatcacgctggcgcctttgatctttggggccagggaacactggtcaccgtgtcatctacgcgtggaatgaggactgaggatcttcccaaagctgtcgtctttctcgaaccccaatggtatcgggtgctcgaaaaagactctgtgacactgaaatgccaaggggcctactctcccgaggacaactccacacagtggtttcataatgagtccctcatcagctctcaggccagctcttatttcattgatgccgctacagtggacgactccggcgagtatcggtgtcagaccaatctgtctacactgtctgaccccgtgcagcttgaggtccacattggatggttgctcttgcaagccccacgctgggttttcaaagaggaagatccaatccatctgcggtgccacagctggaaaaacaccgctctccacaaagtcacatacctgcaaaatggcaaaggacgcaaatacttccatcacaattccgatttttacattccgaaggctaccctgaaagacagcggcagctatttctgccggggactcgtcggctccaagaatgtgtcctccgaaaccgtgaatatcacgattacccaaggactggctgtgcctacaatctctagcttctttccgcctggataccaagtctccttctgtcttgtgatggtcctcctgtttgctgtggacacaggactgtacttttccgtg

SEQ ID NO: 1508 - DNA, 1446 bp, synthetic construct
  source 1..1446: mol_type = other DNA
atggccttaccagtgaccgccttgctcctgccgctggccttgctgctccacgccgccaggccggacgtggtcatgacacagagcccttctagcctgtctgccagcgtgggcgacagagtgacaatcacctgtcagagcagcctggacatcagccactacctgaactggtatcagcagaagcccggcaaggcccctaagctgctgatctacgacgccagcaatctggaaaccggcgtgcccagcagattttctggcagcggaagcggcacccacttcaccttcacaatatccagcctccagcctgaggacttcgccacctactactgccagcagtacgacaacctgcctctgacctttggcggaggcaccaagctggaaatcaagagaggcggaggcggaagtggaggcggaggatctggcggcggaggctctcaagttcaactggttcaatcaggcggaggcgtggtgcaacctggtggctctctgagagtgtcttgtgctgcctctggcgtgaccctgagcgactatggaatgcactgggtccgacaggcccctggcaaaggacttgagtgggtcgccttcatcagaaacgacggcagcgacaagtattacgccgacagcgtgaagggcagattcaccatcagccgggacaacagcgagaaaaccgtgtctctccagatgtctagcctgagagccgaggacaccgccgtgtactactgtgccaagaatggcgagagcggccctctggactactggtatctggatctgtggggcagaggcaccctggtcacagtctcttctacgcgtggaatgaggactgaggatcttcccaaagctgtcgtctttctcgaaccccaatggtatcgggtgctcgaaaaagactctgtgacactgaaatgccaaggggcctactctcccgaggacaactccacacagtggtttcataatgagtccctcatcagctctcaggccagctcttatttcattgatgccgctacagtggacgactccggcgagtatcggtgtcagaccaatctgtctacactgtctgaccccgtgcagcttgaggtccacattggatggttgctcttgcaagccccacgctgggttttcaaagaggaagatccaatccatctgcggtgccacagctggaaaaacaccgctctccacaaagtcacatacctgcaaaatggcaaaggacgcaaatacttccatcacaattccgatttttacattccgaaggctaccctgaaagacagcggcagctatttctgccggggactcgtcggctccaagaatgtgtcctccgaaaccgtgaatatcacgattacccaaggactggctgtgcctacaatctctagcttctttccgcctggataccaagtctccttctgtcttgtgatggtcctcctgtttgctgtggacacaggactgtacttttccgtg

SEQ ID NO: 1509 - DNA, 1467 bp, synthetic construct
  source 1..1467: mol_type = other DNA
atggccttaccagtgaccgccttgctcctgccgctggccttgctgctccacgccgccaggccggacgtgatgctgacccagacaccactgagcctgcctgtgtctctgggcgatcaggccagcatctcctgtagaagcagccagagcatcctgcacagcaccggcgatacctacctggaatggtatctccagaagcctggacagagccccaagctgctgattaacaaggtgtccaaccggctgagcggcgtgcccgatagattttctggcagcggctctggcaccgacttcaccctgaagatcagcagagtggaagccgaggacctgggcgtgtactactgcttccaaggcagccatgttccttggacctttggcggaggcaccaagctggaaatcaagagagctgacgccgctcctaccgtgtccatctttcctggaggcggtggaagtggcggcggtggttcaggcggcggaggatctcaagtgaagctccagcagagcggccctagccttgtgaaacctggcgcttccgtgaagatgagctgcaaggccagcggctacaccttcaccgatttctacatgaaatgggtcaagcagagccacggcaagtctctggaatggatcggcgacatcaaccccaacatcggagacaccttctacaaccagaagttcaagggcaaagccacactgaccgtggacaagagcagcagcaccgcctacatgcagctcaacagcctgaccagcgaggacagcgccgtgtacttttgttccgtgggctacttcgacgtgtggggagccggaacaaccgtgacagtctcttctacgcgtggaatgaggactgaggatcttcccaaagctgtcgtctttctcgaaccccaatggtatcgggtgctcgaaaaagactctgtgacactgaaatgccaaggggcctactctcccgaggacaactccacacagtggtttcataatgagtccctcatcagctctcaggccagctcttatttcattgatgccgctacagtggacgactccggcgagtatcggtgtcagaccaatctgtctacactgtctgaccccgtgcagcttgaggtccacattggatggttgctcttgcaagccccacgctgggttttcaaagaggaagatccaatccatctgcggtgccacagctggaaaaacaccgctctccacaaagtcacatacctgcaaaatggcaaaggacgcaaatacttccatcacaattccgatttttacattccgaaggctaccctgaaagacagcggcagctatttctgccggggactcgtcggctccaagaatgtgtcctccgaaaccgtgaatatcacgattacccaaggactggctgtgcctacaatctctagcttctttccgcctggataccaagtctccttctgtcttgtgatggtcctcctgtttgctgtggacacaggactgtacttttccgtg

SEQ ID NO: 1510 - DNA, 1467 bp, synthetic construct
  source 1..1467: mol_type = other DNA
atggccttaccagtgaccgccttgctcctgccgctggccttgctgctccacgccgccaggccgctgcctgttctgacacagcctccatccgtgtctgtggcccctggaaagaccgccagaatcacatgcggcggcaacaacatcggcagcaagagcgtgcactggtatcagcagaagcctggacaggctcctgtgctggtggtgtacgacgacagcgatagacctagcggcatccccgagagattcagcggcagcaattccggcaataccgccacactgaccatcagcagagtggaagctggcgacgaggccgactactactgccaagtgtgggacagcagcagcgactacgtggtgtttggcggcggaacaaagctgacagtgcttggcggaggcggaagtggaggcggaggatctggcggcggaggctctgaagttcaactggtgcagagcggagccgaagtgaagaagccaggcgagagcctgaagattagctgcaaaggcagcggctacagcttcaccagctactggatcggctgggtccgacagatgcctggcaaaggactggaatggatgggcatcatctaccccggcgacagcgacaccagatacagccctagctttcagggccaagtgaccatctccgccgacaagagcatcagcacagcctacctccagtggtcctctctgaaggccagcgataccgccatgtactactgcgccagacaagtctggggatggcaaggcggcatgtaccccaggtctaactggtggtacaacctggactcttggggccagggcacactggtcacagtctcttctacgcgtggaatgaggactgaggatcttcccaaagctgtcgtctttctcgaaccccaatggtatcgggtgctcgaaaaagactctgtgacactgaaatgccaaggggcctactctcccgaggacaactccacacagtggtttcataatgagtccctcatcagctctcaggccagctcttatttcattgatgccgctacagtggacgactccggcgagtatcggtgtcagaccaatctgtctacactgtctgaccccgtgcagcttgaggtccacattggatggttgctcttgcaagccccacgctgggttttcaaagaggaagatccaatccatctgcggtgccacagctggaaaaacaccgctctccacaaagtcacatacctgcaaaatggcaaaggacgcaaatacttccatcacaattccgatttttacattccgaaggctaccctgaaagacagcggcagctatttctgccggggactcgtcggctccaagaatgtgtcctccgaaaccgtgaatatcacgattacccaaggactggctgtgcctacaatctctagcttctttccgcctggataccaagtctccttctgtcttgtgatggtcctcctgtttgctgtggacacaggactgtacttttccgtg

SEQ ID NO: 1511 - DNA, 1446 bp, synthetic construct
  source 1..1446: mol_type = other DNA
atggccttaccagtgaccgccttgctcctgccgctggccttgctgctccacgccgccaggccggagctggtcatgacacagagccctgcttctctggccgtgtcactgggacagagagccaccatctcttgcagagccagcgagagcgtggacagctacggcaagagcttcatgcactggtatcagctcaagcccggccagcctcctaagctgctgatctacagagcctccaacctggaaagcggcgtgccagccagattttctggcagcggcagcagaaccgacttcaccctgaccattgatcccgtggaagccgatgatgccgccacctactactgccagcagaacaacgaggacccctggacatttggcggaggcaccaagctggaaatcaaaggcggaggcggaagtggaggcggaggatctggcggcggaggctctgaagtgcagctcgaacagtctggccccgagcttgtgaaacctggcgcttccgtgaagatgagctgcaaggccagcggctacaccttcaccaactactacatgaaatgggtcaagcagagccacggcaagtccctggaatggatcggcgatctgaaccccaacaacggcgacaccttctacaaccagaagttcaagggcaaagccacactgaccgtggacaagagcagcaacaccgcctacatgcagctcaactccctgaccagcgaggacagcgccgtgtactactgtgccagaaccggcagatacgaagagaacgctatggactactggggccagggcacaagcgtgacagtctcttctacgcgtggaatgaggactgaggatcttcccaaagctgtcgtctttctcgaaccccaatggtatcgggtgctcgaaaaagactctgtgacactgaaatgccaaggggcctactctcccgaggacaactccacacagtggtttcataatgagtccctcatcagctctcaggccagctcttatttcattgatgccgctacagtggacgactccggcgagtatcggtgtcagaccaatctgtctacactgtctgaccccgtgcagcttgaggtccacattggatggttgctcttgcaagccccacgctgggttttcaaagaggaagatccaatccatctgcggtgccacagctggaaaaacaccgctctccacaaagtcacatacctgcaaaatggcaaaggacgcaaatacttccatcacaattccgatttttacattccgaaggctaccctgaaagacagcggcagctatttctgccggggactcgtcggctccaagaatgtgtcctccgaaaccgtgaatatcacgattacccaaggactggctgtgcctacaatctctagcttctttccgcctggataccaagtctccttctgtcttgtgatggtcctcctgtttgctgtggacacaggactgtacttttccgtg

SEQ ID NO: 1512 - DNA, 1440 bp, synthetic construct; identical to SEQ ID NO: 1485
  source 1..1440: mol_type = other DNA

SEQ ID NO: 1513 - DNA, 1440 bp, synthetic construct; identical to SEQ ID NO: 1394
  source 1..1440: mol_type = other DNA

SEQ ID NO: 1514 - DNA, 1428 bp, synthetic construct
  source 1..1428: mol_type = other DNA
atggccttaccagtgaccgccttgctcctgccgctggccttgctgctccacgccgccaggccggacgtggtcatgacacagagcccttctagcctgtctgccagcgtgggcgacagagtgaccatcacctgtatggcctccgaggacatctacatccggctggcctggtatcagcagaagcctggaaacgcccctaagctgctgatctacgccgccacctctctggaaacaggcgtgccaagcagattttccggcagcggctctggcaccgatttcaccctgacaatatccagcctccagcctgaggacttcgccacctactactgccagcagtattggagcagcccctggacatttggcggaggcaccaaggtggaaatcaaaggcggaggcggaagtggaggcggaggatctggcggcggaggctctcaggttcagctgcaagagtctggccccggactggtcaagcctagccaaacactgagcctgacctgtaccgtgtccggctacagcatcaccagcgactacacctggaactggatcagacagcctcctggcaacggactggaatggatcggctacatcacctacagcggcagcaccagctacaaccccagcctgaaaagccgggtgctgatctccgtggacaccagcaagaatcaggtgtccctgaagctgagcagcgtgacagccgctgataccgccgtgtactactgtgccagactggggagaagatacacaatggactactggggccagggcaccaccgtgacagtttcttctacgcgtggaatgaggactgaggatcttcccaaagctgtcgtctttctcgaaccccaatggtatcgggtgctcgaaaaagactctgtgacactgaaatgccaaggggcctactctcccgaggacaactccacacagtggtttcataatgagtccctcatcagctctcaggccagctcttatttcattgatgccgctacagtggacgactccggcgagtatcggtgtcagaccaatctgtctacactgtctgaccccgtgcagcttgaggtccacattggatggttgctcttgcaagccccacgctgggttttcaaagaggaagatccaatccatctgcggtgccacagctggaaaaacaccgctctccacaaagtcacatacctgcaaaatggcaaaggacgcaaatacttccatcacaattccgatttttacattccgaaggctaccctgaaagacagcggcagctatttctgccggggactcgtcggctccaagaatgtgtcctccgaaaccgtgaatatcacgattacccaaggactggctgtgcctacaatctctagcttctttccgcctggataccaagtctccttctgtcttgtgatggtcctcctgtttgctgtggacacaggactgtacttttccgtg

SEQ ID NO: 1515 - DNA, 1443 bp, synthetic construct
  source 1..1443: mol_type = other DNA
atggccttaccagtgaccgccttgctcctgccgctggccttgctgctccacgccgccaggccggaggtgcaactggttgagtctggcggaggactggtgcagcctggaagaagcctgagactgtcttgtgccgccagcggcttcaccttcgacgattatgccatgcactgggtccgacaggcccctggcaaaggacttgaatgggtgtccggcatctcctggaacagcggctctatcggctacgccgattccgtgaagggcagattcaccatcagccgggacaacgccaagaacagcctgtacctccagatgaactccctgagagccgaggacacagccctgtactactgcgccaaagacaaaggcggaggctactacgacttttggagcggcagcgattattggggccagggcacactggtcacagtgtctagcggcggaggcggaagtggaggcggaggatctggcggcggaggctcttcttctgagctgacacaggaccctgccgtgtctgttgctctgggccagacagtgcggattacctgtcagggcgatagcctgagaagctactacgcctcctggtatcagcagaagccaggccaggctcctgtgctggtcatctacggcaagaacaacagacccagcggcatccccgatagattcagcggaagcagctctggcaataccgccagcctgacaattactggcgctcaggccgaggacgaggccgactactactgcaacagcagagatagcagcggctgggttttcggcggaggcacaaaactgacagtgctgacgcgtggaatgaggactgaggatcttcccaaagctgtcgtctttctcgaaccccaatggtatcgggtgctcgaaaaagactctgtgacactgaaatgccaaggggcctactctcccgaggacaactccacacagtggtttcataatgagtccctcatcagctctcaggccagctcttatttcattgatgccgctacagtggacgactccggcgagtatcggtgtcagaccaatctgtctacactgtctgaccccgtgcagcttgaggtccacattggatggttgctcttgcaagccccacgctgggttttcaaagaggaagatccaatccatctgcggtgccacagctggaaaaacaccgctctccacaaagtcacatacctgcaaaatggcaaaggacgcaaatacttccatcacaattccgatttttacattccgaaggctaccctgaaagacagcggcagctatttctgccggggactcgtcggctccaagaatgtgtcctccgaaaccgtgaatatcacgattacccaaggactggctgtgcctacaatctctagcttctttccgcctggataccaagtctccttctgtcttgtgatggtcctcctgtttgctgtggacacaggactgtacttttccgtg

SEQ ID NO: 1516 - DNA, 1470 bp, synthetic construct
  source 1..1470: mol_type = other DNA
atggccttaccagtgaccgccttgctcctgccgctggccttgctgctccacgccgccaggccggaagtgcagctccagcagtctggacctggcctggttaagcctagccagacactgagcctgacctgtgccatcagcggcgatagcgtgctgagcaacagcgacacctggaactggatcagacagagccctagcagaggactggaatggctgggcagaacctaccacagaagcacttggtacgacgactacgccagctctgtgcggggcagagtgtccatcaatgtggacaccagcaagaaccagtacagcctgcaactgaacgccgtgacacctgaggataccggcgtgtactactgcgccagagacagactccaggacggcaactcttggagcgacgcctttgatgtgtggggccagggcacaatggtcaccgtttctagcggcggaggcggaagtggaggcggaggatctggcggcggaggctctcaatctgctctgacacagcctgccagcgtgtcaggatctcctggacagagcatcaccatctcttgcaccggcaccagctctgatgtcggcggctacaattacgtgtcctggtatcagcagcaccccggcaaggcccctaagctgatgatctacgacgtgtccaacagacccagcggcgtgtccaatagattctccggcagcaagagcggcaacaccgccagcctgacaatttctggactgcaagccgaggacgaggccgactactactgtagcagctacaccagcagcagcacactggtgtacgtgttcggcacaggcaccaaagtgaccgtgcttacgcgtggaatgaggactgaggatcttcccaaagctgtcgtctttctcgaaccccaatggtatcgggtgctcgaaaaagactctgtgacactgaaatgccaaggggcctactctcccgaggacaactccacacagtggtttcataatgagtccctcatcagctctcaggccagctcttatttcattgatgccgctacagtggacgactccggcgagtatcggtgtcagaccaatctgtctacactgtctgaccccgtgcagcttgaggtccacattggatggttgctcttgcaagccccacgctgggttttcaaagaggaagatccaatccatctgcggtgccacagctggaaaaacaccgctctccacaaagtcacatacctgcaaaatggcaaaggacgcaaatacttccatcacaattccgatttttacattccgaaggctaccctgaaagacagcggcagctatttctgccggggactcgtcggctccaagaatgtgtcctccgaaaccgtgaatatcacgattacccaaggactggctgtgcctacaatctctagcttctttccgcctggataccaagtctccttctgtcttgtgatggtcctcctgtttgctgtggacacaggactgtacttttccgtg

SEQ ID NO: 1517 - DNA, 1464 bp, synthetic construct
  source 1..1464: mol_type = other DNA
atggccttaccagtgaccgccttgctcctgccgctggccttgctgctccacgccgccaggccgcaggtgcaactggttcagtctggggccgaagtgaagaaacctggggcctctgtgaaggtgtcctgcaaggcttccggctacacctttaccagctacgacatcaactgggtccgacaggccacaggccaaggactggaatggatgggctggatgaaccccaacagcggcaataccggctacgcccagaaattccagggcagagtgaccatgaccagaaacaccagcatcagcaccgcctacatggaactgagcagcctgagaagcgaggacaccgccgtgtactattgcgccagaggcgacagcaactactggtcctactacggcatggacgtgtggggccagggaacactggttacagtttctagcggcggaggcggaagtggaggcggaggatctggcggcggaggctctggcggtggtggatctcaatctgtgctgacccagcctagatccgtgtctggctctcctggacagagcgtgaccatctcttgtaccggcaccagctctgatgtcggcggctacaattacgtgtcctggtatcagcagcaccccggcgaagcccctaagctgattatctacgacgccgacaagcggcccagcggcatcagcaatagattcagctctggcaagagcggcaacaccgccagcctgacaatcagcggactccaggtggaagatgaggccgactactactgctgctcctatgccggcggaagcacctgggttttcggaggcggtacaaaagtgaccgtgctgacgcgtggaatgaggactgaggatcttcccaaagctgtcgtctttctcgaaccccaatggtatcgggtgctcgaaaaagactctgtgacactgaaatgccaaggggcctactctcccgaggacaactccacacagtggtttcataatgagtccctcatcagctctcaggccagctcttatttcattgatgccgctacagtggacgactccggcgagtatcggtgtcagaccaatctgtctacactgtctgaccccgtgcagcttgaggtccacattggatggttgctcttgcaagccccacgctgggttttcaaagaggaagatccaatccatctgcggtgccacagctggaaaaacaccgctctccacaaagtcacatacctgcaaaatggcaaaggacgcaaatacttccatcacaattccgatttttacattccgaaggctaccctgaaagacagcggcagctatttctgccggggactcgtcggctccaagaatgtgtcctccgaaaccgtgaatatcacgattacccaaggactggctgtgcctacaatctctagcttctttccgcctggataccaagtctccttctgtcttgtgatggtcctcctgtttgctgtggacacaggactgtacttttccgtg

SEQ ID NO: 1518 - DNA, 1470 bp, synthetic construct
  source 1..1470: mol_type = other DNA
atggccttaccagtgaccgccttgctcctgccgctggccttgctgctccacgccgccaggccggaagtgcagctccagcagtctggacctggcctggttaagcctagccagacactgagcctgacctgtgccatcagcggcgatagcgtgtcctctaatagcgccgcctggaactggatcagacagagccctagcagaggactggaatggctgggcagaacctactaccgcagcaagtggtacagcgactacgccgtgtccgtgaagtcccggatcaccatcaatcccgacaccagcaagaaccagttcagcctgcaactgaacagcgtgacccctgaggataccgccgtgtactactgcgccagagatccctacgacttttggagcggctaccccgacgcctttgacatctggggacagggcacaatggtcaccgtttctagcggcggaggcggaagtggaggcggaggatctggcggcggaggctctcaatctgctctgacacagcctgccagcgtgtcaggatctcctggacagagcatcaccatctcttgcaccggcaccagctctgatgtcggcggctacaattacgtgtcctggtatcagcagcaccccggcaaggcccctaaagtgattatcagcgaagtgaacaacagacccagcggcgtgtcccacagattcagcggctctaagtctggcaacaccgccagcctgacaatctctggactgcaagccgaggacgaggccgactacttctgtagcagctacaccagcggcagaaccctgtacgtgttcggcacaggcagcaaagtgacagtgctgggaacgcgtggaatgaggactgaggatcttcccaaagctgtcgtctttctcgaaccccaatggtatcgggtgctcgaaaaagactctgtgacactgaaatgccaaggggcctactctcccgaggacaactccacacagtggtttcataatgagtccctcatcagctctcaggccagctcttatttcattgatgccgctacagtggacgactccggcgagtatcggtgtcagaccaatctgtctacactgtctgaccccgtgcagcttgaggtccacattggatggttgctcttgcaagccccacgctgggttttcaaagaggaagatccaatccatctgcggtgccacagctggaaaaacaccgctctccacaaagtcacatacctgcaaaatggcaaaggacgcaaatacttccatcacaattccgatttttacattccgaaggctaccctgaaagacagcggcagctatttctgccggggactcgtcggctccaagaatgtgtcctccgaaaccgtgaatatcacgattacccaaggactggctgtgcctacaatctctagcttctttccgcctggataccaagtctccttctgtcttgtgatggtcctcctgtttgctgtggacacaggactgtacttttccgtg

SEQ ID NO: 1519 - DNA, 1467 bp, synthetic construct
  source 1..1467: mol_type = other DNA
atggccttaccagtgaccgccttgctcctgccgctggccttgctgctccacgccgccaggccggaagtgcagctccagcagtctggacctggcctggttaagcctagccagacactgagcctgacctgtgccatcagcggcgattccatgctgagcaacagcgacacctggaactggatcagacagagccccagcagaggcctggaatggctgggcagaacataccacagaagcacttggtacgacgactacgccagctctgtgcggggcagagtgtccatcaatgtggacaccagcaagaaccagtacagcctgcaactgaacgccgtgacacctgaggataccggcgtgtactactgtgccagagtgcggctccaggacggcaattcttggagcgacgcctttgatgtgtggggccagggcacaatggtcaccgtttctagcggcggaggcggaagtggaggcggaggatctggcggcggaggctctcaatctgctctgacacagcctgccagcgcctctggatctcctggacagagcgtgaccatctcctgtaccggcacctcttctgatgtcggcggctacaactacgtgtcctggtatcagcagcaccccggcaaggcccctaagctgatgatctacgacgtgtccaacagacccagcggcgtgtccaatagattctccggcagcaagagcggcaacaccgccagcctgacaatttctggactgcaagccgaggacgaggccgactactactgtagcagctacaccagcagcagcacactgtacgtgttcggcacaggcacccagctcacagttcttacgcgtggaatgaggactgaggatcttcccaaagctgtcgtctttctcgaaccccaatggtatcgggtgctcgaaaaagactctgtgacactgaaatgccaaggggcctactctcccgaggacaactccacacagtggtttcataatgagtccctcatcagctctcaggccagctcttatttcattgatgccgctacagtggacgactccggcgagtatcggtgtcagaccaatctgtctacactgtctgaccccgtgcagcttgaggtccacattggatggttgctcttgcaagccccacgctgggttttcaaagaggaagatccaatccatctgcggtgccacagctggaaaaacaccgctctccacaaagtcacatacctgcaaaatggcaaaggacgcaaatacttccatcacaattccgatttttacattccgaaggctaccctgaaagacagcggcagctatttctgccggggactcgtcggctccaagaatgtgtcctccgaaaccgtgaatatcacgattacccaaggactggctgtgcctacaatctctagcttctttccgcctggataccaagtctccttctgtcttgtgatggtcctcctgtttgctgtggacacaggactgtacttttccgtg

SEQ ID NO: 1520 - DNA, 1440 bp, synthetic construct
  source 1..1440: mol_type = other DNA
atggccttaccagtgaccgccttgctcctgccgctggccttgctgctccacgccgccaggccggagatcgtgctgacacagtctcccgccacactgtcactgtctccaggcgaaagagccacactgagctgtagcgccagcagcagcgtgtcctacatgtactggtatcagcagaagcccggacaggcccctagactgctgatctacagaaccagcaacctggcctctggcatccccgccagattttctggctctggcagcggcaccgatttcaccctgaccataagcagcctggaacctgaggacttcgccgtgtactactgccagcagtaccacagctaccccaccacctttggacagggcaccaaggtggaaatcaagcggacagttggcggaggcggaagtggaggcggaggatctggcggcggaggctctgaagtgcagctggttgaatcaggtggcggcctggttcaacctggcggatctctgagactgtcttgtgccgccagcggcttcagcttcaacacctacgccatgaactgggtccgacaggctcctggcaaaggactggaatgggtgtcccacatcagaagcaagagcaacaacttcgccacctactacgccgacagcgtgaaggacagattcaccatcagccgggacaacgccaagaacagcctgtacctccagatgaactccctgagagccgaggacaccgccgtgtattattgcgccagacaaggcggcgacttccctatggattattggggccagggcaccctggtcaccgtttcttctacgcgtggaatgaggactgaggatcttcccaaagctgtcgtctttctcgaaccccaatggtatcgggtgctcgaaaaagactctgtgacactgaaatgccaaggggcctactctcccgaggacaactccacacagtggtttcataatgagtccctcatcagctctcaggccagctcttatttcattgatgccgctacagtggacgactccggcgagtatcggtgtcagaccaatctgtctacactgtctgaccccgtgcagcttgaggtccacattggatggttgctcttgcaagccccacgctgggttttcaaagaggaagatccaatccatctgcggtgccacagctggaaaaacaccgctctccacaaagtcacatacctgcaaaatggcaaaggacgcaaatacttccatcacaattccgatttttacattccgaaggctaccctgaaagacagcggcagctatttctgccggggactcgtcggctccaagaatgtgtcctccgaaaccgtgaatatcacgattacccaaggactggctgtgcctacaatctctagcttctttccgcctggataccaagtctccttctgtcttgtgatggtcctcctgtttgctgtggacacaggactgtacttttccgtg

SEQ ID NO: 1521 - DNA, 1428 bp, synthetic construct
  source 1..1428: mol_type = other DNA
atggccttaccagtgaccgccttgctcctgccgctggccttgctgctccacgccgccaggccggacgtggtcatgacacagagcccttctagcctgtctgccagcgtgggcgacagagtgaccatcacctgtaaagccagcgaggacatctacatccggctggcctggtatcagcagaagcctggaaaggcccctaagctgctgatctacgccgccacctctctggaaacaggcgtgccaagcagattttccggcagcggctctggcaccgatttcaccctgacaatatccagcctccagcctgaggacttcgccacctactactgccagcagtattggaccacaccttggacctttggcggaggcaccaaggtggaaatcaaaggcggaggcggaagtggaggcggaggatctggcggcggaggctctcaggtgcagctccaagagtctggccctggactggtcaagcctagccagacactgagcctgacctgtaccgtgtccggctacagcatcaccatcgactacacctggaactggatcagacagcctcctggcaaaggactggaatggatcggctacatcacctacagcggcagcaccgactacaaccccagcctgaaaagccgggtgctgatctccgtggacaccagcaagaatcaggtgtccctgaagctgagcagcgtgacagccgctgataccgccgtgtactactgtgccagactgggcagaagatacgccctggattattggggccagggcaccaccgtgacagtgtcatctacgcgtggaatgaggactgaggatcttcccaaagctgtcgtctttctcgaaccccaatggtatcgggtgctcgaaaaagactctgtgacactgaaatgccaaggggcctactctcccgaggacaactccacacagtggtttcataatgagtccctcatcagctctcaggccagctcttatttcattgatgccgctacagtggacgactccggcgagtatcggtgtcagaccaatctgtctacactgtctgaccccgtgcagcttgaggtccacattggatggttgctcttgcaagccccacgctgggttttcaaagaggaagatccaatccatctgcggtgccacagctggaaaaacaccgctctccacaaagtcacatacctgcaaaatggcaaaggacgcaaatacttccatcacaattccgatttttacattccgaaggctaccctgaaagacagcggcagctatttctgccggggactcgtcggctccaagaatgtgtcctccgaaaccgtgaatatcacgattacccaaggactggctgtgcctacaatctctagcttctttccgcctggataccaagtctccttctgtcttgtgatggtcctcctgtttgctgtggacacaggactgtacttttccgtg

SEQ ID NO: 1522 - DNA, 1443 bp, synthetic construct
  source 1..1443: mol_type = other DNA
atggccttaccagtgaccgccttgctcctgccgctggccttgctgctccacgccgccaggccggacatccagctgactcagagccctagctttctgagcgccagcgtgggcgacagagtgaccattacatgtagagccagccagggcatcagcaccgacctgaactggtatcagcagaagcctggcaaggcccctaagctgctgatctacgccgccagcaatctggaaagcggcgtgccaagcagattttccggctctggcagcggcaccgagttcaccctgacaatatctagcctccagcctgaggacttcgccacctactactgccagcagagctacaactggccctacacctttggcggaggcaccaaggtggaaatcaagagaggcggaggcggaagtggaggcggaggatctggcggcggaggctctgaagttcagctggttgaatcaggcggaggactcgtgaaacctggcggctctctgagactgtcttgtgccgccagcggcttcaccttcagcaacttcgagatgaactgggtccgacaggccccaggcaaaggactggaatgggtgtccggcatcagctccaatggccggtacatcaactacgccgacagcgtgaagggcagattcaccatcagccgggacaacgccaagaacagcctgtacctccagatgaactccctgagagccgaggacaccgccgtgtactattgtgccagagtggtggacttcgaccaggactacaacggcttcgactattggggccagggcaccctggttaccgttagctctacgcgtggaatgaggactgaggatcttcccaaagctgtcgtctttctcgaaccccaatggtatcgggtgctcgaaaaagactctgtgacactgaaatgccaaggggcctactctcccgaggacaactccacacagtggtttcataatgagtccctcatcagctctcaggccagctcttatttcattgatgccgctacagtggacgactccggcgagtatcggtgtcagaccaatctgtctacactgtctgaccccgtgcagcttgaggtccacattggatggttgctcttgcaagccccacgctgggttttcaaagaggaagatccaatccatctgcggtgccacagctggaaaaacaccgctctccacaaagtcacatacctgcaaaatggcaaaggacgcaaatacttccatcacaattccgatttttacattccgaaggctaccctgaaagacagcggcagctatttctgccggggactcgtcggctccaagaatgtgtcctccgaaaccgtgaatatcacgattacccaaggactggctgtgcctacaatctctagcttctttccgcctggataccaagtctccttctgtcttgtgatggtcctcctgtttgctgtggacacaggactgtacttttccgtg

SEQ ID NO: 1523 - DNA, 1437 bp, synthetic construct
  source 1..1437: mol_type = other DNA
atggccttaccagtgaccgccttgctcctgccgctggccttgctgctccacgccgccaggccggacatccaactgactcagagccccagctttctgagcgcctctgtgggcgacagagtgaccatcacatgtagtctcagcctgggcatcagcacatggcgggattggtttccgccgaggcttggcaggggccttgagccgctgacctacgccgccagcacactgcaaagcggagtgcctagcagattttccggcagcggctctggcaccgagttcaccctgacaatatccagcctccagcctgaggacttcgccacctactactgccagcagctcaacagctaccctctgacctttggcggaggcaccaaggtggaaatcaagagaggcggaggcggaagtggaggcggaggatctggcggcggaggctctgaagttcaactggttgagtctggtggcggcctggttaagcctggcggatctctgagactgagctgtgccgccagcggcttcacctttagcacatacggcatgagctgggtccgacaggcccctggaaaaggacttgagtgggtcgcctacatcaacaacggctccggctacatctactacgccgacagcgtgaagggcagattcaccatcagccgggacaacgccaagaacagcctgtacctccagatgaactccctgagagccgaggacaccgccgtgtactattgtgccagaggacagtggtggagcggcggagactttgattattggggccagggcaccctggtcaccgtttcttctacgcgtggaatgaggactgaggatcttcccaaagctgtcgtctttctcgaaccccaatggtatcgggtgctcgaaaaagactctgtgacactgaaatgccaaggggcctactctcccgaggacaactccacacagtggtttcataatgagtccctcatcagctctcaggccagctcttatttcattgatgccgctacagtggacgactccggcgagtatcggtgtcagaccaatctgtctacactgtctgaccccgtgcagcttgaggtccacattggatggttgctcttgcaagccccacgctgggttttcaaagaggaagatccaatccatctgcggtgccacagctggaaaaacaccgctctccacaaagtcacatacctgcaaaatggcaaaggacgcaaatacttccatcacaattccgatttttacattccgaaggctaccctgaaagacagcggcagctatttctgccggggactcgtcggctccaagaatgtgtcctccgaaaccgtgaatatcacgattacccaaggactggctgtgcctacaatctctagcttctttccgcctggataccaagtctccttctgtcttgtgatggtcctcctgtttgctgtggacacaggactgtacttttccgtg

SEQ ID NO: 1524 - DNA, 1443 bp, synthetic construct
  source 1..1443: mol_type = other DNA
atggccttaccagtgaccgccttgctcctgccgctggccttgctgctccacgccgccaggccggacatccagatgacccagaccacaagcagcctgtctgccagcctgggcgacagagtgaccatctcttgtagagccagccaggacatcagcaactacctgaactggtatcagcagaaacccgacggcaccgtgaagctgctgatctactacaccagcatcctgcacagcggcgtgcccagcagattttctggctctggcagcggcaccgactacagcctgaccatcagcaatctggaacaagaggacttcgctacctacttctgccagcaaggcaacaccctgccttggacatttggcggaggcaccaagctggaaatcaaagctggcggaggcggaagtggaggcggaggatctggcggcggaggctctgaagtgcaactggttgaatctggcggcggactggttaagcctggcggatctctgaagctgagctgtgccgcctctggcttcgccttcagcatctacgatatgagctgggtccgacagacccctgagaagagactggaatgggtcgcctacatctctagcggcggagggacctactatcccgacacagtgaagggcagattcaccatctccagagacaacgccaagaacaccctgtacctccagatgagcagcctgaagtccgaggacaccgccatgtactactgcgccagacacagcggctatggcacacattggggagtgctgtttgcctactggggccagggaacactggtcacagtttctgctacgcgtggaatgaggactgaggatcttcccaaagctgtcgtctttctcgaaccccaatggtatcgggtgctcgaaaaagactctgtgacactgaaatgccaaggggcctactctcccgaggacaactccacacagtggtttcataatgagtccctcatcagctctcaggccagctcttatttcattgatgccgctacagtggacgactccggcgagtatcggtgtcagaccaatctgtctacactgtctgaccccgtgcagcttgaggtccacattggatggttgctcttgcaagccccacgctgggttttcaaagaggaagatccaatccatctgcggtgccacagctggaaaaacaccgctctccacaaagtcacatacctgcaaaatggcaaaggacgcaaatacttccatcacaattccgatttttacattccgaaggctaccctgaaagacagcggcagctatttctgccggggactcgtcggctccaagaatgtgtcctccgaaaccgtgaatatcacgattacccaaggactggctgtgcctacaatctctagcttctttccgcctggataccaagtctccttctgtcttgtgatggtcctcctgtttgctgtggacacaggactgtacttttccgtg

SEQ ID NO: 1525 - DNA, 1473 bp, synthetic construct
  source 1..1473: mol_type = other DNA
atggccttaccagtgaccgccttgctcctgccgctggccttgctgctccacgccgccaggccggacatcgtgatgacacagagccctgatagcctggccgtgtctctgggagagagagccaccatcaactgcaagagcagccagagcctgctgtacagaagcaaccagaagaactacctggcctggtatcagcagaagcccggccagcctcctaagctgctgatctactgggccagcaccagagaaagcggcgtgcccgatagattttctggctctggcagcggcaccgacttcaccctgacaatttctagcctgcaagccgaggacgtggccgtgtactactgccagcagtattacaactaccccagaaccttcggccagggcaccaaggtggaaatcaagagaacagttggcggaggcggaagtggaggcggaggatctggcggcggaggctctgaagttcagctgcttgaatcaggcggcggactggttcaacctggcggatctctgagactgagctgtgccgccagcggctacagcatcacaagcgactatgcctggaactgggtccgacaggcccctggcaaaggactggaatgggtgtcctacatcagcaacagcggcagcaccagctacaaccccagcctgaagtcccggttcaccatcagcagagacaacagcaagaacaccctgtacctccagatgaacagcctgagagctgaggacaccgccgtgtattattgcgccaaagagcggaactacgactacgacgattactactacgctatggactactggggccagggaaccctggtcacagtctcttctacgcgtggaatgaggactgaggatcttcccaaagctgtcgtctttctcgaaccccaatggtatcgggtgctcgaaaaagactctgtgacactgaaatgccaaggggcctactctcccgaggacaactccacacagtggtttcataatgagtccctcatcagctctcaggccagctcttatttcattgatgccgctacagtggacgactccggcgagtatcggtgtcagaccaatctgtctacactgtctgaccccgtgcagcttgaggtccacattggatggttgctcttgcaagccccacgctgggttttcaaagaggaagatccaatccatctgcggtgccacagctggaaaaacaccgctctccacaaagtcacatacctgcaaaatggcaaaggacgcaaatacttccatcacaattccgatttttacattccgaaggctaccctgaaagacagcggcagctatttctgccggggactcgtcggctccaagaatgtgtcctccgaaaccgtgaatatcacgattacccaaggactggctgtgcctacaatctctagcttctttccgcctggataccaagtctccttctgtcttgtgatggtcctcctgtttgctgtggacacaggactgtacttttccgtg

SEQ ID NO: 1526 - DNA, 1452 bp, synthetic construct
  source 1..1452: mol_type = other DNA
atggccttaccagtgaccgccttgctcctgccgctggccttgctgctccacgccgccaggccggacgtggtcatgacacagagccctctgagcctgcctgtgacacttggacagcctgccagcatcagctgtagaagcagccagagcctgctgcacagcagcggcaatacctacctggaatggtatcagcagaggcccggacagagccccagacctctgatctacaagatcagcacccggttcagcggcgtgcccgatagattttctggctctggcagcggcaccgacttcaccctgaagattagcagagtggaagccgaggacgtgggcgtgtactactgcttccaaggcagccacgtgccatacacctttggcggcggaacaaaggtggaaatcaagagaggcggaggcggaagtggaggcggaggatctggcggcggaggctctcaagttcagctggttcagagcggagccgaagtgaagaaacctggggcctctgtgaaggtgtcctgcaaagcctctggcctgaccatcgaggactactacatgcactgggtccgacaggcccctggacaaggacttgaatggatgggctggatcgaccccgagaacggcgatacagagtacggccctaagttccagggcagagtgaccatgaccagagacaccagcatcaacaccgcctacatggaactgagccggctgagatccgatgacaccgccgtgtactattgcgccgtgcacaatgcccactacggcacttggtttgcctattggggccagggcacactggtcaccgttagctctacgcgtggaatgaggactgaggatcttcccaaagctgtcgtctttctcgaaccccaatggtatcgggtgctcgaaaaagactctgtgacactgaaatgccaaggggcctactctcccgaggacaactccacacagtggtttcataatgagtccctcatcagctctcaggccagctcttatttcattgatgccgctacagtggacgactccggcgagtatcggtgtcagaccaatctgtctacactgtctgaccccgtgcagcttgaggtccacattggatggttgctcttgcaagccccacgctgggttttcaaagaggaagatccaatccatctgcggtgccacagctggaaaaacaccgctctccacaaagtcacatacctgcaaaatggcaaaggacgcaaatacttccatcacaattccgatttttacattccgaaggctaccctgaaagacagcggcagctatttctgccggggactcgtcggctccaagaatgtgtcctccgaaaccgtgaatatcacgattacccaaggactggctgtgcctacaatctctagcttctttccgcctggataccaagtctccttctgtcttgtgatggtcctcctgtttgctgtggacacaggactgtacttttccgtg

SEQ ID NO: 1527 - DNA, 1428 bp, synthetic construct
  source 1..1428: mol_type = other DNA
atggccttaccagtgaccgccttgctcctgccgctggccttgctgctccacgccgccaggccggacatccagatgacacagagccctagcagcctgtctgccagcgtgggagacagagtgaccatcacctgtagagccagcgagaacatctacagcaacctggcctggtatcagcagaagcctggcaaggcccctaagctgctgatctacgccgccaccaatctggctgatggcgtgccaagcagattttccggctctggcagcggcaccgatttcaccctgacaatatccagcctccagcctgaggacttcgccacctactactgccagcacttttggggcacccctacattcggccagggcaccaaggtggaaatcaagagaacagttggcggaggcggaagtggaggcggaggatctggcggcggaggctctgaagtgcagctggttgaatcaggtggcggcctggttcaacctggcggatctctgagactgagctgtgccgcctctggcttcagcctgacaaattacggcgtgcactgggtccgacaggcccctggaaaaggactggaatgggtgtccgtgatttggagcggcggcagcaccgattacaacgccgccttcatcagccggttcaccatcagcgccgacaccagcaagaataccgcctacctccagatgaactccctgagagccgaggacaccgccgtgtactattgcgccagagaactgatccacgctatggacaactggggccagggaaccctggtcacagtctcttctacgcgtggaatgaggactgaggatcttcccaaagctgtcgtctttctcgaaccccaatggtatcgggtgctcgaaaaagactctgtgacactgaaatgccaaggggcctactctcccgaggacaactccacacagtggtttcataatgagtccctcatcagctctcaggccagctcttatttcattgatgccgctacagtggacgactccggcgagtatcggtgtcagaccaatctgtctacactgtctgaccccgtgcagcttgaggtccacattggatggttgctcttgcaagccccacgctgggttttcaaagaggaagatccaatccatctgcggtgccacagctggaaaaacaccgctctccacaaagtcacatacctgcaaaatggcaaaggacgcaaatacttccatcacaattccgatttttacattccgaaggctaccctgaaagacagcggcagctatttctgccggggactcgtcggctccaagaatgtgtcctccgaaaccgtgaatatcacgattacccaaggactggctgtgcctacaatctctagcttctttccgcctggataccaagtctccttctgtcttgtgatggtcctcctgtttgctgtggacacaggactgtacttttccgtg

SEQ ID NO: 1528 - DNA, 1449 bp, synthetic construct
  source 1..1449: mol_type = other DNA
atggccttaccagtgaccgccttgctcctgccgctggccttgctgctccacgccgccaggccggacttcgtgatgacacagagccctctgagcctgcctgtgacacctggcgaacctgccagcatcagctgtagaagcagccagagcatcgtgcacagcaacggcaacacctacctggaatggtatctccagaagcctggacagagcccacagctgctgatctacaaggtgtccaacagattcagcggcgtgcccgacagattttctggcagcggctctggcaccgacttcaccctgaagattagcagagtggaagccgaggacgtgggcgtgtactactgcttccaaggctctcacgtgcccctgacctttggacagggcaccaagctggaaatcaagagaggcggaggcggaagtggaggcggaggatctggcggcggaggctctgaagtgcagctggttgaaagcggagccgaagtgaagaaacctggggcctctgtgaaggtgtcctgcaaggccagcggctacacctttaccagctactggattcactgggtccgacaggcccctggacaaggacttgagtggatgggcgagaacgacccctccaacggcaggaccaactacaacgagaagttcaagaaccgcgtgaccctgaccgtggacaccagcatctctaccgcctacatggaactgagccggctgagatccgatgacaccgccgtgtactattgcgccagaggacccaactacttttacagcatggactactggggccagggcacaatggtcaccgttagctctacgcgtggaatgaggactgaggatcttcccaaagctgtcgtctttctcgaaccccaatggtatcgggtgctcgaaaaagactctgtgacactgaaatgccaaggggcctactctcccgaggacaactccacacagtggtttcataatgagtccctcatcagctctcaggccagctcttatttcattgatgccgctacagtggacgactccggcgagtatcggtgtcagaccaatctgtctacactgtctgaccccgtgcagcttgaggtccacattggatggttgctcttgcaagccccacgctgggttttcaaagaggaagatccaatccatctgcggtgccacagctggaaaaacaccgctctccacaaagtcacatacctgcaaaatggcaaaggacgcaaatacttccatcacaattccgatttttacattccgaaggctaccctgaaagacagcggcagctatttctgccggggactcgtcggctccaagaatgtgtcctccgaaaccgtgaatatcacgattacccaaggactggctgtgcctacaatctctagcttctttccgcctggataccaagtctccttctgtcttgtgatggtcctcctgtttgctgtggacacaggactgtacttttccgtg

SEQ ID NO: 1529 - DNA, 1428 bp, synthetic construct
  source 1..1428: mol_type = other DNA
atggccttaccagtgaccgccttgctcctgccgctggccttgctgctccacgccgccaggccggacatccagctgactcagagccctagctttctgagcgccagcgtgggcgacagagtgaccatcacatgtagcgccagatccagcatcagcttcatgtactggtatcagcagaagcccggcaaggcccctaagctgctgatctacgacaccagcaatctggcctctggcgtgcccagcagattttctggaagcggcagcggcaccgagttcaccctgacaatctctagcctggaagccgaggatgccgccacctactattgccagcagtggtccagctatcccctgacatttggacagggcaccaagctggaaatcaaaggcggaggcggaagtggaggcggaggatctggcggcggaggctctcaggttcagctggttcagtctggggccgaagtgaagaaacctggggcctctgtgaaggtgtcctgcaaggcttccggctacacctttaccggctcttggatgaactgggtccgacaggctcctggacagggactcgaatggatcggcagaatctatcctggcgacggcgagacaaactacaacggcaagttcaaggaccgcgtgacaatcaccgccgacaagagcacaagcaccgcctacatggaactgagcagcctgcggagcgaagataccgccgtgtactactgcgcccggatctacggcaacaacgtgtacttcgatgtgtggggccagggcacaaccgtgacagtctcttctacgcgtggaatgaggactgaggatcttcccaaagctgtcgtctttctcgaaccccaatggtatcgggtgctcgaaaaagactctgtgacactgaaatgccaaggggcctactctcccgaggacaactccacacagtggtttcataatgagtccctcatcagctctcaggccagctcttatttcattgatgccgctacagtggacgactccggcgagtatcggtgtcagaccaatctgtctacactgtctgaccccgtgcagcttgaggtccacattggatggttgctcttgcaagccccacgctgggttttcaaagaggaagatccaatccatctgcggtgccacagctggaaaaacaccgctctccacaaagtcacatacctgcaaaatggcaaaggacgcaaatacttccatcacaattccgatttttacattccgaaggctaccctgaaagacagcggcagctatttctgccggggactcgtcggctccaagaatgtgtcctccgaaaccgtgaatatcacgattacccaaggactggctgtgcctacaatctctagcttctttccgcctggataccaagtctccttctgtcttgtgatggtcctcctgtttgctgtggacacaggactgtacttttccgtg

SEQ ID NO: 1530 - DNA, 1452 bp, synthetic construct
  source 1..1452: mol_type = other DNA
atggccttaccagtgaccgccttgctcctgccgctggccttgctgctccacgccgccaggccgcagctggtgctgacacagtctccaagcgcctctgccagcctgggatctagcgtgaagctgacctgtacactgagcagcggccacaagaccgacaccatcgactggtatcagcagcagcctggcaaggcccctagatacctgatgaagctggaaggcagcggcagctacaacaaaggctctggcgtgcccgatagattcagcggcagttcttctggcgctgattggtatctgaccatcagcagcctccagagcgaggacgaggccgattactactgcggcacagactaccccggcaactacctgtttggcggcggaacacagctgacagtgcttggcggcggaggcggaagtggaggcggaggatctggcggcggaggctctcaagaacagctggttgaaagcggcggaggactggttcaacctggcggttctctgagactgagctgtgccgccagcggcttcaccttcagcgactactacatgagctggatcagacaggccccaggcaaaggactggaatgggtcgccacaatctaccccagcagcggcaagacctactacgccgattctgccaagggcagactgaccatctccagcgacaacgccaaggacagcctgtacctccagatgaacagcctgagagccgaggacaccgccgtgtactactgcaccagagatagctacgccgacgacgccgctctgtttgacatttggggccagggcaccaccgtgaccgtttcttctacgcgtggaatgaggactgaggatcttcccaaagctgtcgtctttctcgaaccccaatggtatcgggtgctcgaaaaagactctgtgacactgaaatgccaaggggcctactctcccgaggacaactccacacagtggtttcataatgagtccctcatcagctctcaggccagctcttatttcattgatgccgctacagtggacgactccggcgagtatcggtgtcagaccaatctgtctacactgtctgaccccgtgcagcttgaggtccacattggatggttgctcttgcaagccccacgctgggttttcaaagaggaagatccaatccatctgcggtgccacagctggaaaaacaccgctctccacaaagtcacatacctgcaaaatggcaaaggacgcaaatacttccatcacaattccgatttttacattccgaaggctaccctgaaagacagcggcagctatttctgccggggactcgtcggctccaagaatgtgtcctccgaaaccgtgaatatcacgattacccaaggactggctgtgcctacaatctctagcttctttccgcctggataccaagtctccttctgtcttgtgatggtcctcctgtttgctgtggacacaggactgtacttttccgtg

SEQ ID NO: 1531 - DNA, 1437 bp, synthetic construct
  source 1..1437: mol_type = other DNA
atggccttaccagtgaccgccttgctcctgccgctggccttgctgctccacgccgccaggccggacatcgtgctgacacagagccctccaagcctggctatgagcctgggaaagagagccaccatcagctgtagagccagcgagagcgtgacaatcctgggctctcacctgatccactggtatcagcagaagcccggccagcctcctacactgctgattcagctggcctccaatgtgcagacaggcgtgccagccagattttctggcagcggcagcagaaccgacttcaccctgaccattgatcccgtggaagaggacgacgtggccgtgtactactgcctccagagcagaacaatccccagaacctttggcggaggcaccaagctggaaatcaaaggcggcggaggaagcggaggcggaggatctggtggtggtggatctcaaatccagctggtgcagtctggccccgagctgaagaaacctggcgagacagtgaagatcagctgcaaggccagcggctacaccttcaccgactacagcatcaactgggtcaagagagcccctggcaagggcctgaaatggatgggctggatcaacaccgaaaccagagagcccgcctacgcctacgacttcagaggcagattcgccttcagcctggaaaccagcgccagcacagcctacctccagatcaacaacctgaagtacgaggacaccgccacctacttttgcgccctggactacagctacgctatggactattggggccagggcaccagcgtgacagtctcttctacgcgtggaatgaggactgaggatcttcccaaagctgtcgtctttctcgaaccccaatggtatcgggtgctcgaaaaagactctgtgacactgaaatgccaaggggcctactctcccgaggacaactccacacagtggtttcataatgagtccctcatcagctctcaggccagctcttatttcattgatgccgctacagtggacgactccggcgagtatcggtgtcagaccaatctgtctacactgtctgaccccgtgcagcttgaggtccacattggatggttgctcttgcaagccccacgctgggttttcaaagaggaagatccaatccatctgcggtgccacagctggaaaaacaccgctctccacaaagtcacatacctgcaaaatggcaaaggacgcaaatacttccatcacaattccgatttttacattccgaaggctaccctgaaagacagcggcagctatttctgccggggactcgtcggctccaagaatgtgtcctccgaaaccgtgaatatcacgattacccaaggactggctgtgcctacaatctctagcttctttccgcctggataccaagtctccttctgtcttgtgatggtcctcctgtttgctgtggacacaggactgtacttttccgtg

SEQ ID NO: 1532 - DNA, 1449 bp, synthetic construct
  source 1..1449: mol_type = other DNA
atggccttaccagtgaccgccttgctcctgccgctggccttgctgctccacgccgccaggccgcaggtacagctgcaggaatctgggcccggacttgtcaagccaagtcagacactttctcttacatgtaccgtgagcggcggaagtataagcagtggaggcttttactggtcttggatacggcagcacccaggcaaaggcttggagtggattggatacattcatcattcaggatctacacactataatccatcccttaagtcccgggtcaccattagcattgatacgtctaagaatctgttcagtctcaggctgtcctccgtcactgctgccgacacagccgtgtactactgcgcctccttggtttactgcggaggcgactgttatagcggctttgattattgggggcaggggaccctcgtaaccgtgagctctggaggcggaggatcaggtggcggtggatctggcggtggcggatctgatatccagctcactcaaagcccctctagtctctctgcctcagtgggggatcgggtcagttttacttgtcaagcttcacaggatatcaacaacttccttaattggtatcagcagaagccaggaaaagcacccaagctgctcatctatgatgcctcaaatttggagacgggtgttcccagtcgattctctgggtcagggtccgggaccgactttacgtttacgatctcctctctgcagcccgaagacatcgccacatactattgtcaacagtacggcaacttgcctttcacatttgggggcgggactaaggttgaaatcaagaggacgcgtggaatgaggactgaggatcttcccaaagctgtcgtctttctcgaaccccaatggtatcgggtgctcgaaaaagactctgtgacactgaaatgccaaggggcctactctcccgaggacaactccacacagtggtttcataatgagtccctcatcagctctcaggccagctcttatttcattgatgccgctacagtggacgactccggcgagtatcggtgtcagaccaatctgtctacactgtctgaccccgtgcagcttgaggtccacattggatggttgctcttgcaagccccacgctgggttttcaaagaggaagatccaatccatctgcggtgccacagctggaaaaacaccgctctccacaaagtcacatacctgcaaaatggcaaaggacgcaaatacttccatcacaattccgatttttacattccgaaggctaccctgaaagacagcggcagctatttctgccggggactcgtcggctccaagaatgtgtcctccgaaaccgtgaatatcacgattacccaaggactggctgtgcctacaatctctagcttctttccgcctggataccaagtctccttctgtcttgtgatggtcctcctgtttgctgtggacacaggactgtacttttccgtg

SEQ ID NO: 1533 - DNA, 1443 bp, synthetic construct
  source 1..1443: mol_type = other DNA
atggccttaccagtgaccgccttgctcctgccgctggccttgctgctccacgccgccaggccgcaggtccaactgcaagaaagcggacccggactggtgaagccttctgagacacttagtctgacgtgcacggtcagtggcggctccatctcctcctattattggtcatggatacgacaacccccaggtaagggcctggaatggattggctatatctactattcaggaagcacgaactacaatcccagcctgaagtcccgagtgacaatttcagtagataccagtaaaaaccagttcagtcttaaactgtcaagcgtgacagctgccgacaccgctgtgtattactgcgtctcactggtgtattgtggaggggattgttatagcgggttcgattattggggacagggaaccctggtgactgtatcttccggaggcggaggatcaggtggcggtggatctggcggtggcggatctgatattcaactgacacaatcccccagctcactcagcgccagcgtgggggacagggttagctttacctgtcaagcctctcaggatataaataactttctgaactggtatcaacagaagcctgggaaggcgcccaaactcctgatctatgatgcgtccaacctggaaactggcgtgccttcacgctttagcggctctggcagtggtacagacttcacttttaccatctcttcacttcagccggaggacatcgccacatattactgtcaacagtacggaaacttgccctttacttttggaggcggcaccaaagttgaaatcaaaagaacgcgtggaatgaggactgaggatcttcccaaagctgtcgtctttctcgaaccccaatggtatcgggtgctcgaaaaagactctgtgacactgaaatgccaaggggcctactctcccgaggacaactccacacagtggtttcataatgagtccctcatcagctctcaggccagctcttatttcattgatgccgctacagtggacgactccggcgagtatcggtgtcagaccaatctgtctacactgtctgaccccgtgcagcttgaggtccacattggatggttgctcttgcaagccccacgctgggttttcaaagaggaagatccaatccatctgcggtgccacagctggaaaaacaccgctctccacaaagtcacatacctgcaaaatggcaaaggacgcaaatacttccatcacaattccgatttttacattccgaaggctaccctgaaagacagcggcagctatttctgccggggactcgtcggctccaagaatgtgtcctccgaaaccgtgaatatcacgattacccaaggactggctgtgcctacaatctctagcttctttccgcctggataccaagtctccttctgtcttgtgatggtcctcctgtttgctgtggacacaggactgtacttttccgtg

SEQ ID NO: 1534 - DNA, 1458 bp, synthetic construct
  source 1..1458: mol_type = other DNA
atggccttaccagtgaccgccttgctcctgccgctggccttgctgctccacgccgccaggccgcaagttactttgaaggagtctggacctgtactggtgaagccaaccgagacactgacactcacgtgtacagtgagtggtttttccttgatcaacgcaaggatgggcgtcagctggatcaggcaaccccctggcaaggctctggaatggctcgctcacatattcagcaatgccgaaaaaagctaccggacaagcctgaaatcccgcctgactatttccaaggacacttctaagtctcaggtggtgctgaccatgaccaacatggacccggtggacaccgccacctattactgcgcaagaatccctgggtatggtgggaatggtgactaccattattatgggatggatgtgtgggggcaaggcacaaccgtaacggtctcaagcggaggcggaggatcaggtggcggtggatctggcggtggcggatctgacattcagatgacccaaagcccgtccagcctgtccgccagcctgggagatagagtgacaatcacgtgtagagcttcccaagggataagaaatgatctcgggtggtatcagcagaagcccggcaaagcccccaaaaggcttatatatgctagtagtacactgcagtctggagttccttcccgattttcaggtagcggctccggtacagagttcaccctcacgataagctcactccagcctgaggatttcgcaacgtactactgcctccagcacaacaattttccctggactttcggccagggcaccaaggtggagatcaagaggacgcgtggaatgaggactgaggatcttcccaaagctgtcgtctttctcgaaccccaatggtatcgggtgctcgaaaaagactctgtgacactgaaatgccaaggggcctactctcccgaggacaactccacacagtggtttcataatgagtccctcatcagctctcaggccagctcttatttcattgatgccgctacagtggacgactccggcgagtatcggtgtcagaccaatctgtctacactgtctgaccccgtgcagcttgaggtccacattggatggttgctcttgcaagccccacgctgggttttcaaagaggaagatccaatccatctgcggtgccacagctggaaaaacaccgctctccacaaagtcacatacctgcaaaatggcaaaggacgcaaatacttccatcacaattccgatttttacattccgaaggctaccctgaaagacagcggcagctatttctgccggggactcgtcggctccaagaatgtgtcctccgaaaccgtgaatatcacgattacccaaggactggctgtgcctacaatctctagcttctttccgcctggataccaagtctccttctgtcttgtgatggtcctcctgtttgctgtggacacaggactgtacttttccgtg

SEQ ID NO: 1535 - DNA, 1440 bp, synthetic construct
  source 1..1440: mol_type = other DNA
atggccttaccagtgaccgccttgctcctgccgctggccttgctgctccacgccgccaggccgcagatccagttggtggaatcagggggcggtgtggtgcagccgggtaggagcctgagactgtcatgcgtggcgtctggcttcacattcaagaactacggcatgcactgggtgcgacaggcccccggaaagggtttggagtgggtcgccgtgatctggtacgacggatctaatgagtattacggagatcctgtgaagggaaggttcaccatctcccgcgacaatagcaaaaatatgctctacctgcaaatgaactcactcagggcggatgatacggcggtctactattgcgctcgctcagggattgctgtggccggcgcattcgattactggggacagggtaccctggtgacagtatcaagcggaggcggaggatcaggtggcggtggatctggcggtggcggatctgagattgtgttgacacagtctcccgataccctgtcactgtcacccggcgagaaggcaacgctgagttgcagagcaagccagtcagtctcctcttcttttctggcctggtatcagcaaaaaccaggtcaggcaccatctctcctgatttacgttgccagcagacgggcggctggcattcccgacaggttctctggaagcggatctgggaccgattttaccctgacaattagccgcttggagcccgaagactttggtatgttttactgccagcactacggaaggacacctttcacatttggcccgggcacgaaagtcgatataaaacgcacgcgtggaatgaggactgaggatcttcccaaagctgtcgtctttctcgaaccccaatggtatcgggtgctcgaaaaagactctgtgacactgaaatgccaaggggcctactctcccgaggacaactccacacagtggtttcataatgagtccctcatcagctctcaggccagctcttatttcattgatgccgctacagtggacgactccggcgagtatcggtgtcagaccaatctgtctacactgtctgaccccgtgcagcttgaggtccacattggatggttgctcttgcaagccccacgctgggttttcaaagaggaagatccaatccatctgcggtgccacagctggaaaaacaccgctctccacaaagtcacatacctgcaaaatggcaaaggacgcaaatacttccatcacaattccgatttttacattccgaaggctaccctgaaagacagcggcagctatttctgccggggactcgtcggctccaagaatgtgtcctccgaaaccgtgaatatcacgattacccaaggactggctgtgcctacaatctctagcttctttccgcctggataccaagtctccttctgtcttgtgatggtcctcctgtttgctgtggacacaggactgtacttttccgtg

SEQ ID NO: 1536 - DNA, 1443 bp, synthetic construct
  source 1..1443: mol_type = other DNA
atggccttaccagtgaccgccttgctcctgccgctggccttgctgctccacgccgccaggccggacatccaactgactcagagccccagctttctgagcgcctctgtgggcgacagagtgaccatcacatgtagagccagccagggcatcagcagctacctggcttggtatcagcagaagcctggcaaggcccctaaactgctgatctacgccgccagcacactccagtctggcgtgccaagcagattttctggcagcggctctggcaccgagttcaccctgacaatatccagcctccagcctgaggacttcgccacctactactgccagcaagtgaacagctaccctctgacctttggcggaggcaccaaggtggaaatcaagagaggcggaggcggaagtggaggcggaggatctggcggcggaggctctcaactgcaactgcaagagtctggccctggcctggtcaagcctagcgaaacactgagcctgacctgtaccgtgtctggcggcagcatcagctccagcacatattactggggctggatcagacagcctcctggcaaaggactggaatggatcggctccatctacttcaccggcagcaccgactacaaccccagcctgaagtccagggtgtccatctccgtggacaccagcaagaaccagttctccctgaagctgagcagcgtgacagccgctgataccgccgtgtactactgcgccaaagaggacgatagcagcggctactacagcttcgactattggggccagggcaacctggtcaccgttagctctacgcgtggaatgaggactgaggatcttcccaaagctgtcgtctttctcgaaccccaatggtatcgggtgctcgaaaaagactctgtgacactgaaatgccaaggggcctactctcccgaggacaactccacacagtggtttcataatgagtccctcatcagctctcaggccagctcttatttcattgatgccgctacagtggacgactccggcgagtatcggtgtcagaccaatctgtctacactgtctgaccccgtgcagcttgaggtccacattggatggttgctcttgcaagccccacgctgggttttcaaagaggaagatccaatccatctgcggtgccacagctggaaaaacaccgctctccacaaagtcacatacctgcaaaatggcaaaggacgcaaatacttccatcacaattccgatttttacattccgaaggctaccctgaaagacagcggcagctatttctgccggggactcgtcggctccaagaatgtgtcctccgaaaccgtgaatatcacgattacccaaggactggctgtgcctacaatctctagcttctttccgcctggataccaagtctccttctgtcttgtgatggtcctcctgtttgctgtggacacaggactgtacttttccgtg

SEQ ID NO: 1537 - DNA, 1452 bp, synthetic construct
  source 1..1452: mol_type = other DNA
atggccttaccagtgaccgccttgctcctgccgctggccttgctgctccacgccgccaggccgcagtctgctctgacccagcctagatccgtgtctggctctcctggacacagcgtgaccatcagctgtaccggcacctcttccgacgtgggcgactacaattacgtgtcctggtatcagcagaggcccggcaaggtgccaaagctgctgatctacgacgtgtccaagaggccaagcggcgtgcccgatagattttccggcagcaagtctggcaacaccgccagcctgacaatctctggactgcaagccgaggacgaggccatctacttttgtgccagctacgccggcaactacaacgtggtgtttggcggaggcaccaagctgacagtgcttggacaaggcggaggcggaagtggaggcggaggatctggcggcggaggctctcaagttcagctggtgcagtctggcagcgagctgaagaaacctggggcctctgtgaaggtgtcctgcaaggcttccggctacaccttcaacacctacgccatgaattgggtccgacaggctccaggccaaggactggaatggatgggctggatcaacaccaacaccggcaatcccacatacgcccagggcttcaccggcagattcgtgttctctctggacacctccgtgtccaccgcctacctccagatcagctctctgaaggccgaggataccgccgtgtactactgcgccagacggtacttcgattggctgctgggagccttcgacatctggggccagggaacaatggtcaccgtgtctagtacgcgtggaatgaggactgaggatcttcccaaagctgtcgtctttctcgaaccccaatggtatcgggtgctcgaaaaagactctgtgacactgaaatgccaaggggcctactctcccgaggacaactccacacagtggtttcataatgagtccctcatcagctctcaggccagctcttatttcattgatgccgctacagtggacgactccggcgagtatcggtgtcagaccaatctgtctacactgtctgaccccgtgcagcttgaggtccacattggatggttgctcttgcaagccccacgctgggttttcaaagaggaagatccaatccatctgcggtgccacagctggaaaaacaccgctctccacaaagtcacatacctgcaaaatggcaaaggacgcaaatacttccatcacaattccgatttttacattccgaaggctaccctgaaagacagcggcagctatttctgccggggactcgtcggctccaagaatgtgtcctccgaaaccgtgaatatcacgattacccaaggactggctgtgcctacaatctctagcttctttccgcctggataccaagtctccttctgtcttgtgatggtcctcctgtttgctgtggacacaggactgtacttttccgtg

SEQ ID NO: 1538 - DNA, 1428 bp, synthetic construct
  source 1..1428: mol_type = other DNA
atggccttaccagtgaccgccttgctcctgccgctggccttgctgctccacgccgccaggccggacatccagatgacacagagccctagcagcctgtctgccagcgtgggagacagagtgaccatcacatgtagcgccagccagggcatcaacaactacctgaactggtatcagcagaagcccggcaaggcccctaagctgctgatccactacacatctggactgcacgctggcgtgcccagcagattttctggctctggcagcggcaccgactacaccctgacaatatctagcctccagcctgaggacgtggcaacctactactgccagcagtacagcatcctgccttggacctttggcggaggcaccaaggtggaaatcaagagaggcggaggcggaagtggaggcggaggatctggcggcggaggctctcaagttcagcttgttcagagcggagccgaagtgaagaaacccggcagctctgtgaaggtgtcctgcaaggcttccggctacgcctttagcagcagctggatgaactgggtccgacaggctcctggacagggccttgaatggatgggcagaatctatcccggcgacggcaatacccactacgcccagaaattccagggccgcgtgacactgacagccgacaagtctacaagcaccgcctacatggaactgagcagcctgagaagcgaggacaccgccgtgtactattgcggcgaaggctatctggaccctatggactattggggccagggcacactggtcaccgttagctctacgcgtggaatgaggactgaggatcttcccaaagctgtcgtctttctcgaaccccaatggtatcgggtgctcgaaaaagactctgtgacactgaaatgccaaggggcctactctcccgaggacaactccacacagtggtttcataatgagtccctcatcagctctcaggccagctcttatttcattgatgccgctacagtggacgactccggcgagtatcggtgtcagaccaatctgtctacactgtctgaccccgtgcagcttgaggtccacattggatggttgctcttgcaagccccacgctgggttttcaaagaggaagatccaatccatctgcggtgccacagctggaaaaacaccgctctccacaaagtcacatacctgcaaaatggcaaaggacgcaaatacttccatcacaattccgatttttacattccgaaggctaccctgaaagacagcggcagctatttctgccggggactcgtcggctccaagaatgtgtcctccgaaaccgtgaatatcacgattacccaaggactggctgtgcctacaatctctagcttctttccgcctggataccaagtctccttctgtcttgtgatggtcctcctgtttgctgtggacacaggactgtacttttccgtg

SEQ ID NO: 1539 - DNA, 1437 bp, synthetic construct
  source 1..1437: mol_type = other DNA
atggccttaccagtgaccgccttgctcctgccgctggccttgctgctccacgccgccaggccggaggtgcagctggttgaatctggcggaggactggttcagcctggcggatctctgagactgtcttgtgccgccagcggctacaccttcaccacctattggatgcactgggtccgacaggcccctggcaaaggacttgagtgggtcggatatatcaggcccagcaccggctacacagagtacaaccagaagttcaaggaccgcttcaccatcagcgccgacaccagcaagaataccgcctacctccagatgaacagcctgagagccgaggacaccgccgtgtactactgtgccagatccagatggctgctggactattggggccagggcacactggttacagtttctggcggaggcggaagtggaggcggaggatctggcggcggaggctctgacattcagatgacacagagccctagcagcctgagcgcctctgtgggagacagagtgaccatcacatgcaagagcagccagagcgtgctgtactccagcaatcagaagaactacctggcctggttccagcagaagcctggcaaggctcctaagctgctgatctactgggccagcaccagagaaagcggcgtgccaagcagattttctggcagcggctctggcaccgacttcaccctgacaatatccagcctccagcctgaggacttcgccacctacttttgccaccagtacctgagcagctacacattcggacagggcaccaaggtggaaatcaagcggacgcgtggaatgaggactgaggatcttcccaaagctgtcgtctttctcgaaccccaatggtatcgggtgctcgaaaaagactctgtgacactgaaatgccaaggggcctactctcccgaggacaactccacacagtggtttcataatgagtccctcatcagctctcaggccagctcttatttcattgatgccgctacagtggacgactccggcgagtatcggtgtcagaccaatctgtctacactgtctgaccccgtgcagcttgaggtccacattggatggttgctcttgcaagccccacgctgggttttcaaagaggaagatccaatccatctgcggtgccacagctggaaaaacaccgctctccacaaagtcacatacctgcaaaatggcaaaggacgcaaatacttccatcacaattccgatttttacattccgaaggctaccctgaaagacagcggcagctatttctgccggggactcgtcggctccaagaatgtgtcctccgaaaccgtgaatatcacgattacccaaggactggctgtgcctacaatctctagcttctttccgcctggataccaagtctccttctgtcttgtgatggtcctcctgtttgctgtggacacaggactgtacttttccgtg

SEQ ID NO: 1540 - DNA, 1428 bp, synthetic construct
  source 1..1428: mol_type = other DNA
atggccttaccagtgaccgccttgctcctgccgctggccttgctgctccacgccgccaggccggacatccagatgacacagagccctagcagcctgtctgccagcgtgggagacagagtgaccatcacctgtagagccagccaggacatcagcaactacctgaactggtatcagcagaagcccggcaaggcccctaagctgctgatctactacaccagcagactgcacagcggcgtgcccagcagattttctggctctggcagcggcaccgacttcaccctgacaatatctagcctccagcctgaggacttcgccacctactattgccagcagggcaacaccctgccttacacatttggacagggcaccaaggtggaaatcaagagaggcggaggcggaagtggaggcggaggatctggcggcggaggctctgaagtgcagctggttgaatcaggtggcggcctggttcaacctggcggatctctgagactgagctgtgccgccagcggcttcaccttcagcgactactttatgagctgggtccgacaggcccctggcaaaggacttgaatgggtcgccaccatcagcaatggcggcacctacacttactaccccgacagcgtgaagggcagattcaccatctccagagacaacagcaagaacaccctgtacctccagatgaactccctgagagccgaggacaccgccgtgtactactgcgccagattcgacggctacatcttcgactattggggccagggcaccctggtcacagtctcttctacgcgtggaatgaggactgaggatcttcccaaagctgtcgtctttctcgaaccccaatggtatcgggtgctcgaaaaagactctgtgacactgaaatgccaaggggcctactctcccgaggacaactccacacagtggtttcataatgagtccctcatcagctctcaggccagctcttatttcattgatgccgctacagtggacgactccggcgagtatcggtgtcagaccaatctgtctacactgtctgaccccgtgcagcttgaggtccacattggatggttgctcttgcaagccccacgctgggttttcaaagaggaagatccaatccatctgcggtgccacagctggaaaaacaccgctctccacaaagtcacatacctgcaaaatggcaaaggacgcaaatacttccatcacaattccgatttttacattccgaaggctaccctgaaagacagcggcagctatttctgccggggactcgtcggctccaagaatgtgtcctccgaaaccgtgaatatcacgattacccaaggactggctgtgcctacaatctctagcttctttccgcctggataccaagtctccttctgtcttgtgatggtcctcctgtttgctgtggacacaggactgtacttttccgtg

SEQ ID NO: 1541 - DNA, 1449 bp, synthetic construct
  source 1..1449: mol_type = other DNA
atggccttaccagtgaccgccttgctcctgccgctggccttgctgctccacgccgccaggccggacatccagatgacacagagccctagcagcctgtctgccagcgtgggagacagagtgaccatcacctgtaccgccagcagcagagtgtccagcagctacctgcactggttccagcagaagcctggcaaggcccctaagctgctgatctacagcaccagcaatctggcctctggcgtgcccagcagattttctggctctggcagcggcaccgacttcaccctgacaatatctagcctccagcctgaggacttcgccacctactactgccaccagtaccacagaagcccctacacattcggccagggcaccaaggtggaaatcaagagaggcggaggcggaagtggaggcggaggatctggcggcggaggctctgaagttcagctggttgaatctggcggcggactggttcaacctggcggatctctgagactgagctgtgccgcctctggctacgccttcagcaacagctggatcaactgggtccgacaggcccctggcaaaggactggaatgggtcggacaaatctaccccggcgactacgacaccaactacaacggcaagttcaagggcagattcaccatcagccgggacaagagcaagaacaccgcctacctccagatgaactccctgagagccgaggacaccgccgtgtactattgtgctagaggcggctccatctactacggcaacctgggcttcttcgacgtgtggggacagggcacactggtcacagtctcttctacgcgtggaatgaggactgaggatcttcccaaagctgtcgtctttctcgaaccccaatggtatcgggtgctcgaaaaagactctgtgacactgaaatgccaaggggcctactctcccgaggacaactccacacagtggtttcataatgagtccctcatcagctctcaggccagctcttatttcattgatgccgctacagtggacgactccggcgagtatcggtgtcagaccaatctgtctacactgtctgaccccgtgcagcttgaggtccacattggatggttgctcttgcaagccccacgctgggttttcaaagaggaagatccaatccatctgcggtgccacagctggaaaaacaccgctctccacaaagtcacatacctgcaaaatggcaaaggacgcaaatacttccatcacaattccgatttttacattccgaaggctaccctgaaagacagcggcagctatttctgccggggactcgtcggctccaagaatgtgtcctccgaaaccgtgaatatcacgattacccaaggactggctgtgcctacaatctctagcttctttccgcctggataccaagtctccttctgtcttgtgatggtcctcctgtttgctgtggacacaggactgtacttttccgtg

SEQ ID NO: 1542 - DNA, 1419 bp, synthetic construct
  source 1..1419: mol_type = other DNA
atggccttaccagtgaccgccttgctcctgccgctggccttgctgctccacgccgccaggccggacatccagatgacacagagccctagcagcctgtctgccagcgtgggagacagagtgaccatcacatgtagcgccagcagcagcgtgacctacatgtactggtatcagcagaagcccggcaaggcccctaagctgctgatctacgacaccagcaatctggcctctggcgtgcccagcagattttctggctctggcagcggcaccgactacaccctgacaatatctagcctccagcctgaggacttcgccacctactactgccagcagtggtccaactatcccctgacattcggccagggcaccaaggtggaaatcaaaggcggaggcggaagtggaggcggaggatctggcggcggaggctctcaagttcagctggttcagagcggagccgaagtgaagaaacctggggcctctgtgaaggtgtcctgcaaggccagcggctacagcttcatcgagtacaccatcaactgggtccgacaggcccctggacaaggcctggaatggatcggcaacatcgacccctactacggcacaacctactacaaccagatgttcaccggcagagccacactgaccgtggacacctctatcagcaccgcctacatggaactgagccggctgagatccgatgacaccgccgtgtactattgtgccagaggcagcgcctggtttccctattggggacagggaaccctggtcaccgttagctctacgcgtggaatgaggactgaggatcttcccaaagctgtcgtctttctcgaaccccaatggtatcgggtgctcgaaaaagactctgtgacactgaaatgccaaggggcctactctcccgaggacaactccacacagtggtttcataatgagtccctcatcagctctcaggccagctcttatttcattgatgccgctacagtggacgactccggcgagtatcggtgtcagaccaatctgtctacactgtctgaccccgtgcagcttgaggtccacattggatggttgctcttgcaagccccacgctgggttttcaaagaggaagatccaatccatctgcggtgccacagctggaaaaacaccgctctccacaaagtcacatacctgcaaaatggcaaaggacgcaaatacttccatcacaattccgatttttacattccgaaggctaccctgaaagacagcggcagctatttctgccggggactcgtcggctccaagaatgtgtcctccgaaaccgtgaatatcacgattacccaaggactggctgtgcctacaatctctagcttctttccgcctggataccaagtctccttctgtcttgtgatggtcctcctgtttgctgtggacacaggactgtacttttccgtg

SEQ ID NO: 1543 - DNA, 1419 bp, synthetic construct
  source 1..1419: mol_type = other DNA
atggccttaccagtgaccgccttgctcctgccgctggccttgctgctccacgccgccaggccggagatcgtgctgacacagagcccttctagcctgtctgccagcgtgggcgacagagtgaccatcacatgtagagccagcgagaacatctacagctacctggcctggtatcagcagaagcctggcaaggcccctaagctgctgatctacaacaccaagacactcggcgagggcgtgcccagcagattttctggttctggcagcggcaccgacttcaccctgaccatatctagcctgcagcctgaggacttcgccacctactactgccagcaccactacggcacccctttcacatttggccctggcaccaaggtggacatcaaaggcggaggcggaagtggaggcggaggatctggcggcggaggctctcaagttcagctggttcagagcggagccgaagtgaagaaacctggggcctctgtgaaggtgtcctgcaaggccagcggctacaccttcagcgactattgggtgcactgggtccgacaggctccaggacaaggactggaatggatgggagccatcgacggcagcgataccttcaacgattacagccagaaattcaaaggccgcgtgaccatgaccagagacaccagcatcagcaccgcctacatggaactgagccggctgagatccgatgacaccgccgtgtactattgtgccagaggcggcctgctgcagtattggggacagggaacactggtcaccgtgtcctctacgcgtggaatgaggactgaggatcttcccaaagctgtcgtctttctcgaaccccaatggtatcgggtgctcgaaaaagactctgtgacactgaaatgccaaggggcctactctcccgaggacaactccacacagtggtttcataatgagtccctcatcagctctcaggccagctcttatttcattgatgccgctacagtggacgactccggcgagtatcggtgtcagaccaatctgtctacactgtctgaccccgtgcagcttgaggtccacattggatggttgctcttgcaagccccacgctgggttttcaaagaggaagatccaatccatctgcggtgccacagctggaaaaacaccgctctccacaaagtcacatacctgcaaaatggcaaaggacgcaaatacttccatcacaattccgatttttacattccgaaggctaccctgaaagacagcggcagctatttctgccggggactcgtcggctccaagaatgtgtcctccgaaaccgtgaatatcacgattacccaaggactggctgtgcctacaatctctagcttctttccgcctggataccaagtctccttctgtcttgtgatggtcctcctgtttgctgtggacacaggactgtacttttccgtg

SEQ ID NO: 1544 - DNA, 1431 bp, synthetic construct
  source 1..1431: mol_type = other DNA
atggccttaccagtgaccgccttgctcctgccgctggccttgctgctccacgccgccaggccgcaggttcagctccagcagtctggacctgagctggttaagcctggcgcttccgtgaagatcagctgcaaggcttccggctacgccttcagcagcagctggatgaactgggtcaaacagaggcccggcaaaggactggaatggatcggcagaatctaccccggcgacgaggacaccaattacagcggcaagttcaaggacaaggccacactgaccgccgacaagagcagcaccacagcctacatgcagctgagcagcctgaccagcgaggatagcgccgtgtacttctgtgccagaagcctgctgtacggcgactacctggattattggggccagggcacaaccctgacagtgtctagcggcggaggcggaagtggaggcggaggatctggcggcggaggctctcaaattgtgctgacacagagccccgccatcatgagcgcttctccaggcgagaaagtgaccatgacctgtagcgccagcagctccgtgtcttacatgcactggtatcagcagaagtccggcacaagccccaagcggtggatctacgataccagcaaactggcctccggcgtgcccgatagattttctggcagcggcagcggaaccagctacttcctgaccatcaacaacatggaagccgaggacgccgccacctactactgccagcagtggaacatcaaccctctgacctttggagccggcaccaagctggaactgaagagaacgcgtggaatgaggactgaggatcttcccaaagctgtcgtctttctcgaaccccaatggtatcgggtgctcgaaaaagactctgtgacactgaaatgccaaggggcctactctcccgaggacaactccacacagtggtttcataatgagtccctcatcagctctcaggccagctcttatttcattgatgccgctacagtggacgactccggcgagtatcggtgtcagaccaatctgtctacactgtctgaccccgtgcagcttgaggtccacattggatggttgctcttgcaagccccacgctgggttttcaaagaggaagatccaatccatctgcggtgccacagctggaaaaacaccgctctccacaaagtcacatacctgcaaaatggcaaaggacgcaaatacttccatcacaattccgatttttacattccgaaggctaccctgaaagacagcggcagctatttctgccggggactcgtcggctccaagaatgtgtcctccgaaaccgtgaatatcacgattacccaaggactggctgtgcctacaatctctagcttctttccgcctggataccaagtctccttctgtcttgtgatggtcctcctgtttgctgtggacacaggactgtacttttccgtg

SEQ ID NO: 1545 - DNA, 1440 bp, synthetic construct
  source 1..1440: mol_type = other DNA
atggccttaccagtgaccgccttgctcctgccgctggccttgctgctccacgccgccaggccggacatccagatgacacagagcagcgcctacctgagcgtgtcccttggaggcagagtgaccatcacatgcaaggccagcgaccacatcaacaactggctggcctggtatcagcacaagcccggcaatgcccctagactgctgatctctggcgctaccacactggaaacaggcgtgcccagcagattttctggcagcggctctggcaaggactacaccctgagcatcaccagcctccagaccgaggatgtggctacctactactgccagcagagctggaacaccccttggacatttggcggaggcaccaagctggaaatcaagagaggcggaggcggaagtggaggcggaggatctggcggcggaggctctcaagttcagctgcaacagagcggagccgagcttgtcagacctggcagctctgtgaagattagctgcaaagccagcggctacgccttcagcagctactgggtcaactggatgaagcagcggcctggacagggcctcgaatggatcggccaaatctatcctggcgacggcgacaccaactacaacggcaagtttaagggcagagccaccgtgaccgccgacaagagcagcagcacatcctacatgcagttcagcagcctgaccagcgaggacagcgccgtgtatttctgtgccagatccatcaccaccgtcgtgggctgcgctatggattattggggccagggcacaagcgtgaccgtgtcatctacgcgtggaatgaggactgaggatcttcccaaagctgtcgtctttctcgaaccccaatggtatcgggtgctcgaaaaagactctgtgacactgaaatgccaaggggcctactctcccgaggacaactccacacagtggtttcataatgagtccctcatcagctctcaggccagctcttatttcattgatgccgctacagtggacgactccggcgagtatcggtgtcagaccaatctgtctacactgtctgaccccgtgcagcttgaggtccacattggatggttgctcttgcaagccccacgctgggttttcaaagaggaagatccaatccatctgcggtgccacagctggaaaaacaccgctctccacaaagtcacatacctgcaaaatggcaaaggacgcaaatacttccatcacaattccgatttttacattccgaaggctaccctgaaagacagcggcagctatttctgccggggactcgtcggctccaagaatgtgtcctccgaaaccgtgaatatcacgattacccaaggactggctgtgcctacaatctctagcttctttccgcctggataccaagtctccttctgtcttgtgatggtcctcctgtttgctgtggacacaggactgtacttttccgtg

SEQ ID NO: 1546 - DNA, 1437 bp, synthetic construct
  source 1..1437: mol_type = other DNA
atggccttaccagtgaccgccttgctcctgccgctggccttgctgctccacgccgccaggccggaggttcagctgcttgagtctggcggaggactggttcaacctggcggaagcctgagactgtcttgtgccgccagcggcttcacctttagcagctacgccatgagctgggtccgacaggctcctggcaaaggactggaatgggtgtccgtgatctctggctctggcggcagacccaattacgccgattctgtgaagggcagattcaccatcagccgggacaacagcaagaacaccctgtacctccagatgaacagcctgcgcgacgaggataccgccgtgtactattgtgccaaggtggactacagcaactacctgttcttcgactactggggccagggcaccctggtcacagtttctagcggcggaggcggaagtggaggcggaggatctggcggcggaggctctgaaatcgtgctgacacagagccccggcacactgtcactttctccaggcgaaggcgctaccctgtcttgtagagctggacagtctgtgcggagcagctacctcggatggtatcagcagaagcctggacaggcccctcggctgttgatctacggtgcttctagcagagccacaggcatccccgatagattttctggcagcggctccggcaccgacttcaccctgacaatcagcagactggaacccgaggacttcgccgtgtattactgccagcagtacggctacagccctcctacatttggcggaggcaccaagctggaaatcaagacgcgtggaatgaggactgaggatcttcccaaagctgtcgtctttctcgaaccccaatggtatcgggtgctcgaaaaagactctgtgacactgaaatgccaaggggcctactctcccgaggacaactccacacagtggtttcataatgagtccctcatcagctctcaggccagctcttatttcattgatgccgctacagtggacgactccggcgagtatcggtgtcagaccaatctgtctacactgtctgaccccgtgcagcttgaggtccacattggatggttgctcttgcaagccccacgctgggttttcaaagaggaagatccaatccatctgcggtgccacagctggaaaaacaccgctctccacaaagtcacatacctgcaaaatggcaaaggacgcaaatacttccatcacaattccgatttttacattccgaaggctaccctgaaagacagcggcagctatttctgccggggactcgtcggctccaagaatgtgtcctccgaaaccgtgaatatcacgattacccaaggactggctgtgcctacaatctctagcttctttccgcctggataccaagtctccttctgtcttgtgatggtcctcctgtttgctgtggacacaggactgtacttttccgtg

SEQ ID NO: 1547 - DNA, 1446 bp, synthetic construct
  source 1..1446: mol_type = other DNA
atggccttaccagtgaccgccttgctcctgccgctggccttgctgctccacgccgccaggccggacatcgtgctgacacagagccctccaagcctggctatgagcctgggaaagagagccaccatcagctgtagagccagcgagagcgtgacaatcctgggctctcacctgatccactggtatcagcagaagcccggccagcctcctacactgctgattcagctggcctccaatgtgcagacaggcgtgccagccagattttctggcagcggcagcagaaccgacttcaccctgaccattgatcccgtggaagaggacgacgtggccgtgtactactgcctccagagcagaacaatccccagaacctttggcggaggcaccaagctggaaatcaagggcagcacaagcggcagcggaaagcctggatctggcgagggatctaccaagggacagatccagctggtgcagtctggccccgagctgaagaaacctggcgagacagtgaagatcagctgcaaggccagcggctacaccttcaccgactacagcatcaactgggtcaagagagcccctggcaagggcctgaaatggatgggctggatcaacaccgaaaccagagagcccgcctacgcctacgacttcagaggcagattcgccttcagcctggaaaccagcgccagcacagcctacctccagatcaacaacctgaagtacgaggacaccgccacctacttttgcgccctggactacagctacgctatggactattggggccagggcaccagcgtgacagtctcttctacgcgtggaatgaggactgaggatcttcccaaagctgtcgtctttctcgaaccccaatggtatcgggtgctcgaaaaagactctgtgacactgaaatgccaaggggcctactctcccgaggacaactccacacagtggtttcataatgagtccctcatcagctctcaggccagctcttatttcattgatgccgctacagtggacgactccggcgagtatcggtgtcagaccaatctgtctacactgtctgaccccgtgcagcttgaggtccacattggatggttgctcttgcaagccccacgctgggttttcaaagaggaagatccaatccatctgcggtgccacagctggaaaaacaccgctctccacaaagtcacatacctgcaaaatggcaaaggacgcaaatacttccatcacaattccgatttttacattccgaaggctaccctgaaagacagcggcagctatttctgccggggactcgtcggctccaagaatgtgtcctccgaaaccgtgaatatcacgattacccaaggactggctgtgcctacaatctctagcttctttccgcctggataccaagtctccttctgtcttgtgatggtcctcctgtttgctgtggacacaggactgtacttttccgtg

SEQ ID NO: 1548 - DNA, 1446 bp, synthetic construct
  source 1..1446: mol_type = other DNA
atggccttaccagtgaccgccttgctcctgccgctggccttgctgctccacgccgccaggccggacatccagatgacacagagccctagcagcctgtctgccagcgtgggagacagagtgaccatcacctgtagagccagcagcagcgtgtcctacatgcactggtatcagcagaagcccggcaaggcccctaagctgctgatctacgccaccagcaatctggcctctggcgtgccaagcagattttctggcagcggctctggcaccgacttcaccctgacaatatccagcctccagcctgaggacttcgccacctactactgccagcagtggaccttcaatcctcctaccttcggccagggcaccaagctggaaatcaagagaacagtggctgccggcggaggcggaagtggaggcggaggatctggcggcggaggctctcaagttcagctggttcagtctggggccgaagtgaagaaacctggggcctctgtgaaggtgtcctgcaaggcttccggctacacctttaccagctacaatatgcactgggtccgacaggctcccggccagagacttgaatggatgggcggcatctaccccggcaatggcgacacctcctacaaccagaaattcaagggccgcgtgacaatcaccagagacacctctgccagcaccgcctacatggaactgagcagcctgagaagcgaggacaccgccgtgtactactgcgccagatacgactacaactacgctatggactactggggccagggaaccctggtcacagtgtctagtgcttccacgcgtggaatgaggactgaggatcttcccaaagctgtcgtctttctcgaaccccaatggtatcgggtgctcgaaaaagactctgtgacactgaaatgccaaggggcctactctcccgaggacaactccacacagtggtttcataatgagtccctcatcagctctcaggccagctcttatttcattgatgccgctacagtggacgactccggcgagtatcggtgtcagaccaatctgtctacactgtctgaccccgtgcagcttgaggtccacattggatggttgctcttgcaagccccacgctgggttttcaaagaggaagatccaatccatctgcggtgccacagctggaaaaacaccgctctccacaaagtcacatacctgcaaaatggcaaaggacgcaaatacttccatcacaattccgatttttacattccgaaggctaccctgaaagacagcggcagctatttctgccggggactcgtcggctccaagaatgtgtcctccgaaaccgtgaatatcacgattacccaaggactggctgtgcctacaatctctagcttctttccgcctggataccaagtctccttctgtcttgtgatggtcctcctgtttgctgtggacacaggactgtacttttccgtg

SEQ ID NO: 1549 - DNA, 1431 bp, synthetic construct
  source 1..1431: mol_type = other DNA
atggccttaccagtgaccgccttgctcctgccgctggccttgctgctccacgccgccaggccggagatcgtgctgacacagagccctggcacactgtcactgtctccaggcgaaagagccacactgagctgtagagccagccagagcgtgtccagctcttacctggcttggtatcagcagaagcccggacaggctcccagactgctgatctacggtgcctctagcagagccacaggcatccccgatagattttctggcagcggctccggcaccgacttcaccctgacaatcagcagactggaacccgaggacttcgccgtgtactactgccagcagtaccaccactctccactgacctttggcggaggcaccaaggtggaaatcaagagaggcggaggcggaagtggaggcggaggatctggcggcggaggctctgaagttcagctggttgaatcaggtggcggcctggttcaacctggcggatctctgagactgtcttgtgccgccagcggcttcactttcagcggcagatccatgaactgggtccgacaggcccctggcaaaggactggaatgggtgtcctacatcagcagcgacagccggaccatctactacgccgatagcgtgaagggcagattcaccatctccagagacaacgccaagaacagcctgtacctccagatgaactccctgagagccgaggacacagccgtgtattattgtgccagaggcggccacggctacttcgatctttggggcagaggcaccctggtcaccgtttcttctacgcgtggaatgaggactgaggatcttcccaaagctgtcgtctttctcgaaccccaatggtatcgggtgctcgaaaaagactctgtgacactgaaatgccaaggggcctactctcccgaggacaactccacacagtggtttcataatgagtccctcatcagctctcaggccagctcttatttcattgatgccgctacagtggacgactccggcgagtatcggtgtcagaccaatctgtctacactgtctgaccccgtgcagcttgaggtccacattggatggttgctcttgcaagccccacgctgggttttcaaagaggaagatccaatccatctgcggtgccacagctggaaaaacaccgctctccacaaagtcacatacctgcaaaatggcaaaggacgcaaatacttccatcacaattccgatttttacattccgaaggctaccctgaaagacagcggcagctatttctgccggggactcgtcggctccaagaatgtgtcctccgaaaccgtgaatatcacgattacccaaggactggctgtgcctacaatctctagcttctttccgcctggataccaagtctccttctgtcttgtgatggtcctcctgtttgctgtggacacaggactgtacttttccgtg

SEQ ID NO: 1550 - DNA, 1440 bp, synthetic construct
  source 1..1440: mol_type = other DNA
atggccttaccagtgaccgccttgctcctgccgctggccttgctgctccacgccgccaggccggagatcgtgctgacacagagccctggcacactgtcactgtctccaggcgaaagagccacactgagctgtagagccagccagagcgtgtccagcgattacctggcttggtatcagcagaagcccggacaggctcccagactgctgatctatggtgcctctcggagagccacaggcatccccgatagattttctggcagcggctccggcaccgacttcaccctgacaatcagcagactggaacccgaggacttcgccgtgtactactgccagcagtacgtgtcctactggacctttggcggaggcaccaaggtggaaatcaagagaggcggaggcggaagtggaggcggaggatctggcggcggaggctctcaagttcagctggttgaatcaggcggaggcgttgtgcagcctggcagaagtctgagactgtcttgtgccgccagcggcttcaccttcagcagctatggaatgcactgggtccgacaggcccctggcaaaggacttgaatgggtggccggcatttggtgggacggcagcaatgagaagtacgccgacagcgtgaagggcagattcaccatctccagagacaacagcaagaacaccctgtacctccagatgaacagcctgagagccgaggacacagccgtgtattattgcgccaaagaggccccttactacgccaaggactacatggacgtgtggggcaagggcaccacagtgactgtctcttctacgcgtggaatgaggactgaggatcttcccaaagctgtcgtctttctcgaaccccaatggtatcgggtgctcgaaaaagactctgtgacactgaaatgccaaggggcctactctcccgaggacaactccacacagtggtttcataatgagtccctcatcagctctcaggccagctcttatttcattgatgccgctacagtggacgactccggcgagtatcggtgtcagaccaatctgtctacactgtctgaccccgtgcagcttgaggtccacattggatggttgctcttgcaagccccacgctgggttttcaaagaggaagatccaatccatctgcggtgccacagctggaaaaacaccgctctccacaaagtcacatacctgcaaaatggcaaaggacgcaaatacttccatcacaattccgatttttacattccgaaggctaccctgaaagacagcggcagctatttctgccggggactcgtcggctccaagaatgtgtcctccgaaaccgtgaatatcacgattacccaaggactggctgtgcctacaatctctagcttctttccgcctggataccaagtctccttctgtcttgtgatggtcctcctgtttgctgtggacacaggactgtacttttccgtg

SEQ ID NO: 1551 - DNA, 1440 bp, synthetic construct
  source 1..1440: mol_type = other DNA
atggccttaccagtgaccgccttgctcctgccgctggccttgctgctccacgccgccaggccggacatccagatgacacagagccctagcagcctgtctgccagcgtgggagacagagtgaccatcacctgtagagccagccaggacgtgaacacagccgtggcttggtatcagcagaagcctggcaaggcccctaagctgctgatctacagcgccagctttctgtacagcggcgtgcccagcagattcagcggaagcagaagcggcaccgacttcaccctgacaatatccagcctccagcctgaggacttcgccacctactactgccagcagcactacaccacacctccaacattcggccagggcaccaaggtggaaatcaagagaacaggcggaggcggaagtggaggcggaggatctggcggcggaggctctgaagtgcagctggttgaatcaggtggcggcctggttcaacctggcggatctctgagactgagctgtgccgccagcggcttcaacatcaaggacacctacatccactgggtccgacaggcccctggcaaaggacttgaatgggtcgccagaatctaccccaccaacggctacaccagatacgccgactctgtgaagggcagattcaccatcagcgccgacaccagcaagaacaccgcctacctccagatgaactccctgagagccgaggacaccgccgtgtactactgtagcagatggggcggctggggcttctacgctatggattattggggccagggaaccctggtcaccgtgtcatctacgcgtggaatgaggactgaggatcttcccaaagctgtcgtctttctcgaaccccaatggtatcgggtgctcgaaaaagactctgtgacactgaaatgccaaggggcctactctcccgaggacaactccacacagtggtttcataatgagtccctcatcagctctcaggccagctcttatttcattgatgccgctacagtggacgactccggcgagtatcggtgtcagaccaatctgtctacactgtctgaccccgtgcagcttgaggtccacattggatggttgctcttgcaagccccacgctgggttttcaaagaggaagatccaatccatctgcggtgccacagctggaaaaacaccgctctccacaaagtcacatacctgcaaaatggcaaaggacgcaaatacttccatcacaattccgatttttacattccgaaggctaccctgaaagacagcggcagctatttctgccggggactcgtcggctccaagaatgtgtcctccgaaaccgtgaatatcacgattacccaaggactggctgtgcctacaatctctagcttctttccgcctggataccaagtctccttctgtcttgtgatggtcctcctgtttgctgtggacacaggactgtacttttccgtg

SEQ ID NO: 1552 - DNA, 1425 bp, synthetic construct
  source 1..1425: mol_type = other DNA
atggccttaccagtgaccgccttgctcctgccgctggccttgctgctccacgccgccaggccgcaggtgcagctggttgaatctggcggcggacttgtgaagcctggcggatctctgagactgagctgtgccgccagcggcttcaccttcagcgactactacatgacctggatcagacaggcccctggcaaaggactggaatggatcagctacatcagcagcagcggcagcaccatctactacgccgatagcgtgaagggcagattcaccatcagccgggacaacgccaagaacagcctgtacctccagatgaactccctgagagccgaggacaccgccgtgtactactgcgccagagacagaaacagccacttcgactattggggccagggcaccctggtcacagtttctagcggcggaggcggaagtggaggcggaggatctggcggcggaggctctgatattcagatgacacagagccccagcagcgtgtccgcctctgtgggagatagagtgaccatcacctgtagagccagccagggcatcacaagatggctggcctggtatcagcagaagccaggcaaggcccctaagctgctgatctacgccgcttctgtgctccagagcggagtgcctagcagattttctggcagcggctccggcaccgatttcaccctgacaatatccagcctccagcctgaggacttcgccacctactactgccagcagagcaacagcttccccagaacattcggacagggcaccaaggtggaaatcaagacgcgtggaatgaggactgaggatcttcccaaagctgtcgtctttctcgaaccccaatggtatcgggtgctcgaaaaagactctgtgacactgaaatgccaaggggcctactctcccgaggacaactccacacagtggtttcataatgagtccctcatcagctctcaggccagctcttatttcattgatgccgctacagtggacgactccggcgagtatcggtgtcagaccaatctgtctacactgtctgaccccgtgcagcttgaggtccacattggatggttgctcttgcaagccccacgctgggttttcaaagaggaagatccaatccatctgcggtgccacagctggaaaaacaccgctctccacaaagtcacatacctgcaaaatggcaaaggacgcaaatacttccatcacaattccgatttttacattccgaaggctaccctgaaagacagcggcagctatttctgccggggactcgtcggctccaagaatgtgtcctccgaaaccgtgaatatcacgattacccaaggactggctgtgcctacaatctctagcttctttccgcctggataccaagtctccttctgtcttgtgatggtcctcctgtttgctgtggacacaggactgtacttttccgtg

SEQ ID NO: 1553 - DNA, 1425 bp, synthetic construct
  source 1..1425: mol_type = other DNA
atggccttaccagtgaccgccttgctcctgccgctggccttgctgctccacgccgccaggccgcaggtgcagctggttgaatctggcggcggacttgtgaagcctggcggatctctgagactgagctgtgccgccagcggcttcaccttcagcgatcactacatgagctggatcagacaggcccctggcaaaggactggaatggttcagctacatcagcagcagcggcggcatcatctactacgccgatagcgtgaagggcagattcaccatcagccgggacaacgccaagaacagcctgtacctccagatgaactccctgagagccgaggacaccgccgtgtactactgtgccagagatgtgggcagccacttcgactattggggccagggaacactggtcaccgtttctagcggcggaggcggaagtggaggcggaggatctggcggcggaggctctgatattcagatgacacagagccccagcagcgtgtccgcctctgtgggagatagagtgaccatcacctgtcgggccagccaggacattagcagatggctggcttggtatcagcagaagccaggcaaggcccctaagctgctgatttcagccgccagcagactccagagcggagtgcctagcagattttctggctctggcagcggcaccgacttcaccctgacaatatctagcctccagcctgaggacttcgccatctactattgccagcaggccaagagcttccccagaacatttggacagggcaccaaggtggaaatcaagacgcgtggaatgaggactgaggatcttcccaaagctgtcgtctttctcgaaccccaatggtatcgggtgctcgaaaaagactctgtgacactgaaatgccaaggggcctactctcccgaggacaactccacacagtggtttcataatgagtccctcatcagctctcaggccagctcttatttcattgatgccgctacagtggacgactccggcgagtatcggtgtcagaccaatctgtctacactgtctgaccccgtgcagcttgaggtccacattggatggttgctcttgcaagccccacgctgggttttcaaagaggaagatccaatccatctgcggtgccacagctggaaaaacaccgctctccacaaagtcacatacctgcaaaatggcaaaggacgcaaatacttccatcacaattccgatttttacattccgaaggctaccctgaaagacagcggcagctatttctgccggggactcgtcggctccaagaatgtgtcctccgaaaccgtgaatatcacgattacccaaggactggctgtgcctacaatctctagcttctttccgcctggataccaagtctccttctgtcttgtgatggtcctcctgtttgctgtggacacaggactgtacttttccgtg

SEQ ID NO: 1554 - DNA, 1461 bp, synthetic construct
  source 1..1461: mol_type = other DNA
atggccttaccagtgaccgccttgctcctgccgctggccttgctgctccacgccgccaggccgcaggtgcagctggttgaatctggtggcggagtggtgcagtctggcagaagcctgagactgtcttgtgccgccagcggcttcaccttcagaaactacggaatgcactgggtccgacaggcccctggcaaaggacttgaatgggtcgccgtgatttggtacgacggcagcgacaagtactacgccgattctgtgcggggcagattcaccatcagccgggacaacagcaagaacaccctgtacctccagatgaacagcctgagagccgaggacaccgccgtgtactactgtgccagagatggctacgacatcctgaccggcaatcccagagacttcgactattggggccagggcacactggtcacagtttctagcggcggaggcggaagtggaggcggaggatctggcggcggaggctctgataccgtgatgacccagacacctctgagcagccacgtgacacttggacagcctgccagcatcagctgtagaagcagccagagcctggtgcacagcgacggcaatacctacctgtcttggctccagcagaggccaggacagcctcctagactgctgatctaccggatcagcagacggttcagcggcgtgcccgatagattttctggaagcggagccggcaccgacttcaccctggaaatcagcagagtggaagccgaggatgtgggcgtctactactgtatgcagagcacccacgtgccacggacctttggacagggcaccaaggtggaaatcaagacgcgtggaatgaggactgaggatcttcccaaagctgtcgtctttctcgaaccccaatggtatcgggtgctcgaaaaagactctgtgacactgaaatgccaaggggcctactctcccgaggacaactccacacagtggtttcataatgagtccctcatcagctctcaggccagctcttatttcattgatgccgctacagtggacgactccggcgagtatcggtgtcagaccaatctgtctacactgtctgaccccgtgcagcttgaggtccacattggatggttgctcttgcaagccccacgctgggttttcaaagaggaagatccaatccatctgcggtgccacagctggaaaaacaccgctctccacaaagtcacatacctgcaaaatggcaaaggacgcaaatacttccatcacaattccgatttttacattccgaaggctaccctgaaagacagcggcagctatttctgccggggactcgtcggctccaagaatgtgtcctccgaaaccgtgaatatcacgattacccaaggactggctgtgcctacaatctctagcttctttccgcctggataccaagtctccttctgtcttgtgatggtcctcctgtttgctgtggacacaggactgtacttttccgtg

SEQ ID NO: 1555 - DNA, 1440 bp, synthetic construct
  source 1..1440: mol_type = other DNA
atggccttaccagtgaccgccttgctcctgccgctggccttgctgctccacgccgccaggccggaggtgcagctggttgaatctggcggaggactggttcagcctggcggatctctgagactgtcttgtgccgccagcggcttcccattcagcagctacgatatgcactgggtccgacaggccacaggcaaaggactggaatgggtgtccgccatcggaacagccggcgctacctattatcccggctctgtgaagggcagattcaccatcagcagagagaacgccaagaacagcctgtacctccagatgaactccctgagagccggcgataccgccgtgtactattgtgccagaggcgactacgtgtggggcacctacagacccctgttcgattattggggccagggcaccctggtcacagtttctagtggcggaggcggaagtggaggcggaggatctggcggcggaggctctgatattcagctgactcagagccccagcttcctgtctgcctctgtgggcgacagagtgaccatcacatgttgggccagccagggcatcaacaactacctggcctggtatcagcagaagcccggcaaggctcctaagctgctgatctacgccgccagcacactgcaaacaggcgtgccaagcagattttccggctctggcagcggcaccgagttcaccctgacaatatctagcctccagcctgaggacttcgccacctactactgccagcagctgaacagctaccctctgacctttggaggcggcaccaaggtggaaatcaagacgcgtggaatgaggactgaggatcttcccaaagctgtcgtctttctcgaaccccaatggtatcgggtgctcgaaaaagactctgtgacactgaaatgccaaggggcctactctcccgaggacaactccacacagtggtttcataatgagtccctcatcagctctcaggccagctcttatttcattgatgccgctacagtggacgactccggcgagtatcggtgtcagaccaatctgtctacactgtctgaccccgtgcagcttgaggtccacattggatggttgctcttgcaagccccacgctgggttttcaaagaggaagatccaatccatctgcggtgccacagctggaaaaacaccgctctccacaaagtcacatacctgcaaaatggcaaaggacgcaaatacttccatcacaattccgatttttacattccgaaggctaccctgaaagacagcggcagctatttctgccggggactcgtcggctccaagaatgtgtcctccgaaaccgtgaatatcacgattacccaaggactggctgtgcctacaatctctagcttctttccgcctggataccaagtctccttctgtcttgtgatggtcctcctgtttgctgtggacacaggactgtacttttccgtg

SEQ ID NO: 1556 - DNA, 1431 bp, synthetic construct
  source 1..1431: mol_type = other DNA
atggccttaccagtgaccgccttgctcctgccgctggccttgctgctccacgccgccaggccgcaggttcagctgcaagagtctggccctggcctggtcaagcctagcgaaacactgagcctgacctgtaccgtgtctggggccagcatcagcagcttctactggtcctggatcagacagcctcctggcaaaggactggaatggatcggctacatctactacagcggcaccaccaactacaaccccagcctgaagtccagagtgaccatcagcgtggacaccagcaagaaccagttctccctgaagctgagcagcgtgacagccgccgatacagccgtgtactactgtgccagaattgccgtggccggcttcttcttcgactattggggccagggcaccctggtcacagtttctagcggcggaggcggaagtggaggcggaggatctggcggcggaggctctgaaattgtgctgacacagagccccggcacactgtcactttctccaggcgaaagagccacactgagctgtagagccagccagagcgtgaacaagaactacctggcttggtatcagcagaagcccggacaggctcccagactgctgatctacggtgcctctagcagagccacaggcatccccgatagattttctggcagcggctccggcaccgacttcaccctgacaatcagcagactggaacccgaggacttcgccgtgtattattgccagcagtacgacagaagccctctgacctttggaggcggcaccaaggtggaaatcaagacgcgtggaatgaggactgaggatcttcccaaagctgtcgtctttctcgaaccccaatggtatcgggtgctcgaaaaagactctgtgacactgaaatgccaaggggcctactctcccgaggacaactccacacagtggtttcataatgagtccctcatcagctctcaggccagctcttatttcattgatgccgctacagtggacgactccggcgagtatcggtgtcagaccaatctgtctacactgtctgaccccgtgcagcttgaggtccacattggatggttgctcttgcaagccccacgctgggttttcaaagaggaagatccaatccatctgcggtgccacagctggaaaaacaccgctctccacaaagtcacatacctgcaaaatggcaaaggacgcaaatacttccatcacaattccgatttttacattccgaaggctaccctgaaagacagcggcagctatttctgccggggactcgtcggctccaagaatgtgtcctccgaaaccgtgaatatcacgattacccaaggactggctgtgcctacaatctctagcttctttccgcctggataccaagtctccttctgtcttgtgatggtcctcctgtttgctgtggacacaggactgtacttttccgtg

SEQ ID NO: 1557 - DNA, 1458 bp, synthetic construct
  source 1..1458: mol_type = other DNA
atggccttaccagtgaccgccttgctcctgccgctggccttgctgctccacgccgccaggccgcaggttcagctggttcagtctggggccgaagtgaagaaacctggggcctctgtgaaggtgtcctgcaaggccagcggctacacctttaccaactactacatgcactgggtccgacaggcccctggactgggacttgagtggatgggcatcatcaaccctagcgacggcagcacaagctacgcccagaaattccagggcagagtgaccatgaccagagacaccagcaccaacaccgtgtacatggacctgagcagcctgagaagcgaggacaccgccgtgtactattgtgccagaggcggcaacagcgccttctacagctactacgacatggacgtgtggggccagggcaccacagtgacagtttctagcggcggaggcggaagtggaggcggaggatctggcggcggaggctctgatgtggtcatgacacagacccctctgagcctgcctgtgacacttggacagcctgccagcatcagctgtagatccagccagagcctggtgtacagagatggcaacacctacctgagctggttccagcagaggcctggacagtctcctcggcggctgatctacaaggtgtccaactggcagagcggcgtgcccgatagattttctggcggtggcagcggcaccgacttcaccctgaagatcagcagagtggaagccgaggacgtgggcgtgtactactgtatgcagggcacacactggcctccaacattcggccagggaacaaaggtggaaatcaagacgcgtggaatgaggactgaggatcttcccaaagctgtcgtctttctcgaaccccaatggtatcgggtgctcgaaaaagactctgtgacactgaaatgccaaggggcctactctcccgaggacaactccacacagtggtttcataatgagtccctcatcagctctcaggccagctcttatttcattgatgccgctacagtggacgactccggcgagtatcggtgtcagaccaatctgtctacactgtctgaccccgtgcagcttgaggtccacattggatggttgctcttgcaagccccacgctgggttttcaaagaggaagatccaatccatctgcggtgccacagctggaaaaacaccgctctccacaaagtcacatacctgcaaaatggcaaaggacgcaaatacttccatcacaattccgatttttacattccgaaggctaccctgaaagacagcggcagctatttctgccggggactcgtcggctccaagaatgtgtcctccgaaaccgtgaatatcacgattacccaaggactggctgtgcctacaatctctagcttctttccgcctggataccaagtctccttctgtcttgtgatggtcctcctgtttgctgtggacacaggactgtacttttccgtg

SEQ ID NO: 1558 - DNA, 1419 bp, synthetic construct
  source 1..1419: mol_type = other DNA
atggccttaccagtgaccgccttgctcctgccgctggccttgctgctccacgccgccaggccgcaggttcagctccagcagtctggacctgagctggttaagcctggcgcttctgtgcggatctcttgcaaggccagcggctacaccttcaccacctactacatccactgggtcaagcagcggcctggacagggactcgaatggatcggctggatctaccccggcaacgtgaacaccaactacaacgagaagttcaagggcaaagccacactgaccgccgacaagagcagcagcacagcctacatgcagctgaccagcctgacctctgaggacagcgccgtgtacttttgtgccagaggcgtgtactacttcgactactggggccagggcaccatcctgacagtttctagcggcggaggcggaagtggaggcggaggatctggcggcggaggctctatcgtgatgacccagactcctaagttcctgctggtgtctgccggcgacagagtgaccatcacctgtaaagccagccagagcgtgaacaacgacgtgtcctggttccagcagaagcccggccaatctcctacactgctgatctactacgccagcaacagatacaccggcgtgcccgatagattcaccggctctggctacggcaccgacttcacctttaccatcagcaccgtgcaggccgaggacctggctgtgtacttctgccagcaagactacagcagcccttacacctttggaggcggcaccaagctggaaatcaagacgcgtggaatgaggactgaggatcttcccaaagctgtcgtctttctcgaaccccaatggtatcgggtgctcgaaaaagactctgtgacactgaaatgccaaggggcctactctcccgaggacaactccacacagtggtttcataatgagtccctcatcagctctcaggccagctcttatttcattgatgccgctacagtggacgactccggcgagtatcggtgtcagaccaatctgtctacactgtctgaccccgtgcagcttgaggtccacattggatggttgctcttgcaagccccacgctgggttttcaaagaggaagatccaatccatctgcggtgccacagctggaaaaacaccgctctccacaaagtcacatacctgcaaaatggcaaaggacgcaaatacttccatcacaattccgatttttacattccgaaggctaccctgaaagacagcggcagctatttctgccggggactcgtcggctccaagaatgtgtcctccgaaaccgtgaatatcacgattacccaaggactggctgtgcctacaatctctagcttctttccgcctggataccaagtctccttctgtcttgtgatggtcctcctgtttgctgtggacacaggactgtacttttccgtg

SEQ ID NO: 1559 - DNA, 1428 bp, synthetic construct
  source 1..1428: mol_type = other DNA
atggccttaccagtgaccgccttgctcctgccgctggccttgctgctccacgccgccaggccgcaggttcagctgcaagagtctggccctggcctggtcaagcctagccaaacactgagcctgacctgtaccgtgtctggcggcagcatcaacaacaacaattactactggacctggatcagacagcaccccggcaaaggactggaatggatcggctacatctactacagcggcagcaccttctacaaccccagcctgaagtccagagtgaccatcagcgtggacaccagcaagacccagttctccctgaagctgagcagcgtgacagccgccgatacagccgtgtactactgcgccagagaagataccatgaccggcctggatgtgtggggccagggaacaacagtgacagtgtctagcggcggaggcggaagtggaggcggaggatctggcggcggaggctctgacattcagatgacacagagccctagcagcctgagcgcctctgtgggagacagagtgacaattacctgtcgggccagccagtctatcaacaactacctgaactggtatcagcagaagcccggcaaggcccctacactgctgatctatgccgccagctctctccagagcggagtgcctagcagattcagcggaagcagaagcggcaccgacttcaccctgacaatatccagcctccagcctgaggacttcgccgcctacttttgccagcagacctacagcaaccccacctttggccagggcaccaaggtggaagtgaagacgcgtggaatgaggactgaggatcttcccaaagctgtcgtctttctcgaaccccaatggtatcgggtgctcgaaaaagactctgtgacactgaaatgccaaggggcctactctcccgaggacaactccacacagtggtttcataatgagtccctcatcagctctcaggccagctcttatttcattgatgccgctacagtggacgactccggcgagtatcggtgtcagaccaatctgtctacactgtctgaccccgtgcagcttgaggtccacattggatggttgctcttgcaagccccacgctgggttttcaaagaggaagatccaatccatctgcggtgccacagctggaaaaacaccgctctccacaaagtcacatacctgcaaaatggcaaaggacgcaaatacttccatcacaattccgatttttacattccgaaggctaccctgaaagacagcggcagctatttctgccggggactcgtcggctccaagaatgtgtcctccgaaaccgtgaatatcacgattacccaaggactggctgtgcctacaatctctagcttctttccgcctggataccaagtctccttctgtcttgtgatggtcctcctgtttgctgtggacacaggactgtacttttccgtg

SEQ ID NO: 1560 - DNA, 1443 bp, synthetic construct
  source 1..1443: mol_type = other DNA
atggccttaccagtgaccgccttgctcctgccgctggccttgctgctccacgccgccaggccgagctacgagctgacacagcctccaagcgtgtccgtgtctcctggacagacagccagcatcacctgtagcggcgataagctgggcgataagtacgccagctggtatcagcagaagcccggccagtctcctgtgctggtcatctaccaggacaacagaaggcccagcggcatccccgagagattcagcggcagcaatagcggcaataccgccacactgaccatcagcggcacccaggctatggacgaggccgactactattgccaggcttgggacagcgacacctacgtgttcggcaccggcaccaaagtgacagtgcttggacaaggcggaggcggaagtggaggcggaggatctggcggcggaggctctgaagttcagctggttcagagcggagccgaagtgaagaaacctggggcctctgtgaaggtgtcctgcaaggcttccggcgataccttcaagcggtactacgtgcactgggtccgacaggctccaggacaaggactggaatggatgggcatcatcaaccccagcggcgtgtccacaacatacgcccagaaattccagggcagagtgaccatgaccagagacaccagcacctccaccgtgtacatggaactgagcagcctgagaagcgaggacaccgccgtgtactactgtgctgaagtgcgcggcagcggcttcaactacttcggcatggatgtgtggggccagggcacactggttaccgtttcttctacgcgtggaatgaggactgaggatcttcccaaagctgtcgtctttctcgaaccccaatggtatcgggtgctcgaaaaagactctgtgacactgaaatgccaaggggcctactctcccgaggacaactccacacagtggtttcataatgagtccctcatcagctctcaggccagctcttatttcattgatgccgctacagtggacgactccggcgagtatcggtgtcagaccaatctgtctacactgtctgaccccgtgcagcttgaggtccacattggatggttgctcttgcaagccccacgctgggttttcaaagaggaagatccaatccatctgcggtgccacagctggaaaaacaccgctctccacaaagtcacatacctgcaaaatggcaaaggacgcaaatacttccatcacaattccgatttttacattccgaaggctaccctgaaagacagcggcagctatttctgccggggactcgtcggctccaagaatgtgtcctccgaaaccgtgaatatcacgattacccaaggactggctgtgcctacaatctctagcttctttccgcctggataccaagtctccttctgtcttgtgatggtcctcctgtttgctgtggacacaggactgtacttttccgtg

SEQ ID NO: 1561 - DNA, 1440 bp, synthetic construct
  source 1..1440: mol_type = other DNA
atggccttaccagtgaccgccttgctcctgccgctggccttgctgctccacgccgccaggccggaggttcagctgcttgagtctggcggaggactggttcaacctggcggaagcctgagactgtcttgtgccgccagcggcttcacctttagcagctacgccatgagctgggtccgacaggctcctggcaaaggactggaagtggtggtgtctgccatttctggcggcggaggcagaacctactacgccgattctgtgaagggcagattcaccatcagccgggacaacagcaagaacaccctgtacctgcagatgaacagcctgagagccgaggacaccgccgtgtactactgtgccagagaagagatggccttccgggcctacagattcgacatctggggccagggaaccctggtcacagtttctagcggcggaggcggaagtggaggcggaggatctggcggcggaggctctgatattcagatgacacagagccccagcagcctgtctgcctctgtgggagacagagtgaccatcacctgtagagccagccagagcatcagcagctacctgaactggtatcagcagaagcccggcaaggcccctaaactgctgatctatgccgcctccagtctgcagagcggagtgcctagcagattttctggctctggcagcggcaccgacttcaccctgacaatatctagcctgcagcctgaggacttcgccacctactactgccagcagagctacatcacccctctgacattcggtggcggcaccaaggtggaaatcaagacgcgtggaatgaggactgaggatcttcccaaagctgtcgtctttctcgaaccccaatggtatcgggtgctcgaaaaagactctgtgacactgaaatgccaaggggcctactctcccgaggacaactccacacagtggtttcataatgagtccctcatcagctctcaggccagctcttatttcattgatgccgctacagtggacgactccggcgagtatcggtgtcagaccaatctgtctacactgtctgaccccgtgcagcttgaggtccacattggatggttgctcttgcaagccccacgctgggttttcaaagaggaagatccaatccatctgcggtgccacagctggaaaaacaccgctctccacaaagtcacatacctgcaaaatggcaaaggacgcaaatacttccatcacaattccgatttttacattccgaaggctaccctgaaagacagcggcagctatttctgccggggactcgtcggctccaagaatgtgtcctccgaaaccgtgaatatcacgattacccaaggactggctgtgcctacaatctctagcttctttccgcctggataccaagtctccttctgtcttgtgatggtcctcctgtttgctgtggacacaggactgtacttttccgtg

SEQ ID NO: 1562 - DNA, 1464 bp, synthetic construct
  source 1..1464: mol_type = other DNA
atggccttaccagtgaccgccttgctcctgccgctggccttgctgctccacgccgccaggccggacatcgtgctgacacagagccctgcttctctggccgtgtctcttggacagggcgctaccatcagctgtagagccagcaagagcgtgtccaccagcggctacacctacatgcactggtatcagcagaagcccggccagcctcctaagctgctgatctacctggcctccaacctggaaagcggagtgcctgccagattttctggcagcggctctggcaccgacttcaccctgaatatccatcctgtggaagaagaggacgccgccacctactactgtcagcactctggcgaactgccacctagctttggcggaggcaccaagctggaaatcaagagagctggcggaggcggaagtggaggcggaggatctggcggcggaggctctgaagtgcagctggtggaatctggcggcgaccttgtgaaacctggcggctctctgaagctgagctgtgccgtgtccggcttcacctttagcagctacggcatgagctgggtccgacagacccctgacaagagactggaatgggtcgccacagtgtctagcggcggcacctacacatattaccccgacagcgtgaagggcagattcaccatcagccgggacaacgccaagaacaccctgtacctccagatgagcagcctgaagtccgaggacagcgccatgtactactgcgccagacaccggggcaattactacgccacctattattacgctatggactactggggccagggcaccagcgtgacagtttcttctacgcgtggaatgaggactgaggatcttcccaaagctgtcgtctttctcgaaccccaatggtatcgggtgctcgaaaaagactctgtgacactgaaatgccaaggggcctactctcccgaggacaactccacacagtggtttcataatgagtccctcatcagctctcaggccagctcttatttcattgatgccgctacagtggacgactccggcgagtatcggtgtcagaccaatctgtctacactgtctgaccccgtgcagcttgaggtccacattggatggttgctcttgcaagccccacgctgggttttcaaagaggaagatccaatccatctgcggtgccacagctggaaaaacaccgctctccacaaagtcacatacctgcaaaatggcaaaggacgcaaatacttccatcacaattccgatttttacattccgaaggctaccctgaaagacagcggcagctatttctgccggggactcgtcggctccaagaatgtgtcctccgaaaccgtgaatatcacgattacccaaggactggctgtgcctacaatctctagcttctttccgcctggataccaagtctccttctgtcttgtgatggtcctcctgtttgctgtggacacaggactgtacttttccgtg

SEQ ID NO: 1563 - DNA, 1446 bp, synthetic construct
  source 1..1446: mol_type = other DNA
atggccttaccagtgaccgccttgctcctgccgctggccttgctgctccacgccgccaggccggacatccagatgacacagagccctagcagcctgtctgccagcgtgggagacagagtgaccatcacatgtagcgccagccagggcatcagaaactacctgaactggtatcagcagaaacccggcaaggtgcccaagctgctgatctactacaccagcagactgcacagcggcgtgcccagcagattttctggctctggcagcggcaccgacttcaccctgacaatatctagcctccagcctgaggacgtggcaacctactactgtcagcagtacggcaagctgccctacacattcggccagggcaccaagctggaaatcaagagaacagtggctgccggcggaggcggaagtggaggcggaggatctggcggcggaggctctgaagttcagctggttgaatcaggcggcggactggttcaacctggcggatctctgagactgagctgtgccgccagcggcttcacattttccgacgcctggatggactgggtccgacaggctcctggaaaaggactggaatgggtcggagagatccggtccaaagtgaacaaccacgaaacctactatgccgagagcgtgaagggcagattcaccatcagccgggacgacagcaagaacagcctgtacctccagatgaactccctgaaaaccgaggacaccgccgtgtactactgcgccagaaacgactacttcgactactggggccagggaaccaccgtgacagtgtctagtgcttccacgcgtggaatgaggactgaggatcttcccaaagctgtcgtctttctcgaaccccaatggtatcgggtgctcgaaaaagactctgtgacactgaaatgccaaggggcctactctcccgaggacaactccacacagtggtttcataatgagtccctcatcagctctcaggccagctcttatttcattgatgccgctacagtggacgactccggcgagtatcggtgtcagaccaatctgtctacactgtctgaccccgtgcagcttgaggtccacattggatggttgctcttgcaagccccacgctgggttttcaaagaggaagatccaatccatctgcggtgccacagctggaaaaacaccgctctccacaaagtcacatacctgcaaaatggcaaaggacgcaaatacttccatcacaattccgatttttacattccgaaggctaccctgaaagacagcggcagctatttctgccggggactcgtcggctccaagaatgtgtcctccgaaaccgtgaatatcacgattacccaaggactggctgtgcctacaatctctagcttctttccgcctggataccaagtctccttctgtcttgtgatggtcctcctgtttgctgtggacacaggactgtacttttccgtg

SEQ ID NO: 1564 - DNA, 1470 bp, synthetic construct
  source 1..1470: mol_type = other DNA
atggccttaccagtgaccgccttgctcctgccgctggccttgctgctccacgccgccaggccggaggttcagctgcaagagtctggggccgaagtgaagaaacctggcagcagcgtgaaggtgtcctgcaaggccagcggcttcaacatcaaggacacctacatgcactgggtccgacaggcccctggacaaggacttgagtggatgggcagaatcgaccccgccaacggcaacagcaaatacgtgcccaagttccagggcagagtgaccatcacagccgacgagagcacaagcaccgcctacatggaactgagcagcctgagaagcgaggacaccgccgtgtactactgtgcccctttcggctactacgtgtccgactacgccatggcctattggggccagggaaccaccgtgacagtgtctagtgcatctggcggaggcggaagtggaggcggaggatctggcggcggaggctctgacatcgtgatgacacagagccccgatagcctggccgtgtctctgggagaaagagccaccatcaactgtagagccggcgagagcgtggacatcttcggcgtgggatttctgcactggtatcagcagaagcccggccagcctcctaagctgctgatctacagagccagcaacctggaaagcggcgtgcccgatagattttctggcagcggctctggcaccgacttcaccctgacaatcagacctctccaggccgaggatgtggccgtgtattattgccagcagaccaacgaggacccctacacatttggacagggcaccaagctggaaatcaagagaacagtggccgccacgcgtggaatgaggactgaggatcttcccaaagctgtcgtctttctcgaaccccaatggtatcgggtgctcgaaaaagactctgtgacactgaaatgccaaggggcctactctcccgaggacaactccacacagtggtttcataatgagtccctcatcagctctcaggccagctcttatttcattgatgccgctacagtggacgactccggcgagtatcggtgtcagaccaatctgtctacactgtctgaccccgtgcagcttgaggtccacattggatggttgctcttgcaagccccacgctgggttttcaaagaggaagatccaatccatctgcggtgccacagctggaaaaacaccgctctccacaaagtcacatacctgcaaaatggcaaaggacgcaaatacttccatcacaattccgatttttacattccgaaggctaccctgaaagacagcggcagctatttctgccggggactcgtcggctccaagaatgtgtcctccgaaaccgtgaatatcacgattacccaaggactggctgtgcctacaatctctagcttctttccgcctggataccaagtctccttctgtcttgtgatggtcctcctgtttgctgtggacacaggactgtacttttccgtg

SEQ ID NO: 1565 - DNA, 1449 bp, synthetic construct
  source 1..1449: mol_type = other DNA
atggccttaccagtgaccgccttgctcctgccgctggccttgctgctccacgccgccaggccgcaagttcagctggttcagtctggggccgaagtgaagaaacctggcagcagcgtgaaggtgtcctgcaaagcaagcggcggcacctttagcagctacgccatctcttgggtccgacaggcaccaggacaaggactggaatggatgggcctgattatccccagatacggcaaggccagatacgcccagaaattccagggcagagtgaccatcaccgccgacgagtctacaagcaccgcctacatggaactgagcagcctgagaagcgaggacacagccgtgtattattgcgcccggaactggccctactactacatggatttttggggccagggaaccctggtcaccgtgtctagtgcatctggcggaggcggaagtggaggcggaggatctggcggcggaggctctgacatcgtgctgacacagtctcccgccacactgtcactgtctccaggcgaaagagccacactgagctgtagagccagccagaacatcgtgttcaacctggcctggtatcagcagaagcctggacaggctccccggctgctgatctacgatgccagcaatagagccaccggcgtgcccgccagattttctggttctggcagcggcaccgacttcaccctgaccatatctagcctggaacctgaggacttcgccgtgtactactgccagcagaaaaagtccatgcctctgaccttcggccagggcaccaaggtggaaatcaagagaacagtggctgccacgcgtggaatgaggactgaggatcttcccaaagctgtcgtctttctcgaaccccaatggtatcgggtgctcgaaaaagactctgtgacactgaaatgccaaggggcctactctcccgaggacaactccacacagtggtttcataatgagtccctcatcagctctcaggccagctcttatttcattgatgccgctacagtggacgactccggcgagtatcggtgtcagaccaatctgtctacactgtctgaccccgtgcagcttgaggtccacattggatggttgctcttgcaagccccacgctgggttttcaaagaggaagatccaatccatctgcggtgccacagctggaaaaacaccgctctccacaaagtcacatacctgcaaaatggcaaaggacgcaaatacttccatcacaattccgatttttacattccgaaggctaccctgaaagacagcggcagctatttctgccggggactcgtcggctccaagaatgtgtcctccgaaaccgtgaatatcacgattacccaaggactggctgtgcctacaatctctagcttctttccgcctggataccaagtctccttctgtcttgtgatggtcctcctgtttgctgtggacacaggactgtacttttccgtg

SEQ ID NO: 1566 - DNA, 1458 bp, synthetic construct
  source 1..1458: mol_type = other DNA
atggccttaccagtgaccgccttgctcctgccgctggccttgctgctccacgccgccaggccggaggtgcagctggttgaatctggcggcggacttgtgaagcctggcggatctctgagactgagctgtgccgccagcggcttcacctttagcaatgcctggatgagctgggtccgacaggcccctggaaaaggactggaatgggtcggacggatcaagagcaagaccgaaggcggcaccaccgattatgctgcccctgtgaagggcagattcaccatcagcagggacgacagcaagaacaccctgtacctccagatgaacagcctgaaaaccgaggacaccgccgtgtactactgcaccacaccttacgagtggtcttggtacgactactggggccagggcacactggtcacagtgtcatctgcatctggcggaggcggaagtggaggcggaggatctggcggcggaggctctcagacagtggtcacccaagagcctagcctgacagtgtctcctggcggaaccgtgacactgacatgtggcagttctaccggcgctgtgaccaccagcaattacgccaactgggtgcagcagaagccaggccaagctcctagaggactgatcggcggcacaaacaagagagcccctggcacaccagccagattttctggctctctgctcggcggaaaggccgctcttacactgtctggtgtccagcctgaggacgaggccgagtattattgcgccctgtggtacagcaacctgtgggttttcggcggaggcaccaagctgacagtgctgactgttgctgctacgcgtggaatgaggactgaggatcttcccaaagctgtcgtctttctcgaaccccaatggtatcgggtgctcgaaaaagactctgtgacactgaaatgccaaggggcctactctcccgaggacaactccacacagtggtttcataatgagtccctcatcagctctcaggccagctcttatttcattgatgccgctacagtggacgactccggcgagtatcggtgtcagaccaatctgtctacactgtctgaccccgtgcagcttgaggtccacattggatggttgctcttgcaagccccacgctgggttttcaaagaggaagatccaatccatctgcggtgccacagctggaaaaacaccgctctccacaaagtcacatacctgcaaaatggcaaaggacgcaaatacttccatcacaattccgatttttacattccgaaggctaccctgaaagacagcggcagctatttctgccggggactcgtcggctccaagaatgtgtcctccgaaaccgtgaatatcacgattacccaaggactggctgtgcctacaatctctagcttctttccgcctggataccaagtctccttctgtcttgtgatggtcctcctgtttgctgtggacacaggactgtacttttccgtg

SEQ ID NO: 1567 - DNA, 1458 bp, synthetic construct
  source 1..1458: mol_type = other DNA
atggccttaccagtgaccgccttgctcctgccgctggccttgctgctccacgccgccaggccgcaggttcagctggttcagtctggggccgaagtgaagaaacctggggcctctgtgaaggtgtcctgcaaggcttccggctacacctttaccagctactacatgcactgggtccgacaggcccctggacaaggacttgagtggatgggcatcatcaaccctagcggcggcagcacaagctacgcccagaaattccagggcagagtgaccatgacacacgacaccagcacctccaccgtgtacatggaactgagcagcctgagaagcgaggacaccgccgtgtactactgcgccagatccttcttcaccggcttccacctggattactggggccagggaacactggtcacagtgtcatctgcatctggcggaggcggaagtggaggcggaggatctggcggcggaggctctgaaattgtgctgacacagagccccggcacactgtcactttctccaggcgaaagagccacactgagctgtagagccagccagagcgtgtccagctcttacctggcttggtatcagcagaagcccggccaggctcctagactgctgatctacggtgccagcagcagagccacaggcatccccgatagattttctggcagcggctccggcaccgacttcaccctgacaatcagcagactggaacccgaggactttgccgtgtattattgccagcagtacaccaacgagcactactacaccttcggccagggcaccaaggtggaaatcaagagaacagtggccgccacgcgtggaatgaggactgaggatcttcccaaagctgtcgtctttctcgaaccccaatggtatcgggtgctcgaaaaagactctgtgacactgaaatgccaaggggcctactctcccgaggacaactccacacagtggtttcataatgagtccctcatcagctctcaggccagctcttatttcattgatgccgctacagtggacgactccggcgagtatcggtgtcagaccaatctgtctacactgtctgaccccgtgcagcttgaggtccacattggatggttgctcttgcaagccccacgctgggttttcaaagaggaagatccaatccatctgcggtgccacagctggaaaaacaccgctctccacaaagtcacatacctgcaaaatggcaaaggacgcaaatacttccatcacaattccgatttttacattccgaaggctaccctgaaagacagcggcagctatttctgccggggactcgtcggctccaagaatgtgtcctccgaaaccgtgaatatcacgattacccaaggactggctgtgcctacaatctctagcttctttccgcctggataccaagtctccttctgtcttgtgatggtcctcctgtttgctgtggacacaggactgtacttttccgtg

SEQ ID NO: 1568 - DNA, 1476 bp, synthetic construct
  source 1..1476: mol_type = other DNA
atggccttaccagtgaccgccttgctcctgccgctggccttgctgctccacgccgccaggccggagatcgtgctgacacagtctcccgccacactgtcactgtctccaggcgaaagagccacactgagctgtagcgtgtccagcagcatcagcagcagcaacctgcactggtatcagcagaagcctggacaggcccctcggctgctgatctacggcacatctaatctggcctctggcatccccgccagattttctggctctggaagcggcaccgacttcaccctgaccataagcagcctggaacctgaggacttcgccgtgtactactgccagcagtggtccagctatccccacacatttggcggaggcaccaaggtggaaatcaagagaacagtggctgccggcggaggcggaagtggaggcggaggatctggcggcggaggctctcaggttcagctggttcagagcggagccgaagtgaagaaacctggggcctctgtgaaggtgtcctgcaaggcttccggctacacctttaccaactacctgatcgagtgggtccgacaggctccaggacaaggactggaatggatgggcctgattaaccctggcagcggcggcaccaactacaacgagaagttcaagggcagagtgaccatgaccaccgacaccagcacaagcaccgcctacatggaactgcggagcctgagaagcgacgacaccgccgtgtattattgcgccagaagaagccctctcggctcttggatctactacgcctatgacggcgtggcctattggggccagggaacactggttacagtgtcctctgccagcacgcgtggaatgaggactgaggatcttcccaaagctgtcgtctttctcgaaccccaatggtatcgggtgctcgaaaaagactctgtgacactgaaatgccaaggggcctactctcccgaggacaactccacacagtggtttcataatgagtccctcatcagctctcaggccagctcttatttcattgatgccgctacagtggacgactccggcgagtatcggtgtcagaccaatctgtctacactgtctgaccccgtgcagcttgaggtccacattggatggttgctcttgcaagccccacgctgggttttcaaagaggaagatccaatccatctgcggtgccacagctggaaaaacaccgctctccacaaagtcacatacctgcaaaatggcaaaggacgcaaatacttccatcacaattccgatttttacattccgaaggctaccctgaaagacagcggcagctatttctgccggggactcgtcggctccaagaatgtgtcctccgaaaccgtgaatatcacgattacccaaggactggctgtgcctacaatctctagcttctttccgcctggataccaagtctccttctgtcttgtgatggtcctcctgtttgctgtggacacaggactgtacttttccgtg

SEQ ID NO: 1569 - DNA, 1431 bp, synthetic construct
  source 1..1431: mol_type = other DNA
atggccttaccagtgaccgccttgctcctgccgctggccttgctgctccacgccgccaggccggacatccagatgacacagagccctagcagcctgtctgccagcgtgggagacagagtgaccatcacctgtaaagccggccagaacgtgggcacaagcgtggcatggtatcagcagaagcctggcaaggcccctaagctgctgatctacagcgccagctacagatacagcggcgtgcccagcagattttctggcagcggctctggcaccgacttcaccctgacaatatccagcctccagcctgaggacttcgccacctactactgccagcagtacatcacatacccctacaccttcggccagggcaccaaggtggaaatcaagagaacagtggctgccggcggaggcggaagtggaggcggaggatctggcggcggaggctctgaagttcagctggttgaatcaggcggcggactggttcaacctggcggatctctgagactgagctgtgccgccagcggcttcaccttcagcagatactggatgagctgggtccgacaggcccctggcaaaggacttgaatgggtcgccgagatcaaccccgacagcagcaccatccagtacaccccatctctgaaggcccggttcaccctgtccgtggacagaagcaagaacaccctgtacctccagatgaactccctgagagccgaggacaccgccgtgtactattgtgccagacctgcctattggggccagggaacactggtcacagtgtctagcgcttccacgcgtggaatgaggactgaggatcttcccaaagctgtcgtctttctcgaaccccaatggtatcgggtgctcgaaaaagactctgtgacactgaaatgccaaggggcctactctcccgaggacaactccacacagtggtttcataatgagtccctcatcagctctcaggccagctcttatttcattgatgccgctacagtggacgactccggcgagtatcggtgtcagaccaatctgtctacactgtctgaccccgtgcagcttgaggtccacattggatggttgctcttgcaagccccacgctgggttttcaaagaggaagatccaatccatctgcggtgccacagctggaaaaacaccgctctccacaaagtcacatacctgcaaaatggcaaaggacgcaaatacttccatcacaattccgatttttacattccgaaggctaccctgaaagacagcggcagctatttctgccggggactcgtcggctccaagaatgtgtcctccgaaaccgtgaatatcacgattacccaaggactggctgtgcctacaatctctagcttctttccgcctggataccaagtctccttctgtcttgtgatggtcctcctgtttgctgtggacacaggactgtacttttccgtg

SEQ ID NO: 1570 - DNA, 1452 bp, synthetic construct
  source 1..1452: mol_type = other DNA
atggccttaccagtgaccgccttgctcctgccgctggccttgctgctccacgccgccaggccggacatccagatgacacagagccctagcagcctgtctgccagcgtgggagacagagtgaccatcacatgtagcgccagccaggacatcggcaactttctgaactggtatcagcagaagcccggcaaggcccctaagctgctgatctactacacctccagcctgtacagcggcgtgcccagcagattttctggcagcggctctggcaccgacttcaccctgacaatatccagcctccagccagaggacttcgccacctactactgccagcagtacagcaagctgcccctgacctttggacagggcaccaagctggaaatcaagagaacagtggctgccggcggaggcggaagtggaggcggaggatctggcggcggaggctctcaagttcagctggttcagtctggggccgaagtgaagaaacctggggcctctgtgaaggtgtcctgcaaggcttccggctacacctttaccggctacaacatccactgggtccgacaggctcccggccaaagacttgaatggatgggcgctatctaccccggcaacggcgataccagctacaagcagaaattccggggcagagtgacaattaccagagacaccagcgccagcaccgcctacatggaactgtctagcctgagaagcgaggacaccgccgtgtactattgcgccagaggcgaaacagccagagccacctttgcctattggggccagggaaccctggtcacagtgtctagtgcttccacgcgtggaatgaggactgaggatcttcccaaagctgtcgtctttctcgaaccccaatggtatcgggtgctcgaaaaagactctgtgacactgaaatgccaaggggcctactctcccgaggacaactccacacagtggtttcataatgagtccctcatcagctctcaggccagctcttatttcattgatgccgctacagtggacgactccggcgagtatcggtgtcagaccaatctgtctacactgtctgaccccgtgcagcttgaggtccacattggatggttgctcttgcaagccccacgctgggttttcaaagaggaagatccaatccatctgcggtgccacagctggaaaaacaccgctctccacaaagtcacatacctgcaaaatggcaaaggacgcaaatacttccatcacaattccgatttttacattccgaaggctaccctgaaagacagcggcagctatttctgccggggactcgtcggctccaagaatgtgtcctccgaaaccgtgaatatcacgattacccaaggactggctgtgcctacaatctctagcttctttccgcctggataccaagtctccttctgtcttgtgatggtcctcctgtttgctgtggacacaggactgtacttttccgtg

SEQ ID NO: 1571 - DNA, 1044 bp, synthetic construct
  source 1..1044: mol_type = other DNA
atggccttaccagtgaccgccttgctcctgccgctggccttgctgctccacgccgccaggccggatgtgcaagtgacacagagccctagcagcctgtctgcctctgtgggcgacagagtgacaatcacctgtcggagcagccagagcctggctaactcctacggcaataccttcctgagctggtatctgcacaagcccggaaaggctccccagctgctgatctacggcatcagcaacagattcagcggcgtgcccgataggtttagcggctctggaagcggcaccgacttcaccctgacaatatccagcctccagcctgaggactttgccacctactactgtctgcaaggcacccaccagccttacacattcggacagggcaccaaggtggaaatcaagacgcgtggaatgaggactgaggatcttcccaaagctgtcgtctttctcgaaccccaatggtatcgggtgctcgaaaaagactctgtgacactgaaatgccaaggggcctactctcccgaggacaactccacacagtggtttcataatgagtccctcatcagctctcaggccagctcttatttcattgatgccgctacagtggacgactccggcgagtatcggtgtcagaccaatctgtctacactgtctgaccccgtgcagcttgaggtccacattggatggttgctcttgcaagccccacgctgggttttcaaagaggaagatccaatccatctgcggtgccacagctggaaaaacaccgctctccacaaagtcacatacctgcaaaatggcaaaggacgcaaatacttccatcacaattccgatttttacattccgaaggctaccctgaaagacagcggcagctatttctgccggggactcgtcggctccaagaatgtgtcctccgaaaccgtgaatatcacgattacccaaggactggctgtgcctacaatctctagcttctttccgcctggataccaagtctccttctgtcttgtgatggtcctcctgtttgctgtggacacaggactgtacttttccgtg

SEQ ID NO: 1572 - DNA, 1029 bp, synthetic construct
  source 1..1029: mol_type = other DNA
atggccttaccagtgaccgccttgctcctgccgctggccttgctgctccacgccgccaggccggacatccagatgacacagagccctagcagcctgtctgccagcgtgggagacagagtgaccatcacctgtagagccagccaggacatcagcaactacctgaactggtatcagcagaaacccggcaaggccgtgaagctgctgatctactacaccagcatcctgcacagcggcgtgcccagcagattttctggctctggcagcggcaccgactacaccctgacaatatctagcctccagcctgaggacttcgctacctacttctgccagcaaggcaacaccctgccttggacatttggcggaggcaccaaggtggaaatcaaaacgcgtggaatgaggactgaggatcttcccaaagctgtcgtctttctcgaaccccaatggtatcgggtgctcgaaaaagactctgtgacactgaaatgccaaggggcctactctcccgaggacaactccacacagtggtttcataatgagtccctcatcagctctcaggccagctcttatttcattgatgccgctacagtggacgactccggcgagtatcggtgtcagaccaatctgtctacactgtctgaccccgtgcagcttgaggtccacattggatggttgctcttgcaagccccacgctgggttttcaaagaggaagatccaatccatctgcggtgccacagctggaaaaacaccgctctccacaaagtcacatacctgcaaaatggcaaaggacgcaaatacttccatcacaattccgatttttacattccgaaggctaccctgaaagacagcggcagctatttctgccggggactcgtcggctccaagaatgtgtcctccgaaaccgtgaatatcacgattacccaaggactggctgtgcctacaatctctagcttctttccgcctggataccaagtctccttctgtcttgtgatggtcctcctgtttgctgtggacacaggactgtacttttccgtg

SEQ ID NO: 1573 - DNA, 1032 bp, synthetic construct
  source 1..1032: mol_type = other DNA
atggccttaccagtgaccgccttgctcctgccgctggccttgctgctccacgccgccaggccggacatcgtgatgacccagagccagcggttcatgaccacaagcgtgggcgatagagtgtccgtgacatgcaaggccagccagagcgtggactctaacgtggcctggtatcagcagaagcccagacagagccccaaggctctgatctttagcgccagcctgagattcagcggagtgcccgctagattcacaggcagcggctctggcaccgatttcaccctgaccatcagcaacctccagagcgaggacctggccgagtatttctgccagcagtacaacaactaccctctgaccttcggagccggcaccaagctggaactgaagagaacgcgtggaatgaggactgaggatcttcccaaagctgtcgtctttctcgaaccccaatggtatcgggtgctcgaaaaagactctgtgacactgaaatgccaaggggcctactctcccgaggacaactccacacagtggtttcataatgagtccctcatcagctctcaggccagctcttatttcattgatgccgctacagtggacgactccggcgagtatcggtgtcagaccaatctgtctacactgtctgaccccgtgcagcttgaggtccacattggatggttgctcttgcaagccccacgctgggttttcaaagaggaagatccaatccatctgcggtgccacagctggaaaaacaccgctctccacaaagtcacatacctgcaaaatggcaaaggacgcaaatacttccatcacaattccgatttttacattccgaaggctaccctgaaagacagcggcagctatttctgccggggactcgtcggctccaagaatgtgtcctccgaaaccgtgaatatcacgattacccaaggactggctgtgcctacaatctctagcttctttccgcctggataccaagtctccttctgtcttgtgatggtcctcctgtttgctgtggacacaggactgtacttttccgtg

SEQ ID NO: 1574 - DNA, 1032 bp, synthetic construct
  source 1..1032: mol_type = other DNA
atggccttaccagtgaccgccttgctcctgccgctggccttgctgctccacgccgccaggccggacatccagatgacacagagccctagcagcctgtctgccagcgtgggagacagagtgaccatcacctgtagagccagccaggacatcagcaactacctgaactggtatcagcagaagcccggcaaggcccctaagctgctgatctactacaccagcatcctgcacagcggcgtgcccagcagattttctggctctggcagcggcaccgacttcaccctgacaatatctagcctccagcctgaggacttcgccacctactattgccagcagggcaacaccctgccttggacctttggacagggcaccaaggtggaaatcaagagaacgcgtggaatgaggactgaggatcttcccaaagctgtcgtctttctcgaaccccaatggtatcgggtgctcgaaaaagactctgtgacactgaaatgccaaggggcctactctcccgaggacaactccacacagtggtttcataatgagtccctcatcagctctcaggccagctcttatttcattgatgccgctacagtggacgactccggcgagtatcggtgtcagaccaatctgtctacactgtctgaccccgtgcagcttgaggtccacattggatggttgctcttgcaagccccacgctgggttttcaaagaggaagatccaatccatctgcggtgccacagctggaaaaacaccgctctccacaaagtcacatacctgcaaaatggcaaaggacgcaaatacttccatcacaattccgatttttacattccgaaggctaccctgaaagacagcggcagctatttctgccggggactcgtcggctccaagaatgtgtcctccgaaaccgtgaatatcacgattacccaaggactggctgtgcctacaatctctagcttctttccgcctggataccaagtctccttctgtcttgtgatggtcctcctgtttgctgtggacacaggactgtacttttccgtg

SEQ ID NO: 1575 - DNA, 1032 bp, synthetic construct
  source 1..1032: mol_type = other DNA
atggccttaccagtgaccgccttgctcctgccgctggccttgctgctccacgccgccaggccggacatccagatgacacagagccctagcagcctgtctgccagcgtgggagacagagtgaccatcacatgcaaggccagcgaccacatcaacaactggctggcctggtatcagcagaagcctggcaaggcccctaagctgctgatctacggcgctaccacactggaaacaggcgtgcccagcagattttctggcagcggctctggcaccgacttcaccctgacaatatccagcctccagcctgaggacttcgccacctactactgtcagcagagctggaacaccccttggacattcggccagggcaccaaggtggaaatcaagagaacgcgtggaatgaggactgaggatcttcccaaagctgtcgtctttctcgaaccccaatggtatcgggtgctcgaaaaagactctgtgacactgaaatgccaaggggcctactctcccgaggacaactccacacagtggtttcataatgagtccctcatcagctctcaggccagctcttatttcattgatgccgctacagtggacgactccggcgagtatcggtgtcagaccaatctgtctacactgtctgaccccgtgcagcttgaggtccacattggatggttgctcttgcaagccccacgctgggttttcaaagaggaagatccaatccatctgcggtgccacagctggaaaaacaccgctctccacaaagtcacatacctgcaaaatggcaaaggacgcaaatacttccatcacaattccgatttttacattccgaaggctaccctgaaagacagcggcagctatttctgccggggactcgtcggctccaagaatgtgtcctccgaaaccgtgaatatcacgattacccaaggactggctgtgcctacaatctctagcttctttccgcctggataccaagtctccttctgtcttgtgatggtcctcctgtttgctgtggacacaggactgtacttttccgtg

SEQ ID NO: 1576 - DNA, 1032 bp, synthetic construct
  source 1..1032: mol_type = other DNA
atggccttaccagtgaccgccttgctcctgccgctggccttgctgctccacgccgccaggccgagctacgtgctgacacagcctccatccgtgtctgtggctccaggacagaccgccagaatcacatgcggcggcaacaacatcggcagcaagagcgtgcactggtatcagcagccacctggacaggctccagtggtggtggtgtacgacgacagcgatagacctagcggcatccccgagagattcagcggcagcaattccggcaataccgccacactgaccatcagcagagtggaagctggcgacgaggccgtgtactactgccaagtgtgggacagcagcagcgatcacgtggtgtttggcggcggaacaaagctgacagtgcttacgcgtggaatgaggactgaggatcttcccaaagctgtcgtctttctcgaaccccaatggtatcgggtgctcgaaaaagactctgtgacactgaaatgccaaggggcctactctcccgaggacaactccacacagtggtttcataatgagtccctcatcagctctcaggccagctcttatttcattgatgccgctacagtggacgactccggcgagtatcggtgtcagaccaatctgtctacactgtctgaccccgtgcagcttgaggtccacattggatggttgctcttgcaagccccacgctgggttttcaaagaggaagatccaatccatctgcggtgccacagctggaaaaacaccgctctccacaaagtcacatacctgcaaaatggcaaaggacgcaaatacttccatcacaattccgatttttacattccgaaggctaccctgaaagacagcggcagctatttctgccggggactcgtcggctccaagaatgtgtcctccgaaaccgtgaatatcacgattacccaaggactggctgtgcctacaatctctagcttctttccgcctggataccaagtctccttctgtcttgtgatggtcctcctgtttgctgtggacacaggactgtacttttccgtg

SEQ ID NO: 1577 - DNA, 1032 bp, synthetic construct
  source 1..1032: mol_type = other DNA
atggccttaccagtgaccgccttgctcctgccgctggccttgctgctccacgccgccaggccggacatccagatgacacagagccctagcagcctgtctgccagcgtgggagacagagtgaccatcacctgtatggcctccgaggacatctacatccggctggcctggtatcagcagaagcctggaaaggcccctaagctgctgatctacgccgccacctctctggaaacaggcgtgccaagcagattttccggcagcggctctggcaccgatttcaccctgaccataagcagcctgcagcctgaggacttcgccacctactactgccagcagtattggagcagcccctggacctttggacagggcaccaaggtggaaatcaagagaacgcgtggaatgaggactgaggatcttcccaaagctgtcgtctttctcgaaccccaatggtatcgggtgctcgaaaaagactctgtgacactgaaatgccaaggggcctactctcccgaggacaactccacacagtggtttcataatgagtccctcatcagctctcaggccagctcttatttcattgatgccgctacagtggacgactccggcgagtatcggtgtcagaccaatctgtctacactgtctgaccccgtgcagcttgaggtccacattggatggttgctcttgcaagccccacgctgggttttcaaagaggaagatccaatccatctgcggtgccacagctggaaaaacaccgctctccacaaagtcacatacctgcaaaatggcaaaggacgcaaatacttccatcacaattccgatttttacattccgaaggctaccctgaaagacagcggcagctatttctgccggggactcgtcggctccaagaatgtgtcctccgaaaccgtgaatatcacgattacccaaggactggctgtgcctacaatctctagcttctttccgcctggataccaagtctccttctgtcttgtgatggtcctcctgtttgctgtggacacaggactgtacttttccgtg

SEQ ID NO: 1578 - DNA, 1044 bp, synthetic construct
  source 1..1044: mol_type = other DNA
atggccttaccagtgaccgccttgctcctgccgctggccttgctgctccacgccgccaggccggacatccagatgacacagagccctagcagcgtgtccgcctctgtgggagacagagtgaccatcacctgtagagccagcgagagcgtggacaactacggcatcagcttcatgaactggtatcagcagaagcccggcaaggcccctaagctgctgattagcgccgccagcaatagagccacaggcgtgccaagcagattttccggctctggcagcggcaccgatttcaccctgacaatatccagcctccagcctgaggacttcgccatctactactgccagcagagcaaagaggtgccctggacctttggacagggcaccaaggtggaaatcaagagaacgcgtggaatgaggactgaggatcttcccaaagctgtcgtctttctcgaaccccaatggtatcgggtgctcgaaaaagactctgtgacactgaaatgccaaggggcctactctcccgaggacaactccacacagtggtttcataatgagtccctcatcagctctcaggccagctcttatttcattgatgccgctacagtggacgactccggcgagtatcggtgtcagaccaatctgtctacactgtctgaccccgtgcagcttgaggtccacattggatggttgctcttgcaagccccacgctgggttttcaaagaggaagatccaatccatctgcggtgccacagctggaaaaacaccgctctccacaaagtcacatacctgcaaaatggcaaaggacgcaaatacttccatcacaattccgatttttacattccgaaggctaccctgaaagacagcggcagctatttctgccggggactcgtcggctccaagaatgtgtcctccgaaaccgtgaatatcacgattacccaaggactggctgtgcctacaatctctagcttctttccgcctggataccaagtctccttctgtcttgtgatggtcctcctgtttgctgtggacacaggactgtacttttccgtg

SEQ ID NO: 1579 - DNA, 1044 bp, synthetic construct
  source 1..1044: mol_type = other DNA
atggccttaccagtgaccgccttgctcctgccgctggccttgctgctccacgccgccaggccggacatccagctgacacagagcccttctagcctgtctgccagcgtgggcgacagagtgaccatcacatgtagagccagcaagagcgtgtccaccagcggctacagctacatgcactggtatcagcagaagcccggcaaggcccctaagctgctgatctacctggtgtccaacctggaaagcggcgtgcccagcagattttctggcagcggctctggcaccgacttcaccctgacaatatccagcctccagcctgaggacttcgccacctactactgccagcagttcagcgagctgccttggacctttggacagggcaccaaggtggaaatcaagagaacgcgtggaatgaggactgaggatcttcccaaagctgtcgtctttctcgaaccccaatggtatcgggtgctcgaaaaagactctgtgacactgaaatgccaaggggcctactctcccgaggacaactccacacagtggtttcataatgagtccctcatcagctctcaggccagctcttatttcattgatgccgctacagtggacgactccggcgagtatcggtgtcagaccaatctgtctacactgtctgaccccgtgcagcttgaggtccacattggatggttgctcttgcaagccccacgctgggttttcaaagaggaagatccaatccatctgcggtgccacagctggaaaaacaccgctctccacaaagtcacatacctgcaaaatggcaaaggacgcaaatacttccatcacaattccgatttttacattccgaaggctaccctgaaagacagcggcagctatttctgccggggactcgtcggctccaagaatgtgtcctccgaaaccgtgaatatcacgattacccaaggactggctgtgcctacaatctctagcttctttccgcctggataccaagtctccttctgtcttgtgatggtcctcctgtttgctgtggacacaggactgtacttttccgtg

SEQ ID NO: 1580 - DNA, 1035 bp, synthetic construct
  source 1..1035: mol_type = other DNA
atggccttaccagtgaccgccttgctcctgccgctggccttgctgctccacgccgccaggccggacatccagatgacacagagccctagcagcgtgtccgcctctgtgggagacagagtgaccatcacctgtcgggccagccagttcatcagcagcagctacctgagctggtatcagcagaagcctggcaaggcccctaagctgctgatctctggcagctctagcagagccacaggcgtgccaagcagattttctggcagcggctctggcaccgacttcaccctgacaatatccagcctccagcctgaggacttcgccatctactactgccagcagctgtactctagccccatgacattcggccagggcaccaaggtggaaatcaagagaacgcgtggaatgaggactgaggatcttcccaaagctgtcgtctttctcgaaccccaatggtatcgggtgctcgaaaaagactctgtgacactgaaatgccaaggggcctactctcccgaggacaactccacacagtggtttcataatgagtccctcatcagctctcaggccagctcttatttcattgatgccgctacagtggacgactccggcgagtatcggtgtcagaccaatctgtctacactgtctgaccccgtgcagcttgaggtccacattggatggttgctcttgcaagccccacgctgggttttcaaagaggaagatccaatccatctgcggtgccacagctggaaaaacaccgctctccacaaagtcacatacctgcaaaatggcaaaggacgcaaatacttccatcacaattccgatttttacattccgaaggctaccctgaaagacagcggcagctatttctgccggggactcgtcggctccaagaatgtgtcctccgaaaccgtgaatatcacgattacccaaggactggctgtgcctacaatctctagcttctttccgcctggataccaagtctccttctgtcttgtgatggtcctcctgtttgctgtggacacaggactgtacttttccgtg

SEQ ID NO: 1581 - DNA, 1077 bp, synthetic construct
  source 1..1077: mol_type = other DNA
atggccttaccagtgaccgccttgctcctgccgctggccttgctgctccacgccgccaggccgcaggtccagctcgtcgagtccggcggcggcctcgtccaggccggcgactccgtcaccctctcctgcaccgcctccggccgcaccttctcctcctacgccctcgcctggttccgccagcgccccggcaaggagcgcgagttcgtcgccggcctccgctggggcggccccaccaactacgccgactccgtcaaggaccgcttcaccatctccggcgactccgccaagcacaccatgtacctccagatgaactccctcaagcccgaggacaccgccgtctactactgcggctacaaccccggcggctgggccgtcccctcccagtacgagtacgactcctggggccagggcacccaggtcaccgtctcctccacgcgtggaatgaggactgaggatcttcccaaagctgtcgtctttctcgaaccccaatggtatcgggtgctcgaaaaagactctgtgacactgaaatgccaaggggcctactctcccgaggacaactccacacagtggtttcataatgagtccctcatcagctctcaggccagctcttatttcattgatgccgctacagtggacgactccggcgagtatcggtgtcagaccaatctgtctacactgtctgaccccgtgcagcttgaggtccacattggatggttgctcttgcaagccccacgctgggttttcaaagaggaagatccaatccatctgcggtgccacagctggaaaaacaccgctctccacaaagtcacatacctgcaaaatggcaaaggacgcaaatacttccatcacaattccgatttttacattccgaaggctaccctgaaagacagcggcagctatttctgccggggactcgtcggctccaagaatgtgtcctccgaaaccgtgaatatcacgattacccaaggactggctgtgcctacaatctctagcttctttccgcctggataccaagtctccttctgtcttgtgatggtcctcctgtttgctgtggacacaggactgtacttttccgtg

SEQ ID NO: 1582 - DNA, 1062 bp, synthetic construct
  source 1..1062: mol_type = other DNA
atggccttaccagtgaccgccttgctcctgccgctggccttgctgctccacgccgccaggccgcaggttcagctgcaagagtctggcggaggacttgctcaagctggcggaagcctgagactgtcttgtgccgcctctggcagaaccttcagcatgggctggtttagacaggcccctggcaaagagagagagttcgtcgccgccatcacatacagcggcggcagcccttactacgcctcttctgtcagaggccggttcaccatcagccgggacaacgccaagaacaccgtgtacctccagatgaacagcctgaagccagaggacaccgccgtgtactactgtgccgccaatccaacctacggcagcgactggaatgccgagaattggggccagggcacccaagtgacagtgtctagtacgcgtggaatgaggactgaggatcttcccaaagctgtcgtctttctcgaaccccaatggtatcgggtgctcgaaaaagactctgtgacactgaaatgccaaggggcctactctcccgaggacaactccacacagtggtttcataatgagtccctcatcagctctcaggccagctcttatttcattgatgccgctacagtggacgactccggcgagtatcggtgtcagaccaatctgtctacactgtctgaccccgtgcagcttgaggtccacattggatggttgctcttgcaagccccacgctgggttttcaaagaggaagatccaatccatctgcggtgccacagctggaaaaacaccgctctccacaaagtcacatacctgcaaaatggcaaaggacgcaaatacttccatcacaattccgatttttacattccgaaggctaccctgaaagacagcggcagctatttctgccggggactcgtcggctccaagaatgtgtcctccgaaaccgtgaatatcacgattacccaaggactggctgtgcctacaatctctagcttctttccgcctggataccaagtctccttctgtcttgtgatggtcctcctgtttgctgtggacacaggactgtacttttccgtg

SEQ ID NO: 1583 - DNA, 1056 bp, synthetic construct
  source 1..1056: mol_type = other DNA
atggccttaccagtgaccgccttgctcctgccgctggccttgctgctccacgccgccaggccggaagtgcagctggttgaatctggcggaggactggttcagcctggcggatctctgagactgtcttgtgccgccagcggcttcagcttcagcgacttttggatgagctgggtccgacaggcccctggcaaaggacttgaatgggtcgccacaatcagccaggccggcagcgagaaggactacgtggactctgtgaagggcagattcaccatcagccgggacaacgccaagaagtccctgtacctccagatgaacagcctgagagccgaggacaccgccgtgtactattgtgcctctggcgtgtacagcttcgactacagaggccagggcaccctggtcacagtctcttctacgcgtggaatgaggactgaggatcttcccaaagctgtcgtctttctcgaaccccaatggtatcgggtgctcgaaaaagactctgtgacactgaaatgccaaggggcctactctcccgaggacaactccacacagtggtttcataatgagtccctcatcagctctcaggccagctcttatttcattgatgccgctacagtggacgactccggcgagtatcggtgtcagaccaatctgtctacactgtctgaccccgtgcagcttgaggtccacattggatggttgctcttgcaagccccacgctgggttttcaaagaggaagatccaatccatctgcggtgccacagctggaaaaacaccgctctccacaaagtcacatacctgcaaaatggcaaaggacgcaaatacttccatcacaattccgatttttacattccgaaggctaccctgaaagacagcggcagctatttctgccggggactcgtcggctccaagaatgtgtcctccgaaaccgtgaatatcacgattacccaaggactggctgtgcctacaatctctagcttctttccgcctggataccaagtctccttctgtcttgtgatggtcctcctgtttgctgtggacacaggactgtacttttccgtg

SEQ ID NO: 1584 - DNA, 1056 bp, synthetic construct
  source 1..1056: mol_type = other DNA
atggccttaccagtgaccgccttgctcctgccgctggccttgctgctccacgccgccaggccggaagtgcagctggttgaatctggcggaggactggttcagcctggcggatctctgagactgtcttgtgccgccagcggcttcaccttcagcaactactggatgagctgggtccgacaggcccctggaaagggacaagaatgggtcgccaccatcaaccaggacggcagcgacaaggattacgtggacagcgtgaagggcagattcaccatcagccgggacaacgccaagaagtccctgtacctccagatgaacagcctgagagccgaggacaccgccgtgtactattgtgcctctggcgtgtacagcttcgactacagaggccagggcaccctggtcacagtctcttctacgcgtggaatgaggactgaggatcttcccaaagctgtcgtctttctcgaaccccaatggtatcgggtgctcgaaaaagactctgtgacactgaaatgccaaggggcctactctcccgaggacaactccacacagtggtttcataatgagtccctcatcagctctcaggccagctcttatttcattgatgccgctacagtggacgactccggcgagtatcggtgtcagaccaatctgtctacactgtctgaccccgtgcagcttgaggtccacattggatggttgctcttgcaagccccacgctgggttttcaaagaggaagatccaatccatctgcggtgccacagctggaaaaacaccgctctccacaaagtcacatacctgcaaaatggcaaaggacgcaaatacttccatcacaattccgatttttacattccgaaggctaccctgaaagacagcggcagctatttctgccggggactcgtcggctccaagaatgtgtcctccgaaaccgtgaatatcacgattacccaaggactggctgtgcctacaatctctagcttctttccgcctggataccaagtctccttctgtcttgtgatggtcctcctgtttgctgtggacacaggactgtacttttccgtg

SEQ ID NO: 1585 - DNA, 1056 bp, synthetic construct
  source 1..1056: mol_type = other DNA
atggccttaccagtgaccgccttgctcctgccgctggccttgctgctccacgccgccaggccggaagtgcagctggttgaatctggcggaggactggttcagcctggcggatctctgagactgtcttgtgccgccagcggcatcgacttcagcagatactggatgagctgggtccgacaggcccctggcaaaggacttgaatgggtcgccacaatcagccaggccggcagcgagaaggactacgtggactctgtgaagggcagattcaccatcagccgggacaacgccaagaagtccctgtacctccagatgaacagcctgagagccgaggacaccgccgtgtactattgtgcctctggcgtgtacagcttcgactacagaggccagggcaccctggtcacagtctcttctacgcgtggaatgaggactgaggatcttcccaaagctgtcgtctttctcgaaccccaatggtatcgggtgctcgaaaaagactctgtgacactgaaatgccaaggggcctactctcccgaggacaactccacacagtggtttcataatgagtccctcatcagctctcaggccagctcttatttcattgatgccgctacagtggacgactccggcgagtatcggtgtcagaccaatctgtctacactgtctgaccccgtgcagcttgaggtccacattggatggttgctcttgcaagccccacgctgggttttcaaagaggaagatccaatccatctgcggtgccacagctggaaaaacaccgctctccacaaagtcacatacctgcaaaatggcaaaggacgcaaatacttccatcacaattccgatttttacattccgaaggctaccctgaaagacagcggcagctatttctgccggggactcgtcggctccaagaatgtgtcctccgaaaccgtgaatatcacgattacccaaggactggctgtgcctacaatctctagcttctttccgcctggataccaagtctccttctgtcttgtgatggtcctcctgtttgctgtggacacaggactgtacttttccgtg

SEQ ID NO: 1586 - DNA, 1056 bp, synthetic construct
  source 1..1056: mol_type = other DNA
atggccttaccagtgaccgccttgctcctgccgctggccttgctgctccacgccgccaggccggaagtgcagctggttgaatctggcggaggactggttcagcctggcggatctctgagactgtcttgtgccgccagcggcatcgacttcagcagatactggatgagctgggtccgacaggcccctggaaagggacaagaatgggtcgccaccatcaaccaggacggcagcgacaaggattacgtggacagcgtgaagggcagattcaccatcagccgggacaacgccaagaagtccctgtacctccagatgaacagcctgagagccgaggacaccgccgtgtactattgtgcctctggcgtgtacagcttcgactacagaggccagggcaccctggtcacagtctcttctacgcgtggaatgaggactgaggatcttcccaaagctgtcgtctttctcgaaccccaatggtatcgggtgctcgaaaaagactctgtgacactgaaatgccaaggggcctactctcccgaggacaactccacacagtggtttcataatgagtccctcatcagctctcaggccagctcttatttcattgatgccgctacagtggacgactccggcgagtatcggtgtcagaccaatctgtctacactgtctgaccccgtgcagcttgaggtccacattggatggttgctcttgcaagccccacgctgggttttcaaagaggaagatccaatccatctgcggtgccacagctggaaaaacaccgctctccacaaagtcacatacctgcaaaatggcaaaggacgcaaatacttccatcacaattccgatttttacattccgaaggctaccctgaaagacagcggcagctatttctgccggggactcgtcggctccaagaatgtgtcctccgaaaccgtgaatatcacgattacccaaggactggctgtgcctacaatctctagcttctttccgcctggataccaagtctccttctgtcttgtgatggtcctcctgtttgctgtggacacaggactgtacttttccgtg

SEQ ID NO: 1587 - DNA, 1068 bp, synthetic construct
  source 1..1068: mol_type = other DNA
atggccttaccagtgaccgccttgctcctgccgctggccttgctgctccacgccgccaggccggaggtgcagctggttgaatctggcggaggactggttcagcctggcggatctctgagactgtcctgcacattttccggcggcaccttcagcagctacacaatgggctggttcagacaggcccctggcaaagaacgggaatttgtggccgaagtccgatggggcggagtgaccacatacagcaacagcctgaaggacagattcagcatcagcgaggacagcgtgaagaacgccgtgtacctccagatgaactccctgaagcctgaggacacagccgtgtactattgtgccgctgtgcggcagatgtacatgaccgtggtgcctgattattggggccagggcacactggtcacagtgtctagcacgcgtggaatgaggactgaggatcttcccaaagctgtcgtctttctcgaaccccaatggtatcgggtgctcgaaaaagactctgtgacactgaaatgccaaggggcctactctcccgaggacaactccacacagtggtttcataatgagtccctcatcagctctcaggccagctcttatttcattgatgccgctacagtggacgactccggcgagtatcggtgtcagaccaatctgtctacactgtctgaccccgtgcagcttgaggtccacattggatggttgctcttgcaagccccacgctgggttttcaaagaggaagatccaatccatctgcggtgccacagctggaaaaacaccgctctccacaaagtcacatacctgcaaaatggcaaaggacgcaaatacttccatcacaattccgatttttacattccgaaggctaccctgaaagacagcggcagctatttctgccggggactcgtcggctccaagaatgtgtcctccgaaaccgtgaatatcacgattacccaaggactggctgtgcctacaatctctagcttctttccgcctggataccaagtctccttctgtcttgtgatggtcctcctgtttgctgtggacacaggactgtacttttccgtg

SEQ ID NO: 1588 - DNA, 1062 bp, synthetic construct
  source 1..1062: mol_type = other DNA
atggccttaccagtgaccgccttgctcctgccgctggccttgctgctccacgccgccaggccggaagtgcagctggttgaatctggcggaggactggttcaggctggcggatctctgagactgtcttgtgccgccagcggcagaacctttagcatgggctggtttagacaggcccctggcaaagagagagagttcgtcgccgccatcacatactctggcggcagcccttactacgccgactctgtgaagggcagattcaccatcagccgggacaacgccaagaacaccgtgtacctccagatgaacagcctgaagcctgaggacaccgccgtgtactactgcgccgccaatccaacatacggcagcgactggaacgccgagaattggggccagggaacccaagtgacagtgtctagcacgcgtggaatgaggactgaggatcttcccaaagctgtcgtctttctcgaaccccaatggtatcgggtgctcgaaaaagactctgtgacactgaaatgccaaggggcctactctcccgaggacaactccacacagtggtttcataatgagtccctcatcagctctcaggccagctcttatttcattgatgccgctacagtggacgactccggcgagtatcggtgtcagaccaatctgtctacactgtctgaccccgtgcagcttgaggtccacattggatggttgctcttgcaagccccacgctgggttttcaaagaggaagatccaatccatctgcggtgccacagctggaaaaacaccgctctccacaaagtcacatacctgcaaaatggcaaaggacgcaaatacttccatcacaattccgatttttacattccgaaggctaccctgaaagacagcggcagctatttctgccggggactcgtcggctccaagaatgtgtcctccgaaaccgtgaatatcacgattacccaaggactggctgtgcctacaatctctagcttctttccgcctggataccaagtctccttctgtcttgtgatggtcctcctgtttgctgtggacacaggactgtacttttccgtg

SEQ ID NO: 1589 - DNA, 1062 bp, synthetic construct
  source 1..1062: mol_type = other DNA
atggccttaccagtgaccgccttgctcctgccgctggccttgctgctccacgccgccaggccgcagctccagttgcaagagagcggccctggcttggtaaaaccttccgagacccttagcctcacatgcacggttagtgggggcagcatttcctcaggtgattactattggggatggattcggcaacccccgggtaaaggattggagtggattggtcatatttattatagtggagcgacgtactacaacccaagtctcaaatccagggttacaatatccgtcgatacgagcaggaaccaattcagcttgaaactttctagtgtcaccgcagcagacacagccgtctattactgtacgcgggatgactccagtaattggcggtcccgagggcaagggacactggtcacggtctcctcaacgcgtggaatgaggactgaggatcttcccaaagctgtcgtctttctcgaaccccaatggtatcgggtgctcgaaaaagactctgtgacactgaaatgccaaggggcctactctcccgaggacaactccacacagtggtttcataatgagtccctcatcagctctcaggccagctcttatttcattgatgccgctacagtggacgactccggcgagtatcggtgtcagaccaatctgtctacactgtctgaccccgtgcagcttgaggtccacattggatggttgctcttgcaagccccacgctgggttttcaaagaggaagatccaatccatctgcggtgccacagctggaaaaacaccgctctccacaaagtcacatacctgcaaaatggcaaaggacgcaaatacttccatcacaattccgatttttacattccgaaggctaccctgaaagacagcggcagctatttctgccggggactcgtcggctccaagaatgtgtcctccgaaaccgtgaatatcacgattacccaaggactggctgtgcctacaatctctagcttctttccgcctggataccaagtctccttctgtcttgtgatggtcctcctgtttgctgtggacacaggactgtacttttccgtg

SEQ ID NO: 1590 - DNA, 1062 bp, synthetic construct
  source 1..1062: mol_type = other DNA
atggccttaccagtgaccgccttgctcctgccgctggccttgctgctccacgccgccaggccgcagctccagctgcaagagtctggacctggcctggtcaagcctagcgagacactgagcctgacctgtaccgtgtccggcgatagcatcagcagcggcgattactactggggctggatcagacagcctcctggcaaaggactggaatggatcggccacatctactacagcggcgtgacctactacaaccccagcctgaagtccagagtgaccatcagcgtggacaccagccggaaccagttctccctgaagctgtctagcgtgacagccgccgataccgccgtgtactactgcaccagagaggacagcagcaactggcggagtagaggccagggaacactggtcacagttagctctacgcgtggaatgaggactgaggatcttcccaaagctgtcgtctttctcgaaccccaatggtatcgggtgctcgaaaaagactctgtgacactgaaatgccaaggggcctactctcccgaggacaactccacacagtggtttcataatgagtccctcatcagctctcaggccagctcttatttcattgatgccgctacagtggacgactccggcgagtatcggtgtcagaccaatctgtctacactgtctgaccccgtgcagcttgaggtccacattggatggttgctcttgcaagccccacgctgggttttcaaagaggaagatccaatccatctgcggtgccacagctggaaaaacaccgctctccacaaagtcacatacctgcaaaatggcaaaggacgcaaatacttccatcacaattccgatttttacattccgaaggctaccctgaaagacagcggcagctatttctgccggggactcgtcggctccaagaatgtgtcctccgaaaccgtgaatatcacgattacccaaggactggctgtgcctacaatctctagcttctttccgcctggataccaagtctccttctgtcttgtgatggtcctcctgtttgctgtggacacaggactgtacttttccgtg

SEQ ID NO: 1591 - DNA, 1062 bp, synthetic construct
  source 1..1062: mol_type = other DNA
atggccttaccagtgaccgccttgctcctgccgctggccttgctgctccacgccgccaggccgcaactgcaactgcaagagtctggccctggcctggtcaagccttctgaaaccctgagcctgacctgtaccgtgtccggcggctctatcagcagcggcgattactactggggctggatcagacagcctccaggcaagggactcgaatggatcggcagcatcagctacagcggctccacctactacaacccaagcctgaagtccagagtgaccatcagcgtggacaccagcagaaaccagttctccctgaagctgagcagcgtgacagccgccgatacagccgtgtattattgcaccagagaggacagcagcaactggcggagtagaggacagggcacactggtcacagtgtcctctacgcgtggaatgaggactgaggatcttcccaaagctgtcgtctttctcgaaccccaatggtatcgggtgctcgaaaaagactctgtgacactgaaatgccaaggggcctactctcccgaggacaactccacacagtggtttcataatgagtccctcatcagctctcaggccagctcttatttcattgatgccgctacagtggacgactccggcgagtatcggtgtcagaccaatctgtctacactgtctgaccccgtgcagcttgaggtccacattggatggttgctcttgcaagccccacgctgggttttcaaagaggaagatccaatccatctgcggtgccacagctggaaaaacaccgctctccacaaagtcacatacctgcaaaatggcaaaggacgcaaatacttccatcacaattccgatttttacattccgaaggctaccctgaaagacagcggcagctatttctgccggggactcgtcggctccaagaatgtgtcctccgaaaccgtgaatatcacgattacccaaggactggctgtgcctacaatctctagcttctttccgcctggataccaagtctccttctgtcttgtgatggtcctcctgtttgctgtggacacaggactgtacttttccgtg

SEQ ID NO: 1592 - DNA, 1080 bp, synthetic construct
  source 1..1080: mol_type = other DNA
atggccttaccagtgaccgccttgctcctgccgctggccttgctgctccacgccgccaggccgcagctgcaactgcaagagtctggccccggactggtcaagccttctgaaacactggccctgacctgcaatgtgtccggcggctctatcagcagcagctcctattactggggctggatcagacagcctccaggcaagagactggaatggatcggcagcatctactacagcggcagcacatacttcaaccccagcctgaagtccagagtgaccatcagcgtggacacctccaagaaccagttctccctgaagctgagcagcgtgacagccgccgatacagccgtgtattactgtgctggcggcgactactatggccccgttggacaatggcccagcgattacagaggacagggaacccttgtgaccgtgtcctctacgcgtggaatgaggactgaggatcttcccaaagctgtcgtctttctcgaaccccaatggtatcgggtgctcgaaaaagactctgtgacactgaaatgccaaggggcctactctcccgaggacaactccacacagtggtttcataatgagtccctcatcagctctcaggccagctcttatttcattgatgccgctacagtggacgactccggcgagtatcggtgtcagaccaatctgtctacactgtctgaccccgtgcagcttgaggtccacattggatggttgctcttgcaagccccacgctgggttttcaaagaggaagatccaatccatctgcggtgccacagctggaaaaacaccgctctccacaaagtcacatacctgcaaaatggcaaaggacgcaaatacttccatcacaattccgatttttacattccgaaggctaccctgaaagacagcggcagctatttctgccggggactcgtcggctccaagaatgtgtcctccgaaaccgtgaatatcacgattacccaaggactggctgtgcctacaatctctagcttctttccgcctggataccaagtctccttctgtcttgtgatggtcctcctgtttgctgtggacacaggactgtacttttccgtg

SEQ ID NO: 1593 - DNA, 1098 bp, synthetic construct
  source 1..1098: mol_type = other DNA
atggccttaccagtgaccgccttgctcctgccgctggccttgctgctccacgccgccaggccggaagttcagctgcttgagtctggcggaggactggttcaacctggcggaagcctgagactgtcttgtgccgccagcggcttcatcttcagcagctacgccatgagctgggtccgacaggctcctggaaagggccaagaatgggtttccggcgttagcggcacaggcgtgaacacctactacgccgatagcgtgaagggcagattcaccatcagccgggacaacagcaagaacaccctgtacctccagatgaacagcctgagagccgaggacaccgccgtgtactattgtgcctctggcaaaggctgggacagcggctcttggtacgaggactatagaggccagggcaccctggtcacagtttcttcaacgcgtcctcgactgtgccttctaacgcgtggaatgaggactgaggatcttcccaaagctgtcgtctttctcgaaccccaatggtatcgggtgctcgaaaaagactctgtgacactgaaatgccaaggggcctactctcccgaggacaactccacacagtggtttcataatgagtccctcatcagctctcaggccagctcttatttcattgatgccgctacagtggacgactccggcgagtatcggtgtcagaccaatctgtctacactgtctgaccccgtgcagcttgaggtccacattggatggttgctcttgcaagccccacgctgggttttcaaagaggaagatccaatccatctgcggtgccacagctggaaaaacaccgctctccacaaagtcacatacctgcaaaatggcaaaggacgcaaatacttccatcacaattccgatttttacattccgaaggctaccctgaaagacagcggcagctatttctgccggggactcgtcggctccaagaatgtgtcctccgaaaccgtgaatatcacgattacccaaggactggctgtgcctacaatctctagcttctttccgcctggataccaagtctccttctgtcttgtgatggtcctcctgtttgctgtggacacaggactgtacttttccgtg

SEQ ID NO: 1594 - DNA, 1080 bp, synthetic construct
  source 1..1080: mol_type = other DNA
atggccttaccagtgaccgccttgctcctgccgctggccttgctgctccacgccgccaggccgcagctccagctgcaagagtctggacctggcctggtcaagcctagcgagacactgagcctgacctgtacagttagcggcggctctgtgtccagcagcagctattactggggctggatcagacagcctcctggcaagagactggaactgatcggcagcatctactacggcggctccacctacttcaaccccagcctgaaaagcagagtgaccatcagcgtggacaccagcaagaaccagttcagcctgaagctgagcagcgtgacagccgccgatacagccgtgtactattgtgccggcggagacacatacggccctgttggacaatggcccagcgactatagaggccagggcacactggtcacagtgtctagcacgcgtggaatgaggactgaggatcttcccaaagctgtcgtctttctcgaaccccaatggtatcgggtgctcgaaaaagactctgtgacactgaaatgccaaggggcctactctcccgaggacaactccacacagtggtttcataatgagtccctcatcagctctcaggccagctcttatttcattgatgccgctacagtggacgactccggcgagtatcggtgtcagaccaatctgtctacactgtctgaccccgtgcagcttgaggtccacattggatggttgctcttgcaagccccacgctgggttttcaaagaggaagatccaatccatctgcggtgccacagctggaaaaacaccgctctccacaaagtcacatacctgcaaaatggcaaaggacgcaaatacttccatcacaattccgatttttacattccgaaggctaccctgaaagacagcggcagctatttctgccggggactcgtcggctccaagaatgtgtcctccgaaaccgtgaatatcacgattacccaaggactggctgtgcctacaatctctagcttctttccgcctggataccaagtctccttctgtcttgtgatggtcctcctgtttgctgtggacacaggactgtacttttccgtg

SEQ ID NO: 1595 - DNA, 1074 bp, synthetic construct
  source 1..1074: mol_type = other DNA
atggccttaccagtgaccgccttgctcctgccgctggccttgctgctccacgccgccaggccggaagttcagctgcttgaaagcggtggcggcctggttcaacctggcggatctctgagactgagctgtgccgccagcggcttcatcttctccatctacgccatgtcctgggtccgacaggcccctggaaaaggactggaatgggtgtccggcatctctggcagcggcgtgaacacctactacgccgattctgtgaagggccgcttcatcatcagccgggacaacagcagaaacaccgtgtacctccagatgaacagcctgagagccgatgacaccgccgtgtaccactgcgccaatggcaaaggctgggacggcaacacttggtacgaggattacagaggacagggaaccctcgtgaccgtgtctagtacgcgtggaatgaggactgaggatcttcccaaagctgtcgtctttctcgaaccccaatggtatcgggtgctcgaaaaagactctgtgacactgaaatgccaaggggcctactctcccgaggacaactccacacagtggtttcataatgagtccctcatcagctctcaggccagctcttatttcattgatgccgctacagtggacgactccggcgagtatcggtgtcagaccaatctgtctacactgtctgaccccgtgcagcttgaggtccacattggatggttgctcttgcaagccccacgctgggttttcaaagaggaagatccaatccatctgcggtgccacagctggaaaaacaccgctctccacaaagtcacatacctgcaaaatggcaaaggacgcaaatacttccatcacaattccgatttttacattccgaaggctaccctgaaagacagcggcagctatttctgccggggactcgtcggctccaagaatgtgtcctccgaaaccgtgaatatcacgattacccaaggactggctgtgcctacaatctctagcttctttccgcctggataccaagtctccttctgtcttgtgatggtcctcctgtttgctgtggacacaggactgtacttttccgtg

SEQ ID NO: 1596 - DNA, 1059 bp, synthetic construct
  source 1..1059: mol_type = other DNA
atggccttaccagtgaccgccttgctcctgccgctggccttgctgctccacgccgccaggccggaagtgcaggttttggagtctggcggaggactggttcagcctggcggatctctgagactgtcttgtgccgccagcggcttcaccttcagcaactttgccatgagctgggtccgacaggcccctggcaaaggacttgaatgggtgtccacaatcagcggcagcgccggcacaacagattacgccgattctgtgaagggcagattcaccatcagccgggacaacagcaagaaaaccctgtacctccagatgaacagcctgcgcgtggaagataccgccgtgtactactgtgccgatggcagaggccccttcttcgattatcgcggccagggcacactggtcaccgtttcttctacgcgtggaatgaggactgaggatcttcccaaagctgtcgtctttctcgaaccccaatggtatcgggtgctcgaaaaagactctgtgacactgaaatgccaaggggcctactctcccgaggacaactccacacagtggtttcataatgagtccctcatcagctctcaggccagctcttatttcattgatgccgctacagtggacgactccggcgagtatcggtgtcagaccaatctgtctacactgtctgaccccgtgcagcttgaggtccacattggatggttgctcttgcaagccccacgctgggttttcaaagaggaagatccaatccatctgcggtgccacagctggaaaaacaccgctctccacaaagtcacatacctgcaaaatggcaaaggacgcaaatacttccatcacaattccgatttttacattccgaaggctaccctgaaagacagcggcagctatttctgccggggactcgtcggctccaagaatgtgtcctccgaaaccgtgaatatcacgattacccaaggactggctgtgcctacaatctctagcttctttccgcctggataccaagtctccttctgtcttgtgatggtcctcctgtttgctgtggacacaggactgtacttttccgtg

SEQ ID NO: 1597 - DNA, 1065 bp, synthetic construct
  source 1..1065: mol_type = other DNA
atggccttaccagtgaccgccttgctcctgccgctggccttgctgctccacgccgccaggccggaggtgcagctggttgaatctggcggaggactggttcagcctggcggatctctgagactgtcttgtgccgccagcggcttcaacatcaaggatacctgtatcggctgggttcgcagagcccctggcaaagaggaagaactggtcgccaaaatctgcaagtacagcggccacaccagatacgccgacagcgtgaagggcagattcaccatcagcgccgacaccagcaagaacaccgcctacctccagatgaacagcctgagagccgaggacaccgccgtgtactattgtgccgctgtgtccgtcagagatgggcactacaattactggggccagggcaccaccgtgaccgtttcttcaacgcgtggaatgaggactgaggatcttcccaaagctgtcgtctttctcgaaccccaatggtatcgggtgctcgaaaaagactctgtgacactgaaatgccaaggggcctactctcccgaggacaactccacacagtggtttcataatgagtccctcatcagctctcaggccagctcttatttcattgatgccgctacagtggacgactccggcgagtatcggtgtcagaccaatctgtctacactgtctgaccccgtgcagcttgaggtccacattggatggttgctcttgcaagccccacgctgggttttcaaagaggaagatccaatccatctgcggtgccacagctggaaaaacaccgctctccacaaagtcacatacctgcaaaatggcaaaggacgcaaatacttccatcacaattccgatttttacattccgaaggctaccctgaaagacagcggcagctatttctgccggggactcgtcggctccaagaatgtgtcctccgaaaccgtgaatatcacgattacccaaggactggctgtgcctacaatctctagcttctttccgcctggataccaagtctccttctgtcttgtgatggtcctcctgtttgctgtggacacaggactgtacttttccgtg

SEQ ID NO: 1598 - DNA, 1065 bp, synthetic construct
  source 1..1065: mol_type = other DNA
atggccttaccagtgaccgccttgctcctgccgctggccttgctgctccacgccgccaggccggaagtgcaactggtggaaagcggaggcggacttgttcaaccaggcggaagcctgagactgagctgtgccgcttccggctttaatatcaaagacacatgcatcggatgggttcgccgcgctccagggaaagaagaggaactggttgccgacatctgtccctacaagggcagcacaagatatgccgactccgtgaaaggccggtttaccatctctgccgacacctctaagaatacggcctatctgcaaatgaactctctgcgggccgaagatacagccgtgtattactgcgccatcgtgtctgccagagatggctactataactattggggacagggaaccacagtcacagtgtcctctacgcgtggaatgaggactgaggatcttcccaaagctgtcgtctttctcgaaccccaatggtatcgggtgctcgaaaaagactctgtgacactgaaatgccaaggggcctactctcccgaggacaactccacacagtggtttcataatgagtccctcatcagctctcaggccagctcttatttcattgatgccgctacagtggacgactccggcgagtatcggtgtcagaccaatctgtctacactgtctgaccccgtgcagcttgaggtccacattggatggttgctcttgcaagccccacgctgggttttcaaagaggaagatccaatccatctgcggtgccacagctggaaaaacaccgctctccacaaagtcacatacctgcaaaatggcaaaggacgcaaatacttccatcacaattccgatttttacattccgaaggctaccctgaaagacagcggcagctatttctgccggggactcgtcggctccaagaatgtgtcctccgaaaccgtgaatatcacgattacccaaggactggctgtgcctacaatctctagcttctttccgcctggataccaagtctccttctgtcttgtgatggtcctcctgtttgctgtggacacaggactgtacttttccgtg

SEQ ID NO: 1599 - DNA, 1065 bp, synthetic construct
  source 1..1065: mol_type = other DNA
atggccttaccagtgaccgccttgctcctgccgctggccttgctgctccacgccgccaggccggaagtgcagctgcttgagtctggcggaggactggttcaacctggcggaagcctgagactgtcttgtgccgccagcggcttcacctttagcagctacgccatgagctgggtccgacaggctcctggcaaaggactggaatgggtgtccgccatcacaggctctggcggcagcacatattacgccgactctgtgaagggcagattcaccatcagccgggacaacagcaagaacaccctgtacctccagatgaacagcctgagagccgaggacaccgccgtgtactactgtgccaaggatgaggatggcggctctctgctgggacacagaggacagggaacactggtcaccgtgtctagcacgcgtggaatgaggactgaggatcttcccaaagctgtcgtctttctcgaaccccaatggtatcgggtgctcgaaaaagactctgtgacactgaaatgccaaggggcctactctcccgaggacaactccacacagtggtttcataatgagtccctcatcagctctcaggccagctcttatttcattgatgccgctacagtggacgactccggcgagtatcggtgtcagaccaatctgtctacactgtctgaccccgtgcagcttgaggtccacattggatggttgctcttgcaagccccacgctgggttttcaaagaggaagatccaatccatctgcggtgccacagctggaaaaacaccgctctccacaaagtcacatacctgcaaaatggcaaaggacgcaaatacttccatcacaattccgatttttacattccgaaggctaccctgaaagacagcggcagctatttctgccggggactcgtcggctccaagaatgtgtcctccgaaaccgtgaatatcacgattacccaaggactggctgtgcctacaatctctagcttctttccgcctggataccaagtctccttctgtcttgtgatggtcctcctgtttgctgtggacacaggactgtacttttccgtg

SEQ ID NO: 1600 - DNA, 1065 bp, synthetic construct
  source 1..1065: mol_type = other DNA
atggccttaccagtgaccgccttgctcctgccgctggccttgctgctccacgccgccaggccggaagtgcagctgcttgagtctggcggcggactgattcaacctggcggaagcctgagactgagctgtgccgcttccggcttcacctttagcagccacgccatgacctgggtccgacaggctcctggaaaaggactggaatgggtgtccgccatcagcagcggcggcagctacacatattacgccgacagcgtgaagggcagattcaccatctccagagacaacagcaagaacaccctgtacctccagatgaacagcctgagagccgaggacaccgccgtgtactactgtgccaaggatgaggatggcggctctctgctgggacacagaggacagggaacactggtcaccgtgtctagcacgcgtggaatgaggactgaggatcttcccaaagctgtcgtctttctcgaaccccaatggtatcgggtgctcgaaaaagactctgtgacactgaaatgccaaggggcctactctcccgaggacaactccacacagtggtttcataatgagtccctcatcagctctcaggccagctcttatttcattgatgccgctacagtggacgactccggcgagtatcggtgtcagaccaatctgtctacactgtctgaccccgtgcagcttgaggtccacattggatggttgctcttgcaagccccacgctgggttttcaaagaggaagatccaatccatctgcggtgccacagctggaaaaacaccgctctccacaaagtcacatacctgcaaaatggcaaaggacgcaaatacttccatcacaattccgatttttacattccgaaggctaccctgaaagacagcggcagctatttctgccggggactcgtcggctccaagaatgtgtcctccgaaaccgtgaatatcacgattacccaaggactggctgtgcctacaatctctagcttctttccgcctggataccaagtctccttctgtcttgtgatggtcctcctgtttgctgtggacacaggactgtacttttccgtg

SEQ ID NO: 1601 - DNA, 1065 bp, synthetic construct
  source 1..1065: mol_type = other DNA
atggccttaccagtgaccgccttgctcctgccgctggccttgctgctccacgccgccaggccggaagtgcagctggttgaatctggcggaggactggttcagcctggcggatctctgagactgtcttgtgccgccagcggcttcagcttcagcgacttttggatgagctgggtccgacaggcccctggcaaaggacttgaatgggtgtccgccatcagcggcagcggcgattatacacactacgccgacagcgtgaagggcagattcaccatcagccgggacaacagcaagaacaccgtgtacctccagatgaacagcctgagagccgaggacagcgccgtgtactactgtgccaaggatgaggatggcggctctctgctgggacacagaggacagggaacactggtcaccgtgtctagcacgcgtggaatgaggactgaggatcttcccaaagctgtcgtctttctcgaaccccaatggtatcgggtgctcgaaaaagactctgtgacactgaaatgccaaggggcctactctcccgaggacaactccacacagtggtttcataatgagtccctcatcagctctcaggccagctcttatttcattgatgccgctacagtggacgactccggcgagtatcggtgtcagaccaatctgtctacactgtctgaccccgtgcagcttgaggtccacattggatggttgctcttgcaagccccacgctgggttttcaaagaggaagatccaatccatctgcggtgccacagctggaaaaacaccgctctccacaaagtcacatacctgcaaaatggcaaaggacgcaaatacttccatcacaattccgatttttacattccgaaggctaccctgaaagacagcggcagctatttctgccggggactcgtcggctccaagaatgtgtcctccgaaaccgtgaatatcacgattacccaaggactggctgtgcctacaatctctagcttctttccgcctggataccaagtctccttctgtcttgtgatggtcctcctgtttgctgtggacacaggactgtacttttccgtg

SEQ ID NO: 1602 - DNA, 1071 bp, synthetic construct
  source 1..1071: mol_type = other DNA
atggccttaccagtgaccgccttgctcctgccgctggccttgctgctccacgccgccaggccggaagtgcagctgcttgagtctggcggaggactggttcaacctggcggaagcctgagactgtcttgtgccgcctctggcttcgccttcagcatctacgatatgagctgggtccgacaggcccctggcaaaggacttgaatgggtgtccagcatcagcggcagcggcgactacatctactacgccgatagcgtgaagggcagattcaccatcagccgggacatcagcaagaacaccctgtacctccagatgaacagcctgagagccgaggacaccgccgtgtactactgtgccaaagaaggcaccggcgctaacagcagcctggccgattatagaggccagggcacactggtcaccgtgtctagtacgcgtggaatgaggactgaggatcttcccaaagctgtcgtctttctcgaaccccaatggtatcgggtgctcgaaaaagactctgtgacactgaaatgccaaggggcctactctcccgaggacaactccacacagtggtttcataatgagtccctcatcagctctcaggccagctcttatttcattgatgccgctacagtggacgactccggcgagtatcggtgtcagaccaatctgtctacactgtctgaccccgtgcagcttgaggtccacattggatggttgctcttgcaagccccacgctgggttttcaaagaggaagatccaatccatctgcggtgccacagctggaaaaacaccgctctccacaaagtcacatacctgcaaaatggcaaaggacgcaaatacttccatcacaattccgatttttacattccgaaggctaccctgaaagacagcggcagctatttctgccggggactcgtcggctccaagaatgtgtcctccgaaaccgtgaatatcacgattacccaaggactggctgtgcctacaatctctagcttctttccgcctggataccaagtctccttctgtcttgtgatggtcctcctgtttgctgtggacacaggactgtacttttccgtg

SEQ ID NO: 1603 - DNA, 1071 bp, synthetic construct
  source 1..1071: mol_type = other DNA
atggccttaccagtgaccgccttgctcctgccgctggccttgctgctccacgccgccaggccggaggttcagctgcttgagtctggcggaggactggttcaacctggcggaagcctgagactgtcttgtgccgccagcggcttcacctttagcagctacgccatgagctgggtccgacaggctcctggcaaaggactggaatgggtgtccagcatcagcggcagcggcgactacatctactacgccgatagcgtgaagggcagattcaccatcagccgggacatcagcaagaacaccctgtacctccagatgaacagcctgagagccgaggacaccgccgtgtactactgtgccaaagaaggcaccggcgctaacagcagcctggccgattatagaggccagggcacactggtcaccgtgtctagtacgcgtggaatgaggactgaggatcttcccaaagctgtcgtctttctcgaaccccaatggtatcgggtgctcgaaaaagactctgtgacactgaaatgccaaggggcctactctcccgaggacaactccacacagtggtttcataatgagtccctcatcagctctcaggccagctcttatttcattgatgccgctacagtggacgactccggcgagtatcggtgtcagaccaatctgtctacactgtctgaccccgtgcagcttgaggtccacattggatggttgctcttgcaagccccacgctgggttttcaaagaggaagatccaatccatctgcggtgccacagctggaaaaacaccgctctccacaaagtcacatacctgcaaaatggcaaaggacgcaaatacttccatcacaattccgatttttacattccgaaggctaccctgaaagacagcggcagctatttctgccggggactcgtcggctccaagaatgtgtcctccgaaaccgtgaatatcacgattacccaaggactggctgtgcctacaatctctagcttctttccgcctggataccaagtctccttctgtcttgtgatggtcctcctgtttgctgtggacacaggactgtacttttccgtg

SEQ ID NO: 1604 - DNA, 1062 bp, synthetic construct
  source 1..1062: mol_type = other DNA
atggccttaccagtgaccgccttgctcctgccgctggccttgctgctccacgccgccaggccgcaggtgcagctggttgaatctggcggaggactggttcagcctggcggatctctgagactgtcttgtgccgccagcggcttcaccttcaccaatcacgccatgagctgggtccgacaggcccctggaaaaggactggaactggtgtctagcatcagcggcaacggcagaaccacctactacgccgatagcgtgaagggcagattcaccatcagccgggacatcagcaagaacaccctggacctccagatgaacagcctgagagccgaggataccgccgtgtactactgtgccaaggatggcggagagacactggtggatagcagaggccagggcacactggtcacagtgtcatctacgcgtggaatgaggactgaggatcttcccaaagctgtcgtctttctcgaaccccaatggtatcgggtgctcgaaaaagactctgtgacactgaaatgccaaggggcctactctcccgaggacaactccacacagtggtttcataatgagtccctcatcagctctcaggccagctcttatttcattgatgccgctacagtggacgactccggcgagtatcggtgtcagaccaatctgtctacactgtctgaccccgtgcagcttgaggtccacattggatggttgctcttgcaagccccacgctgggttttcaaagaggaagatccaatccatctgcggtgccacagctggaaaaacaccgctctccacaaagtcacatacctgcaaaatggcaaaggacgcaaatacttccatcacaattccgatttttacattccgaaggctaccctgaaagacagcggcagctatttctgccggggactcgtcggctccaagaatgtgtcctccgaaaccgtgaatatcacgattacccaaggactggctgtgcctacaatctctagcttctttccgcctggataccaagtctccttctgtcttgtgatggtcctcctgtttgctgtggacacaggactgtacttttccgtg

SEQ ID NO: 1605 - DNA, 1065 bp, synthetic construct
  source 1..1065: mol_type = other DNA
atggccttaccagtgaccgccttgctcctgccgctggccttgctgctccacgccgccaggccggaagtgcagctgcttgaaagtggcggcggactgattcagcctggcggatctctgagactgagctgtgccgccagcggcttcaccttttctagccacgccatgacctgggtccgacaggcacctggaaaagggcttgaatgggtgtccgccatcagcggctctggcgattacacacactacgccgacagcgtgaagggcagattcaccatcagcagagacaacagcaagaacaccgtgtacctccagatgaacagcctgagagccgaggacagcgccgtgtattattgcgccaaggatgaggatggcggcagcctgcttggacacagaggacaaggcaccctggtcaccgtttcttccacgcgtggaatgaggactgaggatcttcccaaagctgtcgtctttctcgaaccccaatggtatcgggtgctcgaaaaagactctgtgacactgaaatgccaaggggcctactctcccgaggacaactccacacagtggtttcataatgagtccctcatcagctctcaggccagctcttatttcattgatgccgctacagtggacgactccggcgagtatcggtgtcagaccaatctgtctacactgtctgaccccgtgcagcttgaggtccacattggatggttgctcttgcaagccccacgctgggttttcaaagaggaagatccaatccatctgcggtgccacagctggaaaaacaccgctctccacaaagtcacatacctgcaaaatggcaaaggacgcaaatacttccatcacaattccgatttttacattccgaaggctaccctgaaagacagcggcagctatttctgccggggactcgtcggctccaagaatgtgtcctccgaaaccgtgaatatcacgattacccaaggactggctgtgcctacaatctctagcttctttccgcctggataccaagtctccttctgtcttgtgatggtcctcctgtttgctgtggacacaggactgtacttttccgtg

SEQ ID NO: 1606 - DNA, 1068 bp, synthetic construct
  source 1..1068: mol_type = other DNA
atggccttaccagtgaccgccttgctcctgccgctggccttgctgctccacgccgccaggccgcaggttcagctgcaagagtctggcggaggactggttcaggctggcgatagcctgagactgtcttgtgccgcttctggcagagccgtgtccagcctgtttatgggctggtttcggagagcccctggcaaagagagagaactggttgccgccatcagccggtacagcctgtacacctactacgccgacagcgtgaagggcagattcaccatcagcgccgacaacgccaagaacgccgtgtacctccagatgaacagcctgaagcctgaggacacagccgtgtactactgcgccagcaaacttgagtacaccagcaacgactacgacagctggggccagggaacccaagtgacagtctcttctacgcgtggaatgaggactgaggatcttcccaaagctgtcgtctttctcgaaccccaatggtatcgggtgctcgaaaaagactctgtgacactgaaatgccaaggggcctactctcccgaggacaactccacacagtggtttcataatgagtccctcatcagctctcaggccagctcttatttcattgatgccgctacagtggacgactccggcgagtatcggtgtcagaccaatctgtctacactgtctgaccccgtgcagcttgaggtccacattggatggttgctcttgcaagccccacgctgggttttcaaagaggaagatccaatccatctgcggtgccacagctggaaaaacaccgctctccacaaagtcacatacctgcaaaatggcaaaggacgcaaatacttccatcacaattccgatttttacattccgaaggctaccctgaaagacagcggcagctatttctgccggggactcgtcggctccaagaatgtgtcctccgaaaccgtgaatatcacgattacccaaggactggctgtgcctacaatctctagcttctttccgcctggataccaagtctccttctgtcttgtgatggtcctcctgtttgctgtggacacaggactgtacttttccgtg

SEQ ID NO: 1607 - DNA, 1068 bp, synthetic construct
  source 1..1068: mol_type = other DNA
atggccttaccagtgaccgccttgctcctgccgctggccttgctgctccacgccgccaggccggaagttcagctgcaagagtctggcggaggactggttcaacctggcggaagcctgagactgtcttgtgccgcctctggcagaaccttcagcagcctgttcatgggctggttcagacaggcccctggcaaagagagagaactggtcgccgccatcagccggtacagcctgtacacctactacgccgacagcgtgaagggcagattcaccatcagcgccgacaacgccaagaacgccgtgtacctccagatgaacagcctgaagccagaggacacagccgtgtactactgcgccagcaaacttgagtacaccagcaacgactacgacagctggggccagggaacccaagtgacagtctcttctacgcgtggaatgaggactgaggatcttcccaaagctgtcgtctttctcgaaccccaatggtatcgggtgctcgaaaaagactctgtgacactgaaatgccaaggggcctactctcccgaggacaactccacacagtggtttcataatgagtccctcatcagctctcaggccagctcttatttcattgatgccgctacagtggacgactccggcgagtatcggtgtcagaccaatctgtctacactgtctgaccccgtgcagcttgaggtccacattggatggttgctcttgcaagccccacgctgggttttcaaagaggaagatccaatccatctgcggtgccacagctggaaaaacaccgctctccacaaagtcacatacctgcaaaatggcaaaggacgcaaatacttccatcacaattccgatttttacattccgaaggctaccctgaaagacagcggcagctatttctgccggggactcgtcggctccaagaatgtgtcctccgaaaccgtgaatatcacgattacccaaggactggctgtgcctacaatctctagcttctttccgcctggataccaagtctccttctgtcttgtgatggtcctcctgtttgctgtggacacaggactgtacttttccgtg

SEQ ID NO: 1608 - DNA, 1068 bp, synthetic construct
  source 1..1068: mol_type = other DNA
atggccttaccagtgaccgccttgctcctgccgctggccttgctgctccacgccgccaggccggaagttcagctgcaagagtctggcggaggactggttcaacctggcggaagcctgagactgtcttgtgccgcctctggcagaaccttcagcagcctgtttatgggctgggtccgacaggcccctggcaaaggactggaactggtgtctgccatcagccggtacagcctgtacacctactacgccgacagcgtgaagggcagattcaccatcagcagagacaacgccaagaacaccctgtacctccagatgaacagcctgcggcctgaggataccgccgtgtactactgcgccagcaaacttgagtacaccagcaacgactacgacagctggggccagggaacactggtcacagtctcttctacgcgtggaatgaggactgaggatcttcccaaagctgtcgtctttctcgaaccccaatggtatcgggtgctcgaaaaagactctgtgacactgaaatgccaaggggcctactctcccgaggacaactccacacagtggtttcataatgagtccctcatcagctctcaggccagctcttatttcattgatgccgctacagtggacgactccggcgagtatcggtgtcagaccaatctgtctacactgtctgaccccgtgcagcttgaggtccacattggatggttgctcttgcaagccccacgctgggttttcaaagaggaagatccaatccatctgcggtgccacagctggaaaaacaccgctctccacaaagtcacatacctgcaaaatggcaaaggacgcaaatacttccatcacaattccgatttttacattccgaaggctaccctgaaagacagcggcagctatttctgccggggactcgtcggctccaagaatgtgtcctccgaaaccgtgaatatcacgattacccaaggactggctgtgcctacaatctctagcttctttccgcctggataccaagtctccttctgtcttgtgatggtcctcctgtttgctgtggacacaggactgtacttttccgtg

SEQ ID NO: 1609 - DNA, 1092 bp, synthetic construct
  source 1..1092: mol_type = other DNA
atggccttaccagtgaccgccttgctcctgccgctggccttgctgctccacgccgccaggccggaagtgcagctggttgaatctggcggaggactggttcagcctggcggatctctgagactgagctgtgaagccagcggcttcgccagcgacgattacatcatcggctggttcagacaggcccctggcaaagagagagagggcgtcagctgcatcagctctaagtacgccaacaccgtgtacaccgacagcgtgaagggcagattcagactgagcagaggcaccgccaagaataccgtgtacctccagatgagcgccctgaagcctgaggataccgccgtgtactactgcgctatggacagccgcagagtgacatgccctgagatcagcaccatgcaccggaacttcgattcttggggccagggcacactggtcacagtgtcatctacgcgtggaatgaggactgaggatcttcccaaagctgtcgtctttctcgaaccccaatggtatcgggtgctcgaaaaagactctgtgacactgaaatgccaaggggcctactctcccgaggacaactccacacagtggtttcataatgagtccctcatcagctctcaggccagctcttatttcattgatgccgctacagtggacgactccggcgagtatcggtgtcagaccaatctgtctacactgtctgaccccgtgcagcttgaggtccacattggatggttgctcttgcaagccccacgctgggttttcaaagaggaagatccaatccatctgcggtgccacagctggaaaaacaccgctctccacaaagtcacatacctgcaaaatggcaaaggacgcaaatacttccatcacaattccgatttttacattccgaaggctaccctgaaagacagcggcagctatttctgccggggactcgtcggctccaagaatgtgtcctccgaaaccgtgaatatcacgattacccaaggactggctgtgcctacaatctctagcttctttccgcctggataccaagtctccttctgtcttgtgatggtcctcctgtttgctgtggacacaggactgtacttttccgtg

SEQ ID NO: 1610 - DNA, 1092 bp, synthetic construct
  source 1..1092: mol_type = other DNA
atggccttaccagtgaccgccttgctcctgccgctggccttgctgctccacgccgccaggccggaagtgcagctggttgaatctggcggaggactggttcagcctggcggatctctgagactgtcttgtgccgcctctggcttcgccagcgactactatatcatcggctggttcagacaggcccctggcaaagagagagagggcgtcagctgtatcagcagcagatacgccaacaccaactacgccgacagcgtgaagggcagattcaccatcagccgggacaacgccaagaacaccgtgtacctccagatgaacagcctgaagcctgaggacaccgccgtgtactactgtgccgccgacaccagaagatacacctgtcctgacattgccaccatgcaccggaacttcgattcttggggccagggcacactggtcaccgtttcttctacgcgtggaatgaggactgaggatcttcccaaagctgtcgtctttctcgaaccccaatggtatcgggtgctcgaaaaagactctgtgacactgaaatgccaaggggcctactctcccgaggacaactccacacagtggtttcataatgagtccctcatcagctctcaggccagctcttatttcattgatgccgctacagtggacgactccggcgagtatcggtgtcagaccaatctgtctacactgtctgaccccgtgcagcttgaggtccacattggatggttgctcttgcaagccccacgctgggttttcaaagaggaagatccaatccatctgcggtgccacagctggaaaaacaccgctctccacaaagtcacatacctgcaaaatggcaaaggacgcaaatacttccatcacaattccgatttttacattccgaaggctaccctgaaagacagcggcagctatttctgccggggactcgtcggctccaagaatgtgtcctccgaaaccgtgaatatcacgattacccaaggactggctgtgcctacaatctctagcttctttccgcctggataccaagtctccttctgtcttgtgatggtcctcctgtttgctgtggacacaggactgtacttttccgtg

SEQ ID NO: 1611 - DNA, 1080 bp, synthetic construct
  source 1..1080: mol_type = other DNA
atggccttaccagtgaccgccttgctcctgccgctggccttgctgctccacgccgccaggccggaagtgcaactggtggaatctggaggctctctggtgcagccagggggaagcctgagactgtcttgtgccgcttccggcttcaccttcgacgactacgccatgagctgggtgcgccaggtgccaggcaaaggcctggaatgggtgtccagcatcaactggagcggcacccacaccgattacgccgactccgtgaaaggcagattcacaatcagcagaaacaacgccaacaataccctgtacctgcagatgaactccctgaagtctgaggatacagcagtgtattattgcgccaagaactggcgggacgccggcaccacttggtttgagaaaagcggctctgccggacagggaacccaagtgacagtgtcctccacgcgtggaatgaggactgaggatcttcccaaagctgtcgtctttctcgaaccccaatggtatcgggtgctcgaaaaagactctgtgacactgaaatgccaaggggcctactctcccgaggacaactccacacagtggtttcataatgagtccctcatcagctctcaggccagctcttatttcattgatgccgctacagtggacgactccggcgagtatcggtgtcagaccaatctgtctacactgtctgaccccgtgcagcttgaggtccacattggatggttgctcttgcaagccccacgctgggttttcaaagaggaagatccaatccatctgcggtgccacagctggaaaaacaccgctctccacaaagtcacatacctgcaaaatggcaaaggacgcaaatacttccatcacaattccgatttttacattccgaaggctaccctgaaagacagcggcagctatttctgccggggactcgtcggctccaagaatgtgtcctccgaaaccgtgaatatcacgattacccaaggactggctgtgcctacaatctctagcttctttccgcctggataccaagtctccttctgtcttgtgatggtcctcctgtttgctgtggacacaggactgtacttttccgtg

SEQ ID NO: 1612 - DNA, 1062 bp, synthetic construct
  source 1..1062: mol_type = other DNA
atggccttaccagtgaccgccttgctcctgccgctggccttgctgctccacgccgccaggccggaggtgcaactggtggaaagcggcggaggcctggtgcaggctggcggatctctgagactgagctgtgccgccagcggcatcaccttcagcatcaacacaatgggctggtacagacaggcccctggcaagcagagggaactggtggccctgatctccagcatcggcgacacctactacgccgacagcgtgaagggccggttcaccatcagccgggacaacgccaagaacaccgtgtacctccagatgaacagcctgaagcccgaggacaccgccgtgtactactgcaagcggttcagaacagccgcccagggcaccgattattggggccagggaacacaagtgaccgtgtcctctacgcgtggaatgaggactgaggatcttcccaaagctgtcgtctttctcgaaccccaatggtatcgggtgctcgaaaaagactctgtgacactgaaatgccaaggggcctactctcccgaggacaactccacacagtggtttcataatgagtccctcatcagctctcaggccagctcttatttcattgatgccgctacagtggacgactccggcgagtatcggtgtcagaccaatctgtctacactgtctgaccccgtgcagcttgaggtccacattggatggttgctcttgcaagccccacgctgggttttcaaagaggaagatccaatccatctgcggtgccacagctggaaaaacaccgctctccacaaagtcacatacctgcaaaatggcaaaggacgcaaatacttccatcacaattccgatttttacattccgaaggctaccctgaaagacagcggcagctatttctgccggggactcgtcggctccaagaatgtgtcctccgaaaccgtgaatatcacgattacccaaggactggctgtgcctacaatctctagcttctttccgcctggataccaagtctccttctgtcttgtgatggtcctcctgtttgctgtggacacaggactgtacttttccgtg

SEQ ID NO: 1613 - DNA, 1065 bp, synthetic construct
  source 1..1065: mol_type = other DNA
atggccttaccagtgaccgccttgctcctgccgctggccttgctgctccacgccgccaggccggaagtgcaactggtggaatctgggggcggactggtgcagccaggcggaagtctgaggctgtcttgtgccgcctccggcagcatcttcggcttcaacgacatggcctggtatcggcaggctcccggaaaacagcgcgagctggtggctctgattagcagagtgggcgtgaccagcagcgccgactctgtgaagggcagattcacaatctccagagtgaacgccaaggatacagtgtacctccagatgaactctctgaaacctgaggatacagcagtgtactattgctacatggaccagcggctggacggcagcacactggcctactggggacagggaactcaagtgacagtgtctagcacgcgtggaatgaggactgaggatcttcccaaagctgtcgtctttctcgaaccccaatggtatcgggtgctcgaaaaagactctgtgacactgaaatgccaaggggcctactctcccgaggacaactccacacagtggtttcataatgagtccctcatcagctctcaggccagctcttatttcattgatgccgctacagtggacgactccggcgagtatcggtgtcagaccaatctgtctacactgtctgaccccgtgcagcttgaggtccacattggatggttgctcttgcaagccccacgctgggttttcaaagaggaagatccaatccatctgcggtgccacagctggaaaaacaccgctctccacaaagtcacatacctgcaaaatggcaaaggacgcaaatacttccatcacaattccgatttttacattccgaaggctaccctgaaagacagcggcagctatttctgccggggactcgtcggctccaagaatgtgtcctccgaaaccgtgaatatcacgattacccaaggactggctgtgcctacaatctctagcttctttccgcctggataccaagtctccttctgtcttgtgatggtcctcctgtttgctgtggacacaggactgtacttttccgtg

SEQ ID NO: 1614 - DNA, 1068 bp, synthetic construct
  source 1..1068: mol_type = other DNA
atggccttaccagtgaccgccttgctcctgccgctggccttgctgctccacgccgccaggccggacgtgcaactcgtggaatccggcggaggcctggtgcagcctggcggatctctgagactgagctgtgccgccagcggctctatcggcggactgaatgccatggcctggtacagacaggcccctggcaaagaacgggaactggtggccggcatctttggcgtgggcagcaccagatacgccgacagcgtgaagggccggttcaccatcagccgggacaacagcaagaacaccgtgtacctgcagatgaacagcctgcggcccgaggataccgccgtgtactactgcagaatgtccagcgtgaccagaggctccagcgactactggggccagggaacacttgtgaccgtgtccagtctcgagacgcgtggaatgaggactgaggatcttcccaaagctgtcgtctttctcgaaccccaatggtatcgggtgctcgaaaaagactctgtgacactgaaatgccaaggggcctactctcccgaggacaactccacacagtggtttcataatgagtccctcatcagctctcaggccagctcttatttcattgatgccgctacagtggacgactccggcgagtatcggtgtcagaccaatctgtctacactgtctgaccccgtgcagcttgaggtccacattggatggttgctcttgcaagccccacgctgggttttcaaagaggaagatccaatccatctgcggtgccacagctggaaaaacaccgctctccacaaagtcacatacctgcaaaatggcaaaggacgcaaatacttccatcacaattccgatttttacattccgaaggctaccctgaaagacagcggcagctatttctgccggggactcgtcggctccaagaatgtgtcctccgaaaccgtgaatatcacgattacccaaggactggctgtgcctacaatctctagcttctttccgcctggataccaagtctccttctgtcttgtgatggtcctcctgtttgctgtggacacaggactgtacttttccgtg

SEQ ID NO: 1615 - DNA, 1083 bp, synthetic construct
  source 1..1083: mol_type = other DNA
atggccttaccagtgaccgccttgctcctgccgctggccttgctgctccacgccgccaggccggaagtgcaactggtggagtccggcggtggactggtacagcctgggggttcactgcgcctgtcctgcgccgccagcggaagaacctattacctcaatgctatgggttggttccgccaggccccaggaaaggagcgcgagttcgtggcggctattgactggtccgaggggaacaaggactatgctgattccgtgaagggcaggtttaccatcagccgggataattcaaaaaatactgtttatttgcagatgaactctcttagaccagaagacactgctgtctattactgcgccgctgacacccctccttggggaccactgatttatatcgaaagctatgattcctgggggcagggcacactcgtcaccgtgagtagcacgcgtggaatgaggactgaggatcttcccaaagctgtcgtctttctcgaaccccaatggtatcgggtgctcgaaaaagactctgtgacactgaaatgccaaggggcctactctcccgaggacaactccacacagtggtttcataatgagtccctcatcagctctcaggccagctcttatttcattgatgccgctacagtggacgactccggcgagtatcggtgtcagaccaatctgtctacactgtctgaccccgtgcagcttgaggtccacattggatggttgctcttgcaagccccacgctgggttttcaaagaggaagatccaatccatctgcggtgccacagctggaaaaacaccgctctccacaaagtcacatacctgcaaaatggcaaaggacgcaaatacttccatcacaattccgatttttacattccgaaggctaccctgaaagacagcggcagctatttctgccggggactcgtcggctccaagaatgtgtcctccgaaaccgtgaatatcacgattacccaaggactggctgtgcctacaatctctagcttctttccgcctggataccaagtctccttctgtcttgtgatggtcctcctgtttgctgtggacacaggactgtacttttccgtg

SEQ ID NO: 1616 - DNA, 1077 bp, synthetic construct
  source 1..1077: mol_type = other DNA
atggccttaccagtgaccgccttgctcctgccgctggccttgctgctccacgccgccaggccggaggtgcaactggtggaatccgggggaggcagcgtgcaggctgggggatcactgagactgtcttgtgctgcctccggcgacacctacggcagctattggatgggatggtttcggcaggctcccggaaaagaacgggaaggcgtggccgccatcaacagaggcggcggatacaccgtgtacgccgactctgtgaagggcagattcacaatctccagagacacagccaagaatactgtgtacctgcagatgaactccctgcgccccgacgataccgccgactattattgcgccgcttccggcgtgctgggcggcctgcatgaggactggttcaattattggggacagggaacacttgtgacagtgtccagcacgcgtggaatgaggactgaggatcttcccaaagctgtcgtctttctcgaaccccaatggtatcgggtgctcgaaaaagactctgtgacactgaaatgccaaggggcctactctcccgaggacaactccacacagtggtttcataatgagtccctcatcagctctcaggccagctcttatttcattgatgccgctacagtggacgactccggcgagtatcggtgtcagaccaatctgtctacactgtctgaccccgtgcagcttgaggtccacattggatggttgctcttgcaagccccacgctgggttttcaaagaggaagatccaatccatctgcggtgccacagctggaaaaacaccgctctccacaaagtcacatacctgcaaaatggcaaaggacgcaaatacttccatcacaattccgatttttacattccgaaggctaccctgaaagacagcggcagctatttctgccggggactcgtcggctccaagaatgtgtcctccgaaaccgtgaatatcacgattacccaaggactggctgtgcctacaatctctagcttctttccgcctggataccaagtctccttctgtcttgtgatggtcctcctgtttgctgtggacacaggactgtacttttccgtg

SEQ ID NO: 1617 - DNA, 1074 bp, synthetic construct
  source 1..1074: mol_type = other DNA
atggccttaccagtgaccgccttgctcctgccgctggccttgctgctccacgccgccaggccggttcagctcgtggaaagcggtggcggaagtgtgcaggccggaggcagtttgcgcctgagctgcgctgcttccggcgatacatacgggtcttactggatgggctggtttaggcaggcacctggacaagaaagagaagctgtggccgctattaacaggggaggtggctataccgtttatgctgattccgtgaagggccgattcacaatctcccgggataacgccaaaaacactctgtacctgcagatgaactcccttaggcccgatgacacagccgattactattgtgcggcctccggcgtgctgggtggtctgcatgaggattggttcaactactgggggcaaggcaccctcgtaaccgtgagtagcacgcgtggaatgaggactgaggatcttcccaaagctgtcgtctttctcgaaccccaatggtatcgggtgctcgaaaaagactctgtgacactgaaatgccaaggggcctactctcccgaggacaactccacacagtggtttcataatgagtccctcatcagctctcaggccagctcttatttcattgatgccgctacagtggacgactccggcgagtatcggtgtcagaccaatctgtctacactgtctgaccccgtgcagcttgaggtccacattggatggttgctcttgcaagccccacgctgggttttcaaagaggaagatccaatccatctgcggtgccacagctggaaaaacaccgctctccacaaagtcacatacctgcaaaatggcaaaggacgcaaatacttccatcacaattccgatttttacattccgaaggctaccctgaaagacagcggcagctatttctgccggggactcgtcggctccaagaatgtgtcctccgaaaccgtgaatatcacgattacccaaggactggctgtgcctacaatctctagcttctttccgcctggataccaagtctccttctgtcttgtgatggtcctcctgtttgctgtggacacaggactgtacttttccgtg

SEQ ID NO: 1618 - DNA, 1080 bp, synthetic construct
  source 1..1080: mol_type = other DNA
atggccttaccagtgaccgccttgctcctgccgctggccttgctgctccacgccgccaggccggaggtgcaactggtggaaagcggcggaggctctgtgcagacaggcggctctctgagactgacctgtgccgccagcggcagaaccagcagatcctatggcatgggctggttcagacaggcccctggcaaagaacgcgagttcgtgtccggcatctcttggagaggcgacagcaccggctacgccgatagcgtgaagggccggttcaccatcagccgggacaacgccaagaacaccgtggacctgcagatgaacagcctgaagcccgaggacaccgccatctactactgtgccgctgccgccggatctgcttggtacggcacactgtacgagtacgactactggggccagggcacccttgtgaccgtgtcatctacgcgtggaatgaggactgaggatcttcccaaagctgtcgtctttctcgaaccccaatggtatcgggtgctcgaaaaagactctgtgacactgaaatgccaaggggcctactctcccgaggacaactccacacagtggtttcataatgagtccctcatcagctctcaggccagctcttatttcattgatgccgctacagtggacgactccggcgagtatcggtgtcagaccaatctgtctacactgtctgaccccgtgcagcttgaggtccacattggatggttgctcttgcaagccccacgctgggttttcaaagaggaagatccaatccatctgcggtgccacagctggaaaaacaccgctctccacaaagtcacatacctgcaaaatggcaaaggacgcaaatacttccatcacaattccgatttttacattccgaaggctaccctgaaagacagcggcagctatttctgccggggactcgtcggctccaagaatgtgtcctccgaaaccgtgaatatcacgattacccaaggactggctgtgcctacaatctctagcttctttccgcctggataccaagtctccttctgtcttgtgatggtcctcctgtttgctgtggacacaggactgtacttttccgtg

SEQ ID NO: 1619 - DNA, 1080 bp, synthetic construct
  source 1..1080: mol_type = other DNA
atggccttaccagtgaccgccttgctcctgccgctggccttgctgctccacgccgccaggccggaggtgcagctcgtagaatctggaggtggttccgtgcaagccggaggatcattgcgactgacctgcgcagcgagcggatctacttctcgctcttacggtatgggatggttcagacaggctcctgggaaagagcgcgagttcgtttcaggcatctcctggaggggggacagcaccggctacgcagatagcgtgaagggcaggttcacgatcagccgagacaacgccaaaaacaccgtcgatctgcaaatgaatagtctgaagcccgaagatactgcgatctactactgtgccgccgcagcagggtccacctggtacggcacactctacgagtacgactactgggggcagggaaccctggtaaccgtgtcctctacgcgtggaatgaggactgaggatcttcccaaagctgtcgtctttctcgaaccccaatggtatcgggtgctcgaaaaagactctgtgacactgaaatgccaaggggcctactctcccgaggacaactccacacagtggtttcataatgagtccctcatcagctctcaggccagctcttatttcattgatgccgctacagtggacgactccggcgagtatcggtgtcagaccaatctgtctacactgtctgaccccgtgcagcttgaggtccacattggatggttgctcttgcaagccccacgctgggttttcaaagaggaagatccaatccatctgcggtgccacagctggaaaaacaccgctctccacaaagtcacatacctgcaaaatggcaaaggacgcaaatacttccatcacaattccgatttttacattccgaaggctaccctgaaagacagcggcagctatttctgccggggactcgtcggctccaagaatgtgtcctccgaaaccgtgaatatcacgattacccaaggactggctgtgcctacaatctctagcttctttccgcctggataccaagtctccttctgtcttgtgatggtcctcctgtttgctgtggacacaggactgtacttttccgtg

SEQ ID NO: 1620 - DNA, 1083 bp, synthetic construct
  source 1..1083: mol_type = other DNA
atggccttaccagtgaccgccttgctcctgccgctggccttgctgctccacgccgccaggccggatgttcagttggtggagtctggtggcggtttggtgcagccaggtggctccctgcgactcagttgtgcagcctccgggttcattctggattactacgctattggttggtttcgacaggcccccggaaaggagagagagggcgtgctctgcattgatgccagcgacgacattacctactacgccgattctgtgaagggccgcttcaccatcagtagagacaatagcaagaatacagtctacctgcagatgaactccctgcgcccagaagacactgccgtctactactgtgctacccctatcgggctttcttcctcttgccttctcgaatatgactacgattactgggggcaggggacgctggtcaccgtgtctagcacgcgtggaatgaggactgaggatcttcccaaagctgtcgtctttctcgaaccccaatggtatcgggtgctcgaaaaagactctgtgacactgaaatgccaaggggcctactctcccgaggacaactccacacagtggtttcataatgagtccctcatcagctctcaggccagctcttatttcattgatgccgctacagtggacgactccggcgagtatcggtgtcagaccaatctgtctacactgtctgaccccgtgcagcttgaggtccacattggatggttgctcttgcaagccccacgctgggttttcaaagaggaagatccaatccatctgcggtgccacagctggaaaaacaccgctctccacaaagtcacatacctgcaaaatggcaaaggacgcaaatacttccatcacaattccgatttttacattccgaaggctaccctgaaagacagcggcagctatttctgccggggactcgtcggctccaagaatgtgtcctccgaaaccgtgaatatcacgattacccaaggactggctgtgcctacaatctctagcttctttccgcctggataccaagtctccttctgtcttgtgatggtcctcctgtttgctgtggacacaggactgtacttttccgtg

SEQ ID NO: 1621 - DNA, 1086 bp, synthetic construct
  source 1..1086: mol_type = other DNA
atggccttaccagtgaccgccttgctcctgccgctggccttgctgctccacgccgccaggccggaggtgcaactggtggaaagcggcggaggactggtgcaggctggcgatagcctgagactgagctgtgccgcctccggcagagccttcagcagatatgccatgggctggttcagacaggcccctggcaaagaacgcgagttcgtggccgccatcggctggggacctagcaagaccaactacgccgacagcgtgaagggccggttcaccatcagccgggacaacgccaagaacaccgtgtacctgcagatgaacaccctgaagcccgaggacaccgccgtgtactcttgcgccgccaagttcgtgaacaccgacagcacctggtcccgcagcgagatgtacacctattggggccagggcaccctcgtgaccgtgtctagtacgcgtggaatgaggactgaggatcttcccaaagctgtcgtctttctcgaaccccaatggtatcgggtgctcgaaaaagactctgtgacactgaaatgccaaggggcctactctcccgaggacaactccacacagtggtttcataatgagtccctcatcagctctcaggccagctcttatttcattgatgccgctacagtggacgactccggcgagtatcggtgtcagaccaatctgtctacactgtctgaccccgtgcagcttgaggtccacattggatggttgctcttgcaagccccacgctgggttttcaaagaggaagatccaatccatctgcggtgccacagctggaaaaacaccgctctccacaaagtcacatacctgcaaaatggcaaaggacgcaaatacttccatcacaattccgatttttacattccgaaggctaccctgaaagacagcggcagctatttctgccggggactcgtcggctccaagaatgtgtcctccgaaaccgtgaatatcacgattacccaaggactggctgtgcctacaatctctagcttctttccgcctggataccaagtctccttctgtcttgtgatggtcctcctgtttgctgtggacacaggactgtacttttccgtg

SEQ ID NO: 1622 - DNA, 1074 bp, synthetic construct
  source 1..1074: mol_type = other DNA
atggccttaccagtgaccgccttgctcctgccgctggccttgctgctccacgccgccaggccggaggtgcagctggtagaatccggcgggggacttgtacaggctggtggtagtctgagactgagctgtgtggcctccggcatcagcagcagcaagcggaacatgggatggtataggcaagcccctggtaagcagagggaatccgtggctacaatcagcagcggcggcaacaaggactacaccgacgccgtgaaggacaggttcaccatctccagggacaccaccaagaacaccgtgtacctgcagatgaactccctcaagcccgaggacaccgccgtgtactactgcaagatcgaggccggcacaggctgggccaccagaagaggctacacatactgggggcagggaacactggtgaccgtgagctccacgcgtggaatgaggactgaggatcttcccaaagctgtcgtctttctcgaaccccaatggtatcgggtgctcgaaaaagactctgtgacactgaaatgccaaggggcctactctcccgaggacaactccacacagtggtttcataatgagtccctcatcagctctcaggccagctcttatttcattgatgccgctacagtggacgactccggcgagtatcggtgtcagaccaatctgtctacactgtctgaccccgtgcagcttgaggtccacattggatggttgctcttgcaagccccacgctgggttttcaaagaggaagatccaatccatctgcggtgccacagctggaaaaacaccgctctccacaaagtcacatacctgcaaaatggcaaaggacgcaaatacttccatcacaattccgatttttacattccgaaggctaccctgaaagacagcggcagctatttctgccggggactcgtcggctccaagaatgtgtcctccgaaaccgtgaatatcacgattacccaaggactggctgtgcctacaatctctagcttctttccgcctggataccaagtctccttctgtcttgtgatggtcctcctgtttgctgtggacacaggactgtacttttccgtg

SEQ ID NO: 1623 - DNA, 1044 bp, synthetic construct
  source 1..1044: mol_type = other DNA
atggccttaccagtgaccgccttgctcctgccgctggccttgctgctccacgccgccaggccgcaggtgcaactggtgcagtctggcggagggctggtgcagccagggggatctctgagactgagctgtgccgccagcgacttcgacttcgccgcctacgagatgagctgggtgcgccaggctcctggacagggactggaatgggtggccatcatcagccacgacggcatcgacaagtattacaccgacagcgtgaagggccggttcaccatcagccgggacaacagcaagaacaccctgtacctgcagatgaataccctgcgggccgaggacaccgccacctactattgcctgagactgggagccgtgggccagggcacacttgtgacagtgtctagcacgcgtggaatgaggactgaggatcttcccaaagctgtcgtctttctcgaaccccaatggtatcgggtgctcgaaaaagactctgtgacactgaaatgccaaggggcctactctcccgaggacaactccacacagtggtttcataatgagtccctcatcagctctcaggccagctcttatttcattgatgccgctacagtggacgactccggcgagtatcggtgtcagaccaatctgtctacactgtctgaccccgtgcagcttgaggtccacattggatggttgctcttgcaagccccacgctgggttttcaaagaggaagatccaatccatctgcggtgccacagctggaaaaacaccgctctccacaaagtcacatacctgcaaaatggcaaaggacgcaaatacttccatcacaattccgatttttacattccgaaggctaccctgaaagacagcggcagctatttctgccggggactcgtcggctccaagaatgtgtcctccgaaaccgtgaatatcacgattacccaaggactggctgtgcctacaatctctagcttctttccgcctggataccaagtctccttctgtcttgtgatggtcctcctgtttgctgtggacacaggactgtacttttccgtg

SEQ ID NO: 1624 - DNA, 1068 bp, synthetic construct
  source 1..1068: mol_type = other DNA
atggccttaccagtgaccgccttgctcctgccgctggccttgctgctccacgccgccaggccgcaggtgcaactggtgcagagcggaggcggactggtgcagcctgggggcagtctgaggctgtcttgtgccgcctccgatttcgccttcgatgattacgagatgtcttgggtgcggcaggccccaggcaaagccctggaatggatcggcgacatcaaccacagcggcaccaccatctacaaccccagcctgaagtccagagtgaccatctccagagacaactccaagaatactctgtacctgcagatgaacacactgagagccgaagatacagccatctactactgcgccagaccccactacggcgactacagcgacgccttcgacatctggggccagggaaccatggtcaccgtgtcctctacgcgtggaatgaggactgaggatcttcccaaagctgtcgtctttctcgaaccccaatggtatcgggtgctcgaaaaagactctgtgacactgaaatgccaaggggcctactctcccgaggacaactccacacagtggtttcataatgagtccctcatcagctctcaggccagctcttatttcattgatgccgctacagtggacgactccggcgagtatcggtgtcagaccaatctgtctacactgtctgaccccgtgcagcttgaggtccacattggatggttgctcttgcaagccccacgctgggttttcaaagaggaagatccaatccatctgcggtgccacagctggaaaaacaccgctctccacaaagtcacatacctgcaaaatggcaaaggacgcaaatacttccatcacaattccgatttttacattccgaaggctaccctgaaagacagcggcagctatttctgccggggactcgtcggctccaagaatgtgtcctccgaaaccgtgaatatcacgattacccaaggactggctgtgcctacaatctctagcttctttccgcctggataccaagtctccttctgtcttgtgatggtcctcctgtttgctgtggacacaggactgtacttttccgtg

SEQ ID NO: 1625 - DNA, 1053 bp, synthetic construct
  source 1..1053: mol_type = other DNA
atggccttaccagtgaccgccttgctcctgccgctggccttgctgctccacgccgccaggccggaggtgcagctcgtggaatcaggcggaggtcttgtacagccaggaaattctcttcggctgtcttgcgccgcgagcgggttcaccttcagcagcttcggaatgagctgggtaagacaggcaccggggaaaggcctggagtgggtgagctcaatcagtgggagcgggtcagataccctgtacgcggattccgtgaagggcagattcacaatctctcgggacaatgctaagacaacactttaccttcagatgaactctctgcgacccgaggataccgctgtctactactgtacaataggaggttctctgtccagaagttctcaagggacactggtgaccgtctccagcacgcgtggaatgaggactgaggatcttcccaaagctgtcgtctttctcgaaccccaatggtatcgggtgctcgaaaaagactctgtgacactgaaatgccaaggggcctactctcccgaggacaactccacacagtggtttcataatgagtccctcatcagctctcaggccagctcttatttcattgatgccgctacagtggacgactccggcgagtatcggtgtcagaccaatctgtctacactgtctgaccccgtgcagcttgaggtccacattggatggttgctcttgcaagccccacgctgggttttcaaagaggaagatccaatccatctgcggtgccacagctggaaaaacaccgctctccacaaagtcacatacctgcaaaatggcaaaggacgcaaatacttccatcacaattccgatttttacattccgaaggctaccctgaaagacagcggcagctatttctgccggggactcgtcggctccaagaatgtgtcctccgaaaccgtgaatatcacgattacccaaggactggctgtgcctacaatctctagcttctttccgcctggataccaagtctccttctgtcttgtgatggtcctcctgtttgctgtggacacaggactgtacttttccgtg

SEQ ID NO: 1626 - DNA, 1056 bp, synthetic construct
  source 1..1056: mol_type = other DNA
atggccttaccagtgaccgccttgctcctgccgctggccttgctgctccacgccgccaggccggaagttcaactggtggaatccggtggaggactggtgcaagcgggcggctcactgcgccttagctgtgctgccagcggcagtatcttcagcggcaatgtaatgggttggtacaggcgacaagccccaggcaaggagcgagagtgggtagccgcgattgcaagtgggggcagcatctactacagagattctgtgaaaggccgcttcactattagtcgggacaacgcaaaaaacacggtgtatctccaaatgaacagcttgaagccagaggacactgctgtctactattgtaacagtcatcccccaactctcccctattgggggctgggcactcaggtcaccgtgagttccacgcgtggaatgaggactgaggatcttcccaaagctgtcgtctttctcgaaccccaatggtatcgggtgctcgaaaaagactctgtgacactgaaatgccaaggggcctactctcccgaggacaactccacacagtggtttcataatgagtccctcatcagctctcaggccagctcttatttcattgatgccgctacagtggacgactccggcgagtatcggtgtcagaccaatctgtctacactgtctgaccccgtgcagcttgaggtccacattggatggttgctcttgcaagccccacgctgggttttcaaagaggaagatccaatccatctgcggtgccacagctggaaaaacaccgctctccacaaagtcacatacctgcaaaatggcaaaggacgcaaatacttccatcacaattccgatttttacattccgaaggctaccctgaaagacagcggcagctatttctgccggggactcgtcggctccaagaatgtgtcctccgaaaccgtgaatatcacgattacccaaggactggctgtgcctacaatctctagcttctttccgcctggataccaagtctccttctgtcttgtgatggtcctcctgtttgctgtggacacaggactgtacttttccgtg

SEQ ID NO: 1627 - DNA, 1086 bp, synthetic construct
  source 1..1086: mol_type = other DNA
atggccttaccagtgaccgccttgctcctgccgctggccttgctgctccacgccgccaggccggaagtgcaactggtggaatctggagggggaagcgtgcaggcaggcggatctctgagactgtcctgcaccacatctggcagagccctgaatatgtacgtgatgggatggtttcggcaggctcccggcaacgagcgggaatttgtggccgctacaagcagcagcggcggcagcacaagctaccccgattctgtgaagggcagattcacaatctcccgcgataatgccaagaatactgtgtacctgcagatgaatagtctgaagcctgaagatacagccgcctacagatgtgccgccagcccctacgtgtccacccccaccatgaacatcctggaagagtacagatactggggcctgggaacacaagtgacagtgtccagcacgcgtggaatgaggactgaggatcttcccaaagctgtcgtctttctcgaaccccaatggtatcgggtgctcgaaaaagactctgtgacactgaaatgccaaggggcctactctcccgaggacaactccacacagtggtttcataatgagtccctcatcagctctcaggccagctcttatttcattgatgccgctacagtggacgactccggcgagtatcggtgtcagaccaatctgtctacactgtctgaccccgtgcagcttgaggtccacattggatggttgctcttgcaagccccacgctgggttttcaaagaggaagatccaatccatctgcggtgccacagctggaaaaacaccgctctccacaaagtcacatacctgcaaaatggcaaaggacgcaaatacttccatcacaattccgatttttacattccgaaggctaccctgaaagacagcggcagctatttctgccggggactcgtcggctccaagaatgtgtcctccgaaaccgtgaatatcacgattacccaaggactggctgtgcctacaatctctagcttctttccgcctggataccaagtctccttctgtcttgtgatggtcctcctgtttgctgtggacacaggactgtacttttccgtg

SEQ ID NO: 1628 - DNA, 1071 bp, synthetic construct
  source 1..1071: mol_type = other DNA
atggccttaccagtgaccgccttgctcctgccgctggccttgctgctccacgccgccaggccggaggttcagttggtcgaatcaggcgggggcctcgtccaacccggcggaagcctgcggctgtcttgcgcagcaagtggtagtgtgttcaagatcaacgttatggcctggtatcgccaggctccgggaaaagggagagagctggttgcggggatcattagcggtggctccaccagctacgctgacagtgtgaagggaaggttcactatatcacgcgacaacgcaaagaatacattgtacctccagatgaatagcttgcggcccgaagacacggcagtctactattgtgcctttatcacaacagagagcgactatgacctgggccgccggtattgggggcagggaacccttgtgaccgtttcatccacgcgtggaatgaggactgaggatcttcccaaagctgtcgtctttctcgaaccccaatggtatcgggtgctcgaaaaagactctgtgacactgaaatgccaaggggcctactctcccgaggacaactccacacagtggtttcataatgagtccctcatcagctctcaggccagctcttatttcattgatgccgctacagtggacgactccggcgagtatcggtgtcagaccaatctgtctacactgtctgaccccgtgcagcttgaggtccacattggatggttgctcttgcaagccccacgctgggttttcaaagaggaagatccaatccatctgcggtgccacagctggaaaaacaccgctctccacaaagtcacatacctgcaaaatggcaaaggacgcaaatacttccatcacaattccgatttttacattccgaaggctaccctgaaagacagcggcagctatttctgccggggactcgtcggctccaagaatgtgtcctccgaaaccgtgaatatcacgattacccaaggactggctgtgcctacaatctctagcttctttccgcctggataccaagtctccttctgtcttgtgatggtcctcctgtttgctgtggacacaggactgtacttttccgtg

SEQ ID NO: 1629 - DNA, 1506 bp, synthetic construct
  source 1..1506: mol_type = other DNA
atggccttaccagtgaccgccttgctcctgccgctggccttgctgctccacgccgccaggccggaggtgcaactggtggaaagcggcggaggctctgtgcagacaggcggctctctgagactgacctgtgccgccagcggcagaaccagcagatcctatggcatgggctggttcagacaggcccctggcaaagaacgcgagttcgtgtccggcatctcttggagaggcgacagcaccggctacgccgatagcgtgaagggccggttcaccatcagccgggacaacgccaagaacaccgtggacctgcagatgaacagcctgaagcccgaggacaccgccatctactactgtgccgctgccgccggatctgcttggtacggcacactgtacgagtacgactactggggccagggcacccttgtgaccgtgtcatctctcgagggcggaggcggaagtggaggcggaggatctggcggcggaggctctttcgaagaggtgcaactggtggaatccgggggaggcagcgtgcaggctgggggatcactgagactgtcttgtgctgcctccggcgacacctacggcagctattggatgggatggtttcggcaggctcccggaaaagaacgggaaggcgtggccgccatcaacagaggcggcggatacaccgtgtacgccgactctgtgaagggcagattcacaatctccagagacacagccaagaatactgtgtacctgcagatgaactccctgcgccccgacgataccgccgactattattgcgccgcttccggcgtgctgggcggcctgcatgaggactggttcaattattggggacagggaacacttgtgacagtgtccagcacgcgtggaatgaggactgaggatcttcccaaagctgtcgtctttctcgaaccccaatggtatcgggtgctcgaaaaagactctgtgacactgaaatgccaaggggcctactctcccgaggacaactccacacagtggtttcataatgagtccctcatcagctctcaggccagctcttatttcattgatgccgctacagtggacgactccggcgagtatcggtgtcagaccaatctgtctacactgtctgaccccgtgcagcttgaggtccacattggatggttgctcttgcaagccccacgctgggttttcaaagaggaagatccaatccatctgcggtgccacagctggaaaaacaccgctctccacaaagtcacatacctgcaaaatggcaaaggacgcaaatacttccatcacaattccgatttttacattccgaaggctaccctgaaagacagcggcagctatttctgccggggactcgtcggctccaagaatgtgtcctccgaaaccgtgaatatcacgattacccaaggactggctgtgcctacaatctctagcttctttccgcctggataccaagtctccttctgtcttgtgatggtcctcctgtttgctgtggacacaggactgtacttttccgtg

SEQ ID NO: 1630 - DNA, 1563 bp, synthetic construct
  source 1..1563: mol_type = other DNA
atggccttaccagtgaccgccttgctcctgccgctggccttgctgctccacgccgccaggccggaggtgcagctcgtagaatctggaggtggttccgtgcaagccggaggatcattgcgactgacctgcgcagcgagcggatctacttctcgctcttacggtatgggatggttcagacaggctcctgggaaagagcgcgagttcgtttcaggcatctcctggaggggggacagcaccggctacgcagatagcgtgaagggcaggttcacgatcagccgagacaacgccaaaaacaccgtcgatctgcaaatgaatagtctgaagcccgaagatactgcgatctactactgtgccgccgcagcagggtccacctggtacggcacactctacgagtacgactactgggggcagggaaccctggtaaccgtgtcctctctcgagggaggaggcggctccgggggaggcggaagtggaggcggaggatctgggtctggaggaagcggatctggaggctcagggtcagggggctcaggcagtggaggctctttcgaagttcagctcgtggaaagcggtggcggaagtgtgcaggccggaggcagtttgcgcctgagctgcgctgcttccggcgatacatacgggtcttactggatgggctggtttaggcaggcacctggacaagaaagagaagctgtggccgctattaacaggggaggtggctataccgtttatgctgattccgtgaagggccgattcacaatctcccgggataacgccaaaaacactctgtacctgcagatgaactcccttaggcccgatgacacagccgattactattgtgcggcctccggcgtgctgggtggtctgcatgaggattggttcaactactgggggcaaggcaccctcgtaaccgtgagtagcacgcgtggaatgaggactgaggatcttcccaaagctgtcgtctttctcgaaccccaatggtatcgggtgctcgaaaaagactctgtgacactgaaatgccaaggggcctactctcccgaggacaactccacacagtggtttcataatgagtccctcatcagctctcaggccagctcttatttcattgatgccgctacagtggacgactccggcgagtatcggtgtcagaccaatctgtctacactgtctgaccccgtgcagcttgaggtccacattggatggttgctcttgcaagccccacgctgggttttcaaagaggaagatccaatccatctgcggtgccacagctggaaaaacaccgctctccacaaagtcacatacctgcaaaatggcaaaggacgcaaatacttccatcacaattccgatttttacattccgaaggctaccctgaaagacagcggcagctatttctgccggggactcgtcggctccaagaatgtgtcctccgaaaccgtgaatatcacgattacccaaggactggctgtgcctacaatctctagcttctttccgcctggataccaagtctccttctgtcttgtgatggtcctcctgtttgctgtggacacaggactgtacttttccgtg

SEQ ID NO: 1631 - DNA, 1533 bp, synthetic construct
  source 1..1533: mol_type = other DNA
atggccttaccagtgaccgccttgctcctgccgctggccttgctgctccacgccgccaggccggaggtgcaactggtggaaagcggcggaggcctggtgcaggctggcggatctctgagactgagctgtgccgccagcggcatcaccttcagcatcaacacaatgggctggtacagacaggcccctggcaagcagagggaactggtggccctgatctccagcatcggcgacacctactacgccgacagcgtgaagggccggttcaccatcagccgggacaacgccaagaacaccgtgtacctccagatgaacagcctgaagcccgaggacaccgccgtgtactactgcaagcggttcagaacagccgcccagggcaccgattattggggccagggaacacaagtgaccgtgtcctctctcgagggaggaggcggctccgggggaggcggaagtggaggcggaggatctgggtctggaggaagcggatctggaggctcagggtcagggggctcaggcagtggaggctctttcgaagtgcaactggtggaatctgggggcggactggtgcagccaggcggaagtctgaggctgtcttgtgccgcctccggcagcatcttcggcttcaacgacatggcctggtatcggcaggctcccggaaaacagcgcgagctggtggctctgattagcagagtgggcgtgaccagcagcgccgactctgtgaagggcagattcacaatctccagagtgaacgccaaggatacagtgtacctccagatgaactctctgaaacctgaggatacagcagtgtactattgctacatggaccagcggctggacggcagcacactggcctactggggacagggaactcaagtgacagtgtctagcacgcgtggaatgaggactgaggatcttcccaaagctgtcgtctttctcgaaccccaatggtatcgggtgctcgaaaaagactctgtgacactgaaatgccaaggggcctactctcccgaggacaactccacacagtggtttcataatgagtccctcatcagctctcaggccagctcttatttcattgatgccgctacagtggacgactccggcgagtatcggtgtcagaccaatctgtctacactgtctgaccccgtgcagcttgaggtccacattggatggttgctcttgcaagccccacgctgggttttcaaagaggaagatccaatccatctgcggtgccacagctggaaaaacaccgctctccacaaagtcacatacctgcaaaatggcaaaggacgcaaatacttccatcacaattccgatttttacattccgaaggctaccctgaaagacagcggcagctatttctgccggggactcgtcggctccaagaatgtgtcctccgaaaccgtgaatatcacgattacccaaggactggctgtgcctacaatctctagcttctttccgcctggataccaagtctccttctgtcttgtgatggtcctcctgtttgctgtggacacaggactgtacttttccgtg

SEQ ID NO: 1632 - DNA, 1434 bp, synthetic construct; identical to SEQ ID NO: 1447
  source 1..1434: mol_type = other DNA

SEQ ID NO: 1633 - DNA, 1548 bp, synthetic construct
  source 1..1548: mol_type = other DNA
atggccttaccagtgaccgccttgctcctgccgctggccttgctgctccacgccgccaggccggacgtgcaactcgtggaatccggcggaggcctggtgcagcctggcggatctctgagactgagctgtgccgccagcggctctatcggcggactgaatgccatggcctggtacagacaggcccctggcaaagaacgggaactggtggccggcatctttggcgtgggcagcaccagatacgccgacagcgtgaagggccggttcaccatcagccgggacaacagcaagaacaccgtgtacctgcagatgaacagcctgcggcccgaggataccgccgtgtactactgcagaatgtccagcgtgaccagaggctccagcgactactggggccagggaacacttgtgaccgtgtccagtctcgagggaggaggcggctccgggggaggcggaagtggaggcggaggatctgggtctggaggaagcggatctggaggctcagggtcagggggctcaggcagtggaggctctttcgaagtgcaactggtggaatctggaggctctctggtgcagccagggggaagcctgagactgtcttgtgccgcttccggcttcaccttcgacgactacgccatgagctgggtgcgccaggtgccaggcaaaggcctggaatgggtgtccagcatcaactggagcggcacccacaccgattacgccgactccgtgaaaggcagattcacaatcagcagaaacaacgccaacaataccctgtacctgcagatgaactccctgaagtctgaggatacagcagtgtattattgcgccaagaactggcgggacgccggcaccacttggtttgagaaaagcggctctgccggacagggaacccaagtgacagtgtcctccacgcgtggaatgaggactgaggatcttcccaaagctgtcgtctttctcgaaccccaatggtatcgggtgctcgaaaaagactctgtgacactgaaatgccaaggggcctactctcccgaggacaactccacacagtggtttcataatgagtccctcatcagctctcaggccagctcttatttcattgatgccgctacagtggacgactccggcgagtatcggtgtcagaccaatctgtctacactgtctgaccccgtgcagcttgaggtccacattggatggttgctcttgcaagccccacgctgggttttcaaagaggaagatccaatccatctgcggtgccacagctggaaaaacaccgctctccacaaagtcacatacctgcaaaatggcaaaggacgcaaatacttccatcacaattccgatttttacattccgaaggctaccctgaaagacagcggcagctatttctgccggggactcgtcggctccaagaatgtgtcctccgaaaccgtgaatatcacgattacccaaggactggctgtgcctacaatctctagcttctttccgcctggataccaagtctccttctgtcttgtgatggtcctcctgtttgctgtggacacaggactgtacttttccgtg

SEQ ID NO: 1634 - DNA, 1572 bp, synthetic construct
  source 1..1572: mol_type = other DNA
atggccttaccagtgaccgccttgctcctgccgctggccttgctgctccacgccgccaggccggatgttcagttggtggagtctggtggcggtttggtgcagccaggtggctccctgcgactcagttgtgcagcctccgggttcattctggattactacgctattggttggtttcgacaggcccccggaaaggagagagagggcgtgctctgcattgatgccagcgacgacattacctactacgccgattctgtgaagggccgcttcaccatcagtagagacaatagcaagaatacagtctacctgcagatgaactccctgcgcccagaagacactgccgtctactactgtgctacccctatcgggctttcttcctcttgccttctcgaatatgactacgattactgggggcaggggacgctggtcaccgtgtctagcctcgagggaggtagcggctccgggggaggcggaagtggaggcggaggatctgggtctggaggaagcggatctggaggctcagggtcagggggctcaggcagtggaggctctttcgaagtgcaactggtggagtccggcggtggactggtacagcctgggggttcactgcgcctgtcctgcgccgccagcggaagaacctattacctcaatgctatgggttggttccgccaggccccaggaaaggagcgcgagttcgtggcggctattgactggtccgaggggaacaaggactatgctgattccgtgaagggcaggtttaccatcagccgggataattcaaaaaatactgtttatttgcagatgaactctcttagaccagaagacactgctgtctattactgcgccgctgacacccctccttggggaccactgatttatatcgaaagctatgattcctgggggcagggcacactcgtcaccgtgagtagcacgcgtggaatgaggactgaggatcttcccaaagctgtcgtctttctcgaaccccaatggtatcgggtgctcgaaaaagactctgtgacactgaaatgccaaggggcctactctcccgaggacaactccacacagtggtttcataatgagtccctcatcagctctcaggccagctcttatttcattgatgccgctacagtggacgactccggcgagtatcggtgtcagaccaatctgtctacactgtctgaccccgtgcagcttgaggtccacattggatggttgctcttgcaagccccacgctgggttttcaaagaggaagatccaatccatctgcggtgccacagctggaaaaacaccgctctccacaaagtcacatacctgcaaaatggcaaaggacgcaaatacttccatcacaattccgatttttacattccgaaggctaccctgaaagacagcggcagctatttctgccggggactcgtcggctccaagaatgtgtcctccgaaaccgtgaatatcacgattacccaaggactggctgtgcctacaatctctagcttctttccgcctggataccaagtctccttctgtcttgtgatggtcctcctgtttgctgtggacacaggactgtacttttccgtg

SEQ ID NO: 1635 - DNA, 1521 bp, synthetic construct
  source 1..1521: mol_type = other DNA
atggccttaccagtgaccgccttgctcctgccgctggccttgctgctccacgccgccaggccgcaggtgcaactggtgcagtctggcggagggctggtgcagccagggggatctctgagactgagctgtgccgccagcgacttcgacttcgccgcctacgagatgagctgggtgcgccaggctcctggacagggactggaatgggtggccatcatcagccacgacggcatcgacaagtattacaccgacagcgtgaagggccggttcaccatcagccgggacaacagcaagaacaccctgtacctgcagatgaataccctgcgggccgaggacaccgccacctactattgcctgagactgggagccgtgggccagggcacacttgtgacagtgtctagcctcgagggaggaggcggctccgggggaggcggaagtggaggcggaggatctgggtctggaggaagcggatctggaggctcagggtcagggggctcaggcagtggaggcagcttcgaacaggtgcaactggtgcagagcggaggcggactggtgcagcctgggggcagtctgaggctgtcttgtgccgcctccgatttcgccttcgatgattacgagatgtcttgggtgcggcaggccccaggcaaagccctggaatggatcggcgacatcaaccacagcggcaccaccatctacaaccccagcctgaagtccagagtgaccatctccagagacaactccaagaatactctgtacctgcagatgaacacactgagagccgaagatacagccatctactactgcgccagaccccactacggcgactacagcgacgccttcgacatctggggccagggaaccatggtcaccgtgtcctctacgcgtggaatgaggactgaggatcttcccaaagctgtcgtctttctcgaaccccaatggtatcgggtgctcgaaaaagactctgtgacactgaaatgccaaggggcctactctcccgaggacaactccacacagtggtttcataatgagtccctcatcagctctcaggccagctcttatttcattgatgccgctacagtggacgactccggcgagtatcggtgtcagaccaatctgtctacactgtctgaccccgtgcagcttgaggtccacattggatggttgctcttgcaagccccacgctgggttttcaaagaggaagatccaatccatctgcggtgccacagctggaaaaacaccgctctccacaaagtcacatacctgcaaaatggcaaaggacgcaaatacttccatcacaattccgatttttacattccgaaggctaccctgaaagacagcggcagctatttctgccggggactcgtcggctccaagaatgtgtcctccgaaaccgtgaatatcacgattacccaaggactggctgtgcctacaatctctagcttctttccgcctggataccaagtctccttctgtcttgtgatggtcctcctgtttgctgtggacacaggactgtacttttccgtg

SEQ ID NO: 1636 - DNA, 1065 bp, synthetic construct
  source 1..1065: mol_type = other DNA
atggccttaccagtgaccgccttgctcctgccgctggccttgctgctccacgccgccaggccgcaagtgaagctggaagagtctggcggaggactggtgcaggctggaagaagcctgagactgtcttgtgccgccagcgagcacacctttagctctcacgtgatgggctggttcagacaggcccctggcaaagaaagggaaagcgtggccgttatcggctggcgggatattagcaccagctacgccgatagcgtgaagggcagattcaccatcagccgggacaacgccaagaaaaccctgtacctccagatgaacagcctgaagccagaggacaccgccgtgtactactgcgccgccagaagaattgacgccgccgactttgattcttggggccagggaacccaagtgaccgtttctagcacgcgtggaatgaggactgaggatcttcccaaagctgtcgtctttctcgaaccccaatggtatcgggtgctcgaaaaagactctgtgacactgaaatgccaaggggcctactctcccgaggacaactccacacagtggtttcataatgagtccctcatcagctctcaggccagctcttatttcattgatgccgctacagtggacgactccggcgagtatcggtgtcagaccaatctgtctacactgtctgaccccgtgcagcttgaggtccacattggatggttgctcttgcaagccccacgctgggttttcaaagaggaagatccaatccatctgcggtgccacagctggaaaaacaccgctctccacaaagtcacatacctgcaaaatggcaaaggacgcaaatacttccatcacaattccgatttttacattccgaaggctaccctgaaagacagcggcagctatttctgccggggactcgtcggctccaagaatgtgtcctccgaaaccgtgaatatcacgattacccaaggactggctgtgcctacaatctctagcttctttccgcctggataccaagtctccttctgtcttgtgatggtcctcctgtttgctgtggacacaggactgtacttttccgtg

SEQ ID NO: 1637 - DNA, 1062 bp, synthetic construct
  source 1..1062: mol_type = other DNA
atggccttaccagtgaccgccttgctcctgccgctggccttgctgctccacgccgccaggccggaagtgcaactggttgaatccggtggcggcctggtgcaagcaggcggatctctcagacttagctgtgccgcctccggcagaaccttcacaatgggatggtttaggcaggctccagggaaagagagagagttcgtcgccgccatctctctgtctcccacactggcctactacgccgagtctgtgaaaggccggttcaccatctccagagataatgccaagaacaccgtggtgctgcaaatgaactctctgaaacccgaggatacagccctgtactattgtgccgctgaccggaagtccgtgatgagcatcagacccgattactggggacagggcacacaagtcacagtgtcctctacgcgtggaatgaggactgaggatcttcccaaagctgtcgtctttctcgaaccccaatggtatcgggtgctcgaaaaagactctgtgacactgaaatgccaaggggcctactctcccgaggacaactccacacagtggtttcataatgagtccctcatcagctctcaggccagctcttatttcattgatgccgctacagtggacgactccggcgagtatcggtgtcagaccaatctgtctacactgtctgaccccgtgcagcttgaggtccacattggatggttgctcttgcaagccccacgctgggttttcaaagaggaagatccaatccatctgcggtgccacagctggaaaaacaccgctctccacaaagtcacatacctgcaaaatggcaaaggacgcaaatacttccatcacaattccgatttttacattccgaaggctaccctgaaagacagcggcagctatttctgccggggactcgtcggctccaagaatgtgtcctccgaaaccgtgaatatcacgattacccaaggactggctgtgcctacaatctctagcttctttccgcctggataccaagtctccttctgtcttgtgatggtcctcctgtttgctgtggacacaggactgtacttttccgtg

SEQ ID NO: 1638 - DNA, 1464 bp, synthetic construct
  source 1..1464: mol_type = other DNA
atggccttaccagtgaccgccttgctcctgccgctggccttgctgctccacgccgccaggccgcaagtgaagctggaagagtctggcggaggactggtgcaggctggaagaagcctgagactgtcttgtgccgccagcgagcacacctttagctctcacgtgatgggctggttcagacaggcccctggcaaagaaagggaaagcgtggccgttatcggctggcgggatattagcaccagctacgccgatagcgtgaagggcagattcaccatcagccgggacaacgccaagaaaaccctgtacctccagatgaacagcctgaagccagaggacaccgccgtgtactactgcgccgccagaagaattgacgccgccgactttgattcttggggccagggaacccaagtgaccgtttctagcggaggcggtggaagtggcggcggtggttcaggcggcggaggatctgaagtgcaactggttgaatccggtggcggcctggtgcaagcaggcggatctctcagacttagctgtgccgcctccggcagaaccttcacaatgggatggtttaggcaggctccagggaaagagagagagttcgtcgccgccatctctctgtctcccacactggcctactacgccgagtctgtgaaaggccggttcaccatctccagagataatgccaagaacaccgtggtgctgcaaatgaactctctgaaacccgaggatacagccctgtactattgtgccgctgaccggaagtccgtgatgagcatcagacccgattactggggacagggcacacaagtcacagtgtcctctacgcgtggaatgaggactgaggatcttcccaaagctgtcgtctttctcgaaccccaatggtatcgggtgctcgaaaaagactctgtgacactgaaatgccaaggggcctactctcccgaggacaactccacacagtggtttcataatgagtccctcatcagctctcaggccagctcttatttcattgatgccgctacagtggacgactccggcgagtatcggtgtcagaccaatctgtctacactgtctgaccccgtgcagcttgaggtccacattggatggttgctcttgcaagccccacgctgggttttcaaagaggaagatccaatccatctgcggtgccacagctggaaaaacaccgctctccacaaagtcacatacctgcaaaatggcaaaggacgcaaatacttccatcacaattccgatttttacattccgaaggctaccctgaaagacagcggcagctatttctgccggggactcgtcggctccaagaatgtgtcctccgaaaccgtgaatatcacgattacccaaggactggctgtgcctacaatctctagcttctttccgcctggataccaagtctccttctgtcttgtgatggtcctcctgtttgctgtggacacaggactgtacttttccgtg

SEQ ID NO: 1639 - DNA, 1056 bp, synthetic construct
  source 1..1056: mol_type = other DNA
atggccttaccagtgaccgccttgctcctgccgctggccttgctgctccacgccgccaggccggaggtgcaactggttgagtctggcggaggactggttcaggcaggcggatctctgagactgagctgtatcgccaccggcaaggtgttcagcatctacgacatgggctggtacagacaggcccctggcaagcagagagagctggttgccgagatcacaagcagcggcaccacacactacgacgacttcgtgtccggcagattcaccatcagccgggacaacgccaagaacaccgtgtacctccagatgaacaccctgaaggccgaggacaccgccgtgtactactgtagagccaaccacgtgttcggcggcagctattggggacagggaacccaagtgacagtgtctagtacgcgtggaatgaggactgaggatcttcccaaagctgtcgtctttctcgaaccccaatggtatcgggtgctcgaaaaagactctgtgacactgaaatgccaaggggcctactctcccgaggacaactccacacagtggtttcataatgagtccctcatcagctctcaggccagctcttatttcattgatgccgctacagtggacgactccggcgagtatcggtgtcagaccaatctgtctacactgtctgaccccgtgcagcttgaggtccacattggatggttgctcttgcaagccccacgctgggttttcaaagaggaagatccaatccatctgcggtgccacagctggaaaaacaccgctctccacaaagtcacatacctgcaaaatggcaaaggacgcaaatacttccatcacaattccgatttttacattccgaaggctaccctgaaagacagcggcagctatttctgccggggactcgtcggctccaagaatgtgtcctccgaaaccgtgaatatcacgattacccaaggactggctgtgcctacaatctctagcttctttccgcctggataccaagtctccttctgtcttgtgatggtcctcctgtttgctgtggacacaggactgtacttttccgtg

SEQ ID NO: 1640 - DNA, 1074 bp, synthetic construct
  source 1..1074: mol_type = other DNA
atggccttaccagtgaccgccttgctcctgccgctggccttgctgctccacgccgccaggccgcaggtgcagcttgttgaaagcggaggtggcctggttcaacctggcggaagcctgagactgtcctgtgaagccagcggctttaccctggactactacgccatcggctggtttagacaagctcccggcaaagagagagagggcgtcatctgcatcagcagatccgacggcagcacctactatgccgacagcgtgaagggacgcttcaccatctccagagacaatgccaaaaagacggtctacctgcaaatgatctccctcaagcctgaggataccgccgcctactattgtgccgctggcgctgattgcagcggctacctgagagactacgagttcagaggccagggcacacaagtgaccgtcagctctacgcgtggaatgaggactgaggatcttcccaaagctgtcgtctttctcgaaccccaatggtatcgggtgctcgaaaaagactctgtgacactgaaatgccaaggggcctactctcccgaggacaactccacacagtggtttcataatgagtccctcatcagctctcaggccagctcttatttcattgatgccgctacagtggacgactccggcgagtatcggtgtcagaccaatctgtctacactgtctgaccccgtgcagcttgaggtccacattggatggttgctcttgcaagccccacgctgggttttcaaagaggaagatccaatccatctgcggtgccacagctggaaaaacaccgctctccacaaagtcacatacctgcaaaatggcaaaggacgcaaatacttccatcacaattccgatttttacattccgaaggctaccctgaaagacagcggcagctatttctgccggggactcgtcggctccaagaatgtgtcctccgaaaccgtgaatatcacgattacccaaggactggctgtgcctacaatctctagcttctttccgcctggataccaagtctccttctgtcttgtgatggtcctcctgtttgctgtggacacaggactgtacttttccgtg

SEQ ID NO: 1641 - DNA, 1443 bp, synthetic construct
  source 1..1443: mol_type = other DNA
atggccttaccagtgaccgccttgctcctgccgctggccttgctgctccacgccgccaggccggaggtgcaactggttgagtctggcggaggactggttcaggcaggcggatctctgagactgagctgtatcgccaccggcaaggtgttcagcatctacgacatgggctggtacagacaggcccctggcaagcagagagagctggttgccgagatcacaagcagcggcaccacacactacgacgacttcgtgtccggcagattcaccatcagccgggacaacgccaagaacaccgtgtacctccagatgaacaccctgaaggccgaggacaccgccgtgtactactgtagagccaaccacgtgttcggcggcagctattggggacagggaacccaagtgacagtgtctagtgaggtggccgctttggagaaacaggtgcagcttgttgaaagcggaggtggcctggttcaacctggcggaagcctgagactgtcctgtgaagccagcggctttaccctggactactacgccatcggctggtttagacaagctcccggcaaagagagagagggcgtcatctgcatcagcagatccgacggcagcacctactatgccgacagcgtgaagggacgcttcaccatctccagagacaatgccaaaaagacggtctacctgcaaatgatctccctcaagcctgaggataccgccgcctactattgtgccgctggcgctgattgcagcggctacctgagagactacgagttcagaggccagggcacacaagtgaccgtcagctctacgcgtggaatgaggactgaggatcttcccaaagctgtcgtctttctcgaaccccaatggtatcgggtgctcgaaaaagactctgtgacactgaaatgccaaggggcctactctcccgaggacaactccacacagtggtttcataatgagtccctcatcagctctcaggccagctcttatttcattgatgccgctacagtggacgactccggcgagtatcggtgtcagaccaatctgtctacactgtctgaccccgtgcagcttgaggtccacattggatggttgctcttgcaagccccacgctgggttttcaaagaggaagatccaatccatctgcggtgccacagctggaaaaacaccgctctccacaaagtcacatacctgcaaaatggcaaaggacgcaaatacttccatcacaattccgatttttacattccgaaggctaccctgaaagacagcggcagctatttctgccggggactcgtcggctccaagaatgtgtcctccgaaaccgtgaatatcacgattacccaaggactggctgtgcctacaatctctagcttctttccgcctggataccaagtctccttctgtcttgtgatggtcctcctgtttgctgtggacacaggactgtacttttccgtg

SEQ ID NO: 1642 - DNA, 1092 bp, synthetic construct
  source 1..1092: mol_type = other DNA
atggccttaccagtgaccgccttgctcctgccgctggccttgctgctccacgccgccaggccgcaagtgaagctggaagagtctggcggcagactggtgcagcctagaggaagcctgagactgtcttgtgccggcagcggcagaacctttagcacatacggcatggcctggttcagacaggcccctggaaaagagagagagttcgtcgccagcaaggccagcatgaactactccggcaggacctactacgccgacagcgtgaagggcagattcacaatcgccagagacaacgccaagaacatggtgttcctccagatgaacaatctgaagcccgaggacaccgccgtgtactattgtgccgctggcacaggctgtagcacctacggctgtttcgacgcccagatcatcgactactggggcaagggcacactggtcacagtttctagcacgcgtggaatgaggactgaggatcttcccaaagctgtcgtctttctcgaaccccaatggtatcgggtgctcgaaaaagactctgtgacactgaaatgccaaggggcctactctcccgaggacaactccacacagtggtttcataatgagtccctcatcagctctcaggccagctcttatttcattgatgccgctacagtggacgactccggcgagtatcggtgtcagaccaatctgtctacactgtctgaccccgtgcagcttgaggtccacattggatggttgctcttgcaagccccacgctgggttttcaaagaggaagatccaatccatctgcggtgccacagctggaaaaacaccgctctccacaaagtcacatacctgcaaaatggcaaaggacgcaaatacttccatcacaattccgatttttacattccgaaggctaccctgaaagacagcggcagctatttctgccggggactcgtcggctccaagaatgtgtcctccgaaaccgtgaatatcacgattacccaaggactggctgtgcctacaatctctagcttctttccgcctggataccaagtctccttctgtcttgtgatggtcctcctgtttgctgtggacacaggactgtacttttccgtg

SEQ ID NO: 1643 - DNA, 1065 bp, synthetic construct
  source 1..1065: mol_type = other DNA
atggccttaccagtgaccgccttgctcctgccgctggccttgctgctccacgccgccaggccgcaagtcaaactggaagaaagcggtggcggcctggtgcaacctggcgaatctctgagactgagctgtagcgccagcggctccatcttcaaggtgttcagagtgttcgccatgagctggtacaggcaaggccctggcaagcagagagagctggtcgcctctatcagcagcggcgagacaaccacatacgccgactctgtgaaaggccggttcaccatcagccgggataatgccaagaataccgcctatctccagatggactccctgaagcctgaagatacagctgtgtactactgcaacgccgaccataccttcaccggcgatttttggggccagggaacccaagtgaccgtgtctagtacgcgtggaatgaggactgaggatcttcccaaagctgtcgtctttctcgaaccccaatggtatcgggtgctcgaaaaagactctgtgacactgaaatgccaaggggcctactctcccgaggacaactccacacagtggtttcataatgagtccctcatcagctctcaggccagctcttatttcattgatgccgctacagtggacgactccggcgagtatcggtgtcagaccaatctgtctacactgtctgaccccgtgcagcttgaggtccacattggatggttgctcttgcaagccccacgctgggttttcaaagaggaagatccaatccatctgcggtgccacagctggaaaaacaccgctctccacaaagtcacatacctgcaaaatggcaaaggacgcaaatacttccatcacaattccgatttttacattccgaaggctaccctgaaagacagcggcagctatttctgccggggactcgtcggctccaagaatgtgtcctccgaaaccgtgaatatcacgattacccaaggactggctgtgcctacaatctctagcttctttccgcctggataccaagtctccttctgtcttgtgatggtcctcctgtttgctgtggacacaggactgtacttttccgtg

SEQ ID NO: 1644 - DNA, 1470 bp, synthetic construct
  source 1..1470: mol_type = other DNA
atggccttaccagtgaccgccttgctcctgccgctggccttgctgctccacgccgccaggccgcaagtgaagctggaagagtctggcggcagactggtgcagcctagaggaagcctgagactgtcttgtgccggcagcggcagaacctttagcacatacggcatggcctggttcagacaggcccctggaaaagagagagagttcgtcgccagcaaggccagcatgaactactccggcaggacctactacgccgacagcgtgaagggcagattcacaatcgccagagacaacgccaagaacatggtgttcctccagatgaacaatctgaagcccgaggacaccgccgtgtactattgtgccgctggcacaggctgtagcacctacggctgtttcgacgcccagatcatcgactactggggcaagggcacactggtcacagtttctagcgaggtggccgctttggagaaacaagtcaaactggaagaaagcggtggcggcctggtgcaacctggcgaatctctgagactgagctgtagcgccagcggctccatcttcaaggtgttcagagtgttcgccatgagctggtacaggcaaggccctggcaagcagagagagctggtcgcctctatcagcagcggcgagacaaccacatacgccgactctgtgaaaggccggttcaccatcagccgggataatgccaagaataccgcctatctccagatggactccctgaagcctgaagatacagctgtgtactactgcaacgccgaccataccttcaccggcgatttttggggccagggaacccaagtgaccgtgtctagtacgcgtggaatgaggactgaggatcttcccaaagctgtcgtctttctcgaaccccaatggtatcgggtgctcgaaaaagactctgtgacactgaaatgccaaggggcctactctcccgaggacaactccacacagtggtttcataatgagtccctcatcagctctcaggccagctcttatttcattgatgccgctacagtggacgactccggcgagtatcggtgtcagaccaatctgtctacactgtctgaccccgtgcagcttgaggtccacattggatggttgctcttgcaagccccacgctgggttttcaaagaggaagatccaatccatctgcggtgccacagctggaaaaacaccgctctccacaaagtcacatacctgcaaaatggcaaaggacgcaaatacttccatcacaattccgatttttacattccgaaggctaccctgaaagacagcggcagctatttctgccggggactcgtcggctccaagaatgtgtcctccgaaaccgtgaatatcacgattacccaaggactggctgtgcctacaatctctagcttctttccgcctggataccaagtctccttctgtcttgtgatggtcctcctgtttgctgtggacacaggactgtacttttccgtg

SEQ ID NO: 1645 - DNA, 1059 bp, synthetic construct
  source 1..1059: mol_type = other DNA
atggccttaccagtgaccgccttgctcctgccgctggccttgctgctccacgccgccaggccgcaagtgaagctggaagagtctggcggagagctggttcaacctggcggacctctgagactgtcttgtgccgccagcggcaacatcttcagcatcaaccggatgggctggtacagacaggcccctggaaaacagagagccttcgtcgcctctatcaccgtgcggggcatcaccaattacgccgactctgtgaagggcagattcaccatcagcgtggacaagagcaagaacaccatctacctccagatgaacgccctgaagcctgaggacaccgccgtgtactactgcaatgccgtgtccagcaacagggaccccgattattggggccagggcacccaagtgacagtgtctagtacgcgtggaatgaggactgaggatcttcccaaagctgtcgtctttctcgaaccccaatggtatcgggtgctcgaaaaagactctgtgacactgaaatgccaaggggcctactctcccgaggacaactccacacagtggtttcataatgagtccctcatcagctctcaggccagctcttatttcattgatgccgctacagtggacgactccggcgagtatcggtgtcagaccaatctgtctacactgtctgaccccgtgcagcttgaggtccacattggatggttgctcttgcaagccccacgctgggttttcaaagaggaagatccaatccatctgcggtgccacagctggaaaaacaccgctctccacaaagtcacatacctgcaaaatggcaaaggacgcaaatacttccatcacaattccgatttttacattccgaaggctaccctgaaagacagcggcagctatttctgccggggactcgtcggctccaagaatgtgtcctccgaaaccgtgaatatcacgattacccaaggactggctgtgcctacaatctctagcttctttccgcctggataccaagtctccttctgtcttgtgatggtcctcctgtttgctgtggacacaggactgtacttttccgtg

SEQ ID NO: 1646 - DNA, 1095 bp, synthetic construct
  source 1..1095: mol_type = other DNA
atggccttaccagtgaccgccttgctcctgccgctggccttgctgctccacgccgccaggccgcctgttcaactggttgaatctggcggcggactggtgcaggctggcgatagtctcagactgagctgtgccgcctccggcagaacatttggcatcggcacaatgggatggttccggcagcctcctggaaaagaacgcgaatttgtggccgccatcagatggtctacaggcggcaccagatacgccgacagcgtgaaaggccggtttaccatcagcagagacaacgccaagctgaccgtggatctccagatggatagcctgaaaccagaggatacagccgtctattactgcgccgctgacaggctgagcctggatctgtctggcagataccactacaaccctgccgtgtacgactactggggacagggaacacaagtcaccgtgtcctctacgcgtggaatgaggactgaggatcttcccaaagctgtcgtctttctcgaaccccaatggtatcgggtgctcgaaaaagactctgtgacactgaaatgccaaggggcctactctcccgaggacaactccacacagtggtttcataatgagtccctcatcagctctcaggccagctcttatttcattgatgccgctacagtggacgactccggcgagtatcggtgtcagaccaatctgtctacactgtctgaccccgtgcagcttgaggtccacattggatggttgctcttgcaagccccacgctgggttttcaaagaggaagatccaatccatctgcggtgccacagctggaaaaacaccgctctccacaaagtcacatacctgcaaaatggcaaaggacgcaaatacttccatcacaattccgatttttacattccgaaggctaccctgaaagacagcggcagctatttctgccggggactcgtcggctccaagaatgtgtcctccgaaaccgtgaatatcacgattacccaaggactggctgtgcctacaatctctagcttctttccgcctggataccaagtctccttctgtcttgtgatggtcctcctgtttgctgtggacacaggactgtacttttccgtg

SEQ ID NO: 1647 - DNA, 1491 bp, synthetic construct
  source 1..1491: mol_type = other DNA
atggccttaccagtgaccgccttgctcctgccgctggccttgctgctccacgccgccaggccgcaagtgaagctggaagagtctggcggagagctggttcaacctggcggacctctgagactgtcttgtgccgccagcggcaacatcttcagcatcaaccggatgggctggtacagacaggcccctggaaaacagagagccttcgtcgcctctatcaccgtgcggggcatcaccaattacgccgactctgtgaagggcagattcaccatcagcgtggacaagagcaagaacaccatctacctccagatgaacgccctgaagcctgaggacaccgccgtgtactactgcaatgccgtgtccagcaacagggaccccgattattggggccagggcacccaagtgacagtgtctagtggaggcggtggaagtggcggcggtggttcaggcggcggaggatctcctgttcaactggttgaatctggcggcggactggtgcaggctggcgatagtctcagactgagctgtgccgcctccggcagaacatttggcatcggcacaatgggatggttccggcagcctcctggaaaagaacgcgaatttgtggccgccatcagatggtctacaggcggcaccagatacgccgacagcgtgaaaggccggtttaccatcagcagagacaacgccaagctgaccgtggatctccagatggatagcctgaaaccagaggatacagccgtctattactgcgccgctgacaggctgagcctggatctgtctggcagataccactacaaccctgccgtgtacgactactggggacagggaacacaagtcaccgtgtcctctacgcgtggaatgaggactgaggatcttcccaaagctgtcgtctttctcgaaccccaatggtatcgggtgctcgaaaaagactctgtgacactgaaatgccaaggggcctactctcccgaggacaactccacacagtggtttcataatgagtccctcatcagctctcaggccagctcttatttcattgatgccgctacagtggacgactccggcgagtatcggtgtcagaccaatctgtctacactgtctgaccccgtgcagcttgaggtccacattggatggttgctcttgcaagccccacgctgggttttcaaagaggaagatccaatccatctgcggtgccacagctggaaaaacaccgctctccacaaagtcacatacctgcaaaatggcaaaggacgcaaatacttccatcacaattccgatttttacattccgaaggctaccctgaaagacagcggcagctatttctgccggggactcgtcggctccaagaatgtgtcctccgaaaccgtgaatatcacgattacccaaggactggctgtgcctacaatctctagcttctttccgcctggataccaagtctccttctgtcttgtgatggtcctcctgtttgctgtggacacaggactgtacttttccgtg

SEQ ID NO: 1648 - DNA, 1065 bp, synthetic construct
  source 1..1065: mol_type = other DNA
atggccttaccagtgaccgccttgctcctgccgctggccttgctgctccacgccgccaggccggccgtgcaactggttgaatctggcggaggactggtgcaggctggcgattctctgagactgacctgtacagccagcggcagagccttcagcacctacttcatggcctggttcagacaggcccctggcaaagagagagagttcgtcgccggaatcgcttggagcggaggctctacagcctacgccgattctgtgaagggcagattcaccatcagccgggacaacgccaagaacaccgtgtacctccagatgaacagcctgaagtccgaggacaccgccgtgtactactgtgccagcagaggcatcgaggtggaagagtttggagcctggggccagggaacccaagtgacagtttcttctacgcgtggaatgaggactgaggatcttcccaaagctgtcgtctttctcgaaccccaatggtatcgggtgctcgaaaaagactctgtgacactgaaatgccaaggggcctactctcccgaggacaactccacacagtggtttcataatgagtccctcatcagctctcaggccagctcttatttcattgatgccgctacagtggacgactccggcgagtatcggtgtcagaccaatctgtctacactgtctgaccccgtgcagcttgaggtccacattggatggttgctcttgcaagccccacgctgggttttcaaagaggaagatccaatccatctgcggtgccacagctggaaaaacaccgctctccacaaagtcacatacctgcaaaatggcaaaggacgcaaatacttccatcacaattccgatttttacattccgaaggctaccctgaaagacagcggcagctatttctgccggggactcgtcggctccaagaatgtgtcctccgaaaccgtgaatatcacgattacccaaggactggctgtgcctacaatctctagcttctttccgcctggataccaagtctccttctgtcttgtgatggtcctcctgtttgctgtggacacaggactgtacttttccgtg

SEQ ID NO: 1649 - DNA, 1068 bp, synthetic construct
  source 1..1068: mol_type = other DNA
atggccttaccagtgaccgccttgctcctgccgctggccttgctgctccacgccgccaggccgcaggttcaactggtggaaagtggcggtggcttggtgcaagcaggcggctctcttagactgtcttgtgctgcctctggcggcaccctgagcaagaataccgtggcatggtttaggcaggctcccggaaaagagcggggctttgtcgccagcatcacctgggatggcagaaccacctactacgccgacagcgtgaaaggccggttcaccatctccagagataatgccaagaatacggtctacttgcaaatgaactccctgaagcctgaagatacagccgtgtacgtgtgcgccgatctcggcaaatggcctgctggacctgccgattattggggacagggcacacaagtcaccgtgtcctctacgcgtggaatgaggactgaggatcttcccaaagctgtcgtctttctcgaaccccaatggtatcgggtgctcgaaaaagactctgtgacactgaaatgccaaggggcctactctcccgaggacaactccacacagtggtttcataatgagtccctcatcagctctcaggccagctcttatttcattgatgccgctacagtggacgactccggcgagtatcggtgtcagaccaatctgtctacactgtctgaccccgtgcagcttgaggtccacattggatggttgctcttgcaagccccacgctgggttttcaaagaggaagatccaatccatctgcggtgccacagctggaaaaacaccgctctccacaaagtcacatacctgcaaaatggcaaaggacgcaaatacttccatcacaattccgatttttacattccgaaggctaccctgaaagacagcggcagctatttctgccggggactcgtcggctccaagaatgtgtcctccgaaaccgtgaatatcacgattacccaaggactggctgtgcctacaatctctagcttctttccgcctggataccaagtctccttctgtcttgtgatggtcctcctgtttgctgtggacacaggactgtacttttccgtg

SEQ ID NO: 1650 - DNA, 1080 bp, synthetic construct
  source 1..1080: mol_type = other DNA
atggccttaccagtgaccgccttgctcctgccgctggccttgctgctccacgccgccaggccgggctctgacctgggcatcaagctgctgttcgccgctgccaagggccaggacgacgaagtgcggattctgctggctgctggggccgacgtgaacgccaaggatttcgagggctacacccccctgcacgtggccgcctatgatggacacctggaaatcgtggaagtgctgctgaaggctggcgctgatgtgaatgccaaagacagccagggccggacccctctgcatgaagccgcctacagcggccatctggaaattgtggaagtgctgctgaaagccggggcagacgtgaacgctcaggacgacgctggcgagacaccagccgatctggctgcagcttggggccacgaagatatcgccgaggtgctgcagaagacgcgtggaatgaggactgaggatcttcccaaagctgtcgtctttctcgaaccccaatggtatcgggtgctcgaaaaagactctgtgacactgaaatgccaaggggcctactctcccgaggacaactccacacagtggtttcataatgagtccctcatcagctctcaggccagctcttatttcattgatgccgctacagtggacgactccggcgagtatcggtgtcagaccaatctgtctacactgtctgaccccgtgcagcttgaggtccacattggatggttgctcttgcaagccccacgctgggttttcaaagaggaagatccaatccatctgcggtgccacagctggaaaaacaccgctctccacaaagtcacatacctgcaaaatggcaaaggacgcaaatacttccatcacaattccgatttttacattccgaaggctaccctgaaagacagcggcagctatttctgccggggactcgtcggctccaagaatgtgtcctccgaaaccgtgaatatcacgattacccaaggactggctgtgcctacaatctctagcttctttccgcctggataccaagtctccttctgtcttgtgatggtcctcctgtttgctgtggacacaggactgtacttttccgtg

SEQ ID NO: 1651 - DNA, 1086 bp, synthetic construct
  source 1..1086: mol_type = other DNA
atggccttaccagtgaccgccttgctcctgccgctggccttgctgctccacgccgccaggccgagaagcgatctgggaaagaagctgctggaagctgccagagccggacaggatgatgaagtgcgcatcctgatggcaaacggcgcagatgtgaacgcaaaggacgagtacggcctgacccccctgtacctggctacagcccacgggcacctggaaattgtggaagtgctgctgaagaacggcgctgacgtgaacgccgtggacgccatcggctttaccccactgcatctggccgctttcatcgggcatctcgaaatcgcagaggtgctgctgaaacacggggccgatgtgaatgcccaggacaagttcggcaagaccgccttcgacatcagcatcggcaacggcaacgaggacctggccgagatcctgcagaaactgaacacgcgtggaatgaggactgaggatcttcccaaagctgtcgtctttctcgaaccccaatggtatcgggtgctcgaaaaagactctgtgacactgaaatgccaaggggcctactctcccgaggacaactccacacagtggtttcataatgagtccctcatcagctctcaggccagctcttatttcattgatgccgctacagtggacgactccggcgagtatcggtgtcagaccaatctgtctacactgtctgaccccgtgcagcttgaggtccacattggatggttgctcttgcaagccccacgctgggttttcaaagaggaagatccaatccatctgcggtgccacagctggaaaaacaccgctctccacaaagtcacatacctgcaaaatggcaaaggacgcaaatacttccatcacaattccgatttttacattccgaaggctaccctgaaagacagcggcagctatttctgccggggactcgtcggctccaagaatgtgtcctccgaaaccgtgaatatcacgattacccaaggactggctgtgcctacaatctctagcttctttccgcctggataccaagtctccttctgtcttgtgatggtcctcctgtttgctgtggacacaggactgtacttttccgtg

SEQ ID NO: 1652 - DNA, 882 bp, synthetic construct
  source 1..882: mol_type = other DNA
atggccttaccagtgaccgccttgctcctgccgctggccttgctgctccacgccgccaggccggtggacaacaagttcaacaaagagcggtacagcgcctactacgagatttggcaactgcccaacctgaacgtgcggcagaaggccgccttcatcggatctctgcaggacgaccctagccagagcgccaatctgctggccgaggccaagaagctgaacgacgcccaggcccctaaaacgcgtggaatgaggactgaggatcttcccaaagctgtcgtctttctcgaaccccaatggtatcgggtgctcgaaaaagactctgtgacactgaaatgccaaggggcctactctcccgaggacaactccacacagtggtttcataatgagtccctcatcagctctcaggccagctcttatttcattgatgccgctacagtggacgactccggcgagtatcggtgtcagaccaatctgtctacactgtctgaccccgtgcagcttgaggtccacattggatggttgctcttgcaagccccacgctgggttttcaaagaggaagatccaatccatctgcggtgccacagctggaaaaacaccgctctccacaaagtcacatacctgcaaaatggcaaaggacgcaaatacttccatcacaattccgatttttacattccgaaggctaccctgaaagacagcggcagctatttctgccggggactcgtcggctccaagaatgtgtcctccgaaaccgtgaatatcacgattacccaaggactggctgtgcctacaatctctagcttctttccgcctggataccaagtctccttctgtcttgtgatggtcctcctgtttgctgtggacacaggactgtacttttccgtg

SEQ ID NO: 1653 - DNA, 861 bp, synthetic construct
  source 1..861: mol_type = other DNA
atggccttaccagtgaccgccttgctcctgccgctggccttgctgctccacgccgccaggccgtacgccaaagagatgcggaacgcctactgggagatcgccctgctgcccaatctgaccaaccagcagaagagagcccccatcagaaagctgtacgacgacccctcccagagcagcgagctgctgtctgaggctaaaaaactgaacgatagccagacgcgtggaatgaggactgaggatcttcccaaagctgtcgtctttctcgaaccccaatggtatcgggtgctcgaaaaagactctgtgacactgaaatgccaaggggcctactctcccgaggacaactccacacagtggtttcataatgagtccctcatcagctctcaggccagctcttatttcattgatgccgctacagtggacgactccggcgagtatcggtgtcagaccaatctgtctacactgtctgaccccgtgcagcttgaggtccacattggatggttgctcttgcaagccccacgctgggttttcaaagaggaagatccaatccatctgcggtgccacagctggaaaaacaccgctctccacaaagtcacatacctgcaaaatggcaaaggacgcaaatacttccatcacaattccgatttttacattccgaaggctaccctgaaagacagcggcagctatttctgccggggactcgtcggctccaagaatgtgtcctccgaaaccgtgaatatcacgattacccaaggactggctgtgcctacaatctctagcttctttccgcctggataccaagtctccttctgtcttgtgatggtcctcctgtttgctgtggacacaggactgtacttttccgtg

SEQ ID NO: 1654 - DNA, 861 bp, synthetic construct
  source 1..861: mol_type = other DNA
atggccttaccagtgaccgccttgctcctgccgctggccttgctgctccacgccgccaggccgtatgccaaagaaatgtggattgcctgggaggaaatccgcaacctgcctaatctgaatggctggcagatgaccgcctttatcgctaagctgctggatgaccccagccagtcctctgagctgctgagcgaagcaaagaaactgaatgactcccagacgcgtggaatgaggactgaggatcttcccaaagctgtcgtctttctcgaaccccaatggtatcgggtgctcgaaaaagactctgtgacactgaaatgccaaggggcctactctcccgaggacaactccacacagtggtttcataatgagtccctcatcagctctcaggccagctcttatttcattgatgccgctacagtggacgactccggcgagtatcggtgtcagaccaatctgtctacactgtctgaccccgtgcagcttgaggtccacattggatggttgctcttgcaagccccacgctgggttttcaaagaggaagatccaatccatctgcggtgccacagctggaaaaacaccgctctccacaaagtcacatacctgcaaaatggcaaaggacgcaaatacttccatcacaattccgatttttacattccgaaggctaccctgaaagacagcggcagctatttctgccggggactcgtcggctccaagaatgtgtcctccgaaaccgtgaatatcacgattacccaaggactggctgtgcctacaatctctagcttctttccgcctggataccaagtctccttctgtcttgtgatggtcctcctgtttgctgtggacacaggactgtacttttccgtg

SEQ ID NO: 1655 - DNA, 975 bp, synthetic construct
  source 1..975: mol_type = other DNA
atggccttaccagtgaccgccttgctcctgccgctggccttgctgctccacgccgccaggccgctgccagccccgaagaatttggtcgtttcccgtgtcactgaggactctgcacgtctgagctggaccgcaccggacgcggcgttcgacagctttgcaatcggctactgggagtgggatgatgacggcgaggccattgtgctgaccgttccgggtagcgagcgcagctacgatctgaccggtctgaagccgggtacggaatatccggtgtatattgcgggcgtgaagggtggccagtggagcttcccgctgagcgcgatctttaccaccacgcgtggaatgaggactgaggatcttcccaaagctgtcgtctttctcgaaccccaatggtatcgggtgctcgaaaaagactctgtgacactgaaatgccaaggggcctactctcccgaggacaactccacacagtggtttcataatgagtccctcatcagctctcaggccagctcttatttcattgatgccgctacagtggacgactccggcgagtatcggtgtcagaccaatctgtctacactgtctgaccccgtgcagcttgaggtccacattggatggttgctcttgcaagccccacgctgggttttcaaagaggaagatccaatccatctgcggtgccacagctggaaaaacaccgctctccacaaagtcacatacctgcaaaatggcaaaggacgcaaatacttccatcacaattccgatttttacattccgaaggctaccctgaaagacagcggcagctatttctgccggggactcgtcggctccaagaatgtgtcctccgaaaccgtgaatatcacgattacccaaggactggctgtgcctacaatctctagcttctttccgcctggataccaagtctccttctgtcttgtgatggtcctcctgtttgctgtggacacaggactgtacttttccgtg

SEQ ID NO: 1656 - DNA, 981 bp, synthetic construct
  source 1..981: mol_type = other DNA
atggccttaccagtgaccgccttgctcctgccgctggccttgctgctccacgccgccaggccgctgccggctccgaaaaacctggtcgtttcccgtgtcactgaagattctgcacgcttgagctgggcgatcgacgagcagcgtgactggtttgagagcttcctgattcagtatcaagaatcggaaaaagttggcgaggccatcgtgctgaccgttccgggtagcgagcgcagctatgatctgacgggtctgaagccaggcaccgagtatacggtgagcatttacggtgtctaccatgtgtaccgtagcaatccgctgagcgcgatcttcaccaccacgcgtggaatgaggactgaggatcttcccaaagctgtcgtctttctcgaaccccaatggtatcgggtgctcgaaaaagactctgtgacactgaaatgccaaggggcctactctcccgaggacaactccacacagtggtttcataatgagtccctcatcagctctcaggccagctcttatttcattgatgccgctacagtggacgactccggcgagtatcggtgtcagaccaatctgtctacactgtctgaccccgtgcagcttgaggtccacattggatggttgctcttgcaagccccacgctgggttttcaaagaggaagatccaatccatctgcggtgccacagctggaaaaacaccgctctccacaaagtcacatacctgcaaaatggcaaaggacgcaaatacttccatcacaattccgatttttacattccgaaggctaccctgaaagacagcggcagctatttctgccggggactcgtcggctccaagaatgtgtcctccgaaaccgtgaatatcacgattacccaaggactggctgtgcctacaatctctagcttctttccgcctggataccaagtctccttctgtcttgtgatggtcctcctgtttgctgtggacacaggactgtacttttccgtg

SEQ ID NO: 1657 - DNA, 975 bp, synthetic construct
  source 1..975: mol_type = other DNA
atggccttaccagtgaccgccttgctcctgccgctggccttgctgctccacgccgccaggccgctgccagccccgaaaaacttagttgtctcccgcgtgaccgaagattctgctcgtctgagctggactgcaccggacgcggcgttcgacagctttccgattggctactgggagtgggatgatgacggtgaagcgatcgtgctgaccgttccgggtagcgagcgtagctatgacctgacgggtttgaaacctggtaccgagtatcacgtttacattgcgggcgtcaagggtggccagtggtcgttcccgctgagcgcaatctttacgaccacgcgtggaatgaggactgaggatcttcccaaagctgtcgtctttctcgaaccccaatggtatcgggtgctcgaaaaagactctgtgacactgaaatgccaaggggcctactctcccgaggacaactccacacagtggtttcataatgagtccctcatcagctctcaggccagctcttatttcattgatgccgctacagtggacgactccggcgagtatcggtgtcagaccaatctgtctacactgtctgaccccgtgcagcttgaggtccacattggatggttgctcttgcaagccccacgctgggttttcaaagaggaagatccaatccatctgcggtgccacagctggaaaaacaccgctctccacaaagtcacatacctgcaaaatggcaaaggacgcaaatacttccatcacaattccgatttttacattccgaaggctaccctgaaagacagcggcagctatttctgccggggactcgtcggctccaagaatgtgtcctccgaaaccgtgaatatcacgattacccaaggactggctgtgcctacaatctctagcttctttccgcctggataccaagtctccttctgtcttgtgatggtcctcctgtttgctgtggacacaggactgtacttttccgtg

SEQ ID NO: 1658 - DNA, 990 bp, synthetic construct
  source 1..990: mol_type = other DNA
atggccttaccagtgaccgccttgctcctgccgctggccttgctgctccacgccgccaggccgctgcccgctcctaagaatctggtggtgtccgaagtgaccgaggacagcgctagactgagctgggatgatccctgggccttctacgagagcttcctgatccagtaccaagagagcgagaaagtcggcgaggccatcgtgcttacagtgcctggaagcgagagaagctacgacctgacaggcctgaagcctggcaccgagtacaccgtgtctatctacggcgtgcacaacgtgtacaaggacaccaacatgcggggcctgcctctgagcgccatctttacaacaacgcgtggaatgaggactgaggatcttcccaaagctgtcgtctttctcgaaccccaatggtatcgggtgctcgaaaaagactctgtgacactgaaatgccaaggggcctactctcccgaggacaactccacacagtggtttcataatgagtccctcatcagctctcaggccagctcttatttcattgatgccgctacagtggacgactccggcgagtatcggtgtcagaccaatctgtctacactgtctgaccccgtgcagcttgaggtccacattggatggttgctcttgcaagccccacgctgggttttcaaagaggaagatccaatccatctgcggtgccacagctggaaaaacaccgctctccacaaagtcacatacctgcaaaatggcaaaggacgcaaatacttccatcacaattccgatttttacattccgaaggctaccctgaaagacagcggcagctatttctgccggggactcgtcggctccaagaatgtgtcctccgaaaccgtgaatatcacgattacccaaggactggctgtgcctacaatctctagcttctttccgcctggataccaagtctccttctgtcttgtgatggtcctcctgtttgctgtggacacaggactgtacttttccgtg

SEQ ID NO: 1659 - DNA, 975 bp, synthetic construct
  source 1..975: mol_type = other DNA
atggccttaccagtgaccgccttgctcctgccgctggccttgctgctccacgccgccaggccgttgcctgctccaaaaaacctggtcgtcagcagagtgacagaggactccgccagactgtcttggacagcccctgatgccgccttcgacagcttctggatcagatacttcgagttcctcggcagcggagaagccattgtgctgaccgttccaggcagcgagagatcctatgatctgaccggactgaagcccggaacagagtatgtggtcaacatcatgggcgtgaaaggcggcaagatcagccctcctctgtccgccattttcaccaccacgcgtggaatgaggactgaggatcttcccaaagctgtcgtctttctcgaaccccaatggtatcgggtgctcgaaaaagactctgtgacactgaaatgccaaggggcctactctcccgaggacaactccacacagtggtttcataatgagtccctcatcagctctcaggccagctcttatttcattgatgccgctacagtggacgactccggcgagtatcggtgtcagaccaatctgtctacactgtctgaccccgtgcagcttgaggtccacattggatggttgctcttgcaagccccacgctgggttttcaaagaggaagatccaatccatctgcggtgccacagctggaaaaacaccgctctccacaaagtcacatacctgcaaaatggcaaaggacgcaaatacttccatcacaattccgatttttacattccgaaggctaccctgaaagacagcggcagctatttctgccggggactcgtcggctccaagaatgtgtcctccgaaaccgtgaatatcacgattacccaaggactggctgtgcctacaatctctagcttctttccgcctggataccaagtctccttctgtcttgtgatggtcctcctgtttgctgtggacacaggactgtacttttccgtg

SEQ ID NO: 1660 - DNA, 1287 bp, synthetic construct
  source 1..1287: mol_type = other DNA
atggccttaccagtgaccgccttgctcctgccgctggccttgctgctccacgccgccaggccgctgcccgctcctaagaatctggtggtgtccgaagtgaccgaggacagcgctagactgagctgggatgatccctgggccttctacgagagcttcctgatccagtaccaagagagcgagaaagtcggcgaggccatcgtgcttacagtgcctggaagcgagagaagctacgacctgacaggcctgaagcctggcaccgagtacaccgtgtctatctacggcgtgcacaacgtgtacaaggacaccaacatgcggggcctgcctctgagcgccatctttacaacagctcccgctcctgctccagcaccagctccattgcctgctccaaaaaacctggtcgtcagcagagtgacagaggactccgccagactgtcttggacagcccctgatgccgccttcgacagcttctggatcagatacttcgagttcctcggcagcggagaagccattgtgctgaccgttccaggcagcgagagatcctatgatctgaccggactgaagcccggaacagagtatgtggtcaacatcatgggcgtgaaaggcggcaagatcagccctcctctgtccgccattttcaccaccacgcgtggaatgaggactgaggatcttcccaaagctgtcgtctttctcgaaccccaatggtatcgggtgctcgaaaaagactctgtgacactgaaatgccaaggggcctactctcccgaggacaactccacacagtggtttcataatgagtccctcatcagctctcaggccagctcttatttcattgatgccgctacagtggacgactccggcgagtatcggtgtcagaccaatctgtctacactgtctgaccccgtgcagcttgaggtccacattggatggttgctcttgcaagccccacgctgggttttcaaagaggaagatccaatccatctgcggtgccacagctggaaaaacaccgctctccacaaagtcacatacctgcaaaatggcaaaggacgcaaatacttccatcacaattccgatttttacattccgaaggctaccctgaaagacagcggcagctatttctgccggggactcgtcggctccaagaatgtgtcctccgaaaccgtgaatatcacgattacccaaggactggctgtgcctacaatctctagcttctttccgcctggataccaagtctccttctgtcttgtgatggtcctcctgtttgctgtggacacaggactgtacttttccgtg

SEQ ID NO: 1661 - DNA, 978 bp, synthetic construct
  source 1..978: mol_type = other DNA
atggccttaccagtgaccgccttgctcctgccgctggccttgctgctccacgccgccaggccgatgctgcccgctcctaagaatctggtggtgtccagaatcaccgaggacagcgccagactgtcttggacagctcctgatgccgccttcgacagcttccccatccggtacatcgagacactgatctggggcgaagccatctggctggatgtgcctggaagcgagagaagctacgacctgaccggactgaagcctggcacagagtatgccgtggtcatcaccggcgtgaaaggcggcagattctctagccctctggtggcctctttcaccaccacgcgtggaatgaggactgaggatcttcccaaagctgtcgtctttctcgaaccccaatggtatcgggtgctcgaaaaagactctgtgacactgaaatgccaaggggcctactctcccgaggacaactccacacagtggtttcataatgagtccctcatcagctctcaggccagctcttatttcattgatgccgctacagtggacgactccggcgagtatcggtgtcagaccaatctgtctacactgtctgaccccgtgcagcttgaggtccacattggatggttgctcttgcaagccccacgctgggttttcaaagaggaagatccaatccatctgcggtgccacagctggaaaaacaccgctctccacaaagtcacatacctgcaaaatggcaaaggacgcaaatacttccatcacaattccgatttttacattccgaaggctaccctgaaagacagcggcagctatttctgccggggactcgtcggctccaagaatgtgtcctccgaaaccgtgaatatcacgattacccaaggactggctgtgcctacaatctctagcttctttccgcctggataccaagtctccttctgtcttgtgatggtcctcctgtttgctgtggacacaggactgtacttttccgtg

SEQ ID NO: 1662 - DNA, 2406 bp, synthetic construct
  source 1..2406: mol_type = other DNA
atggccttaccagtgaccgccttgctcctgccgctggccttgctgctccacgccgccaggccggagtgggtcaagttcgccaagccttgcagagaaggcgaggacaacagcaagcggaaccctatcgccaagatcaccagcgactaccaggccacacagaagatcacctaccggatctctggcgtgggcatcgaccagcctccattcggcatcttcgtggtggacaagaacaccggcgacatcaacatcaccgccatcgtggacagagaggaaacccctagcttcctgattacctgtagagccctgaacgcccagggcctcgatgtggaaaagcctctgatcctgaccgtgaagatcctggacatcaacgacaaccctccagtgttcagccagcagattttcatgggcgagatcgaggaaaacagcgccagcaacagcctggtcatgatcctgaatgccaccgacgccgacgagcccaaccacctgaatagcaagatcgccttcaagatcgtgtcccaagagcctgccggcacacccatgtttctgctgtccagaaataccggcgaagtgcggaccctgaccaatagcctggatagagagcaggccagcagctacagactggtggtgtctggcgctgacaaggatggcgagggactgagcacccagtgcgagtgcaacatcaaagtgaaggacgtgaacgacaacttccccatgttccgggacagccagtatagcgcccggatcgaagagaacatcctgagcagcgagctgctgcggttccaagtgaccgacctggacgaagagtacaccgacaactggctggccgtgtacttcttcaccagcggcaacgaaggcaactggttcgagatccagacagaccccaggaccaacgagggcatcctgaaggttgtgaaggccctggactacgagcagctccagagcgtgaagctgtctatcgccgtgaagaacaaggccgagttccaccagtccgtgatctcccggtacagagtgcagagcacccctgtgaccatccaagtgattaacgtgcgcgagggcattgccttcagacccgccagcaagaccttcaccgtgcagaagggcatcagcagcaagaaactggtggactacatcctgggcacctatcaggccatcgacgaggacacaaacaaagccgcctccaacgtgaaatacgtgatgggcagaaacgacggcggctacctgatgatcgactccaagaccgccgagatcaagttcgtgaagaatatgaaccgggactccaccttcatcgtgaacaagaccatcacagccgaggtgctggctatcgacgagtataccggcaagaccagcaccggcacagtgtatgtgcgggtgcccgacttcaacgataactgccctacagccgtgctggaaaaggacgccgtgtgtagctctagccctagcgtggtcgtgtccgccagaacactgaacaacagatacacaggcccctacacattcgccctggaagatcagcctgtgaagctgcctgccgtgtggtccatcaccacactgaatgctacaagcgccctgctgagagcccaagagcaaattcctcctggcgtgtaccacatcagcctggtgctgacagacagccagaacaatagatgcgagatgcctcggagcctgacactggaagtgtgccagtgcgacaacagaggcatctgcggcacaagctaccccacaacaagccccggcacaagatacggcagacctcactctggaagaacgcgtggaatgaggactgaggatcttcccaaagctgtcgtctttctcgaaccccaatggtatcgggtgctcgaaaaagactctgtgacactgaaatgccaaggggcctactctcccgaggacaactccacacagtggtttcataatgagtccctcatcagctctcaggccagctcttatttcattgatgccgctacagtggacgactccggcgagtatcggtgtcagaccaatctgtctacactgtctgaccccgtgcagcttgaggtccacattggatggttgctcttgcaagccccacgctgggttttcaaagaggaagatccaatccatctgcggtgccacagctggaaaaacaccgctctccacaaagtcacatacctgcaaaatggcaaaggacgcaaatacttccatcacaattccgatttttacattccgaaggctaccctgaaagacagcggcagctatttctgccggggactcgtcggctccaagaatgtgtcctccgaaaccgtgaatatcacgattacccaaggactggctgtgcctacaatctctagcttctttccgcctggataccaagtctccttctgtcttgtgatggtcctcctgtttgctgtggacacaggactgtacttttccgtg

SEQ ID NO: 1663 - DNA, 1629 bp, synthetic construct
  source 1..1629: mol_type = other DNA
atggccttaccagtgaccgccttgctcctgccgctggccttgctgctccacgccgccaggccgatggccttaccagtgaccgccttgctcctgccgctggccttgctgctccacgccgccaggccgctgttcaatcaagaggtgcagatccctctgaccgagagctactgtggcccctgtcctaagaactggatctgctacaagaacaactgctaccagttcttcgacgagagcaagaattggtacgagagccaggccagctgcatgagccagaatgccagcctgctgaaggtgtacagcaaagaggaccaggacctgctgaaactggtcaagagctaccactggatgggccttgtgcacatccccaccaatggctcttggcagtgggaggacggcagcattctgagccctaacctgctgaccatcatcgagatgcagaagggcgactgcgccctgtacgccagcagctttaagggctacatcgagaattgcagcaccccgaacacctacatctgtatgcagagaaccgttggcggaggcggaagtggaggcggaggatctggcggcggaggctctgacctctttaatcaagaagtccagattccactcaccgaatcctactgcggaccttgtccaaaaaattggatttgttataagaacaactgttatcaattctttgatgagtctaaaaattggtatgagtcccaggcttcctgcatgtctcagaacgcttctctgctgaaagtctactctaaagaagatcaggatctcctgaagctcgtcaagtcttatcattggatggggctcgtccacattcctaccaacggaagctggcaatgggaagatggctccatcctgtctccaaatctgctcacgattattgaaatgcagaaaggggattgtgctctctacgccagctccttcaagggatatattgagaactgtagcacgcccaatacttatatctgtatgcaacggaccgtgacgcgtggaatgaggactgaggatcttcccaaagctgtcgtctttctcgaaccccaatggtatcgggtgctcgaaaaagactctgtgacactgaaatgccaaggggcctactctcccgaggacaactccacacagtggtttcataatgagtccctcatcagctctcaggccagctcttatttcattgatgccgctacagtggacgactccggcgagtatcggtgtcagaccaatctgtctacactgtctgaccccgtgcagcttgaggtccacattggatggttgctcttgcaagccccacgctgggttttcaaagaggaagatccaatccatctgcggtgccacagctggaaaaacaccgctctccacaaagtcacatacctgcaaaatggcaaaggacgcaaatacttccatcacaattccgatttttacattccgaaggctaccctgaaagacagcggcagctatttctgccggggactcgtcggctccaagaatgtgtcctccgaaaccgtgaatatcacgattacccaaggactggctgtgcctacaatctctagcttctttccgcctggataccaagtctccttctgtcttgtgatggtcctcctgtttgctgtggacacaggactgtacttttccgtg

SEQ ID NO: 1664 - DNA, 1269 bp, synthetic construct
  source 1..1269: mol_type = other DNA
atggccttaccagtgaccgccttgctcctgccgctggccttgctgctccacgccgccaggccgatggagctgactgatttgctcctggcggccatgcttcttgcagtggcaagactaactctgtccagccccgtagctcctgcctgtgaccccagactcctaaataaactgctgcgtgactcccacctccttcacagccgactgagtcagtgtcccgacgtggaccctttgtctatccctgttctgctgcctgctgtggactttagcctgggagaatggaaaacccagacggaacagagcaaggcacaggacattctaggggcagtgtcccttctactggagggagtgatggcagcacgaggacagttggaaccctcctgcctctcatccctcctgggacagctttctgggcaggttcgcctcctcttgggggccctgcagggcctcctaggaacccagcttcctctacagggcaggaccacagctcacaaggaccccaatgccctcttcttgagcttgcaacaactgcttcggggaaaggtgcgcttcctgcttctggtagaaggtcccaccctctgtgtcagacggaccctgccaaccacagctgtcccaagcagtacttctacgcgtggaatgaggactgaggatcttcccaaagctgtcgtctttctcgaaccccaatggtatcgggtgctcgaaaaagactctgtgacactgaaatgccaaggggcctactctcccgaggacaactccacacagtggtttcataatgagtccctcatcagctctcaggccagctcttatttcattgatgccgctacagtggacgactccggcgagtatcggtgtcagaccaatctgtctacactgtctgaccccgtgcagcttgaggtccacattggatggttgctcttgcaagccccacgctgggttttcaaagaggaagatccaatccatctgcggtgccacagctggaaaaacaccgctctccacaaagtcacatacctgcaaaatggcaaaggacgcaaatacttccatcacaattccgatttttacattccgaaggctaccctgaaagacagcggcagctatttctgccggggactcgtcggctccaagaatgtgtcctccgaaaccgtgaatatcacgattacccaaggactggctgtgcctacaatctctagcttctttccgcctggataccaagtctccttctgtcttgtgatggtcctcctgtttgctgtggacacaggactgtacttttccgtg

SEQ ID NO: 1665 - DNA, 867 bp, synthetic construct
  source 1..867: mol_type = other DNA
atggccttaccagtgaccgccttgctcctgccgctggccttgctgctccacgccgccaggccgatggaccccgacctggaaatcagagccgccttcctgcggcagagaaacacagccctgagaacagaggtggccgagctggaacaagaggtgcagcggctggaaaacgaggtgtcccagtacgagacaagatacggccctctcggaggcggaaaaacgcgtacgcgtggaatgaggactgaggatcttcccaaagctgtcgtctttctcgaaccccaatggtatcgggtgctcgaaaaagactctgtgacactgaaatgccaaggggcctactctcccgaggacaactccacacagtggtttcataatgagtccctcatcagctctcaggccagctcttatttcattgatgccgctacagtggacgactccggcgagtatcggtgtcagaccaatctgtctacactgtctgaccccgtgcagcttgaggtccacattggatggttgctcttgcaagccccacgctgggttttcaaagaggaagatccaatccatctgcggtgccacagctggaaaaacaccgctctccacaaagtcacatacctgcaaaatggcaaaggacgcaaatacttccatcacaattccgatttttacattccgaaggctaccctgaaagacagcggcagctatttctgccggggactcgtcggctccaagaatgtgtcctccgaaaccgtgaatatcacgattacccaaggactggctgtgcctacaatctctagcttctttccgcctggataccaagtctccttctgtcttgtgatggtcctcctgtttgctgtggacacaggactgtacttttccgtg

SEQ ID NO: 1666 - DNA, 792 bp, synthetic construct
  source 1..792: mol_type = other DNA
atggccttaccagtgaccgccttgctcctgccgctggccttgctgctccacgccgccaggccggaagttgctgccctcgagaaggaggtagcagctttggaaaaagaagtcgcagcccttgagaaagaagttgcggctctggagaagacgcgtggaatgaggactgaggatcttcccaaagctgtcgtctttctcgaaccccaatggtatcgggtgctcgaaaaagactctgtgacactgaaatgccaaggggcctactctcccgaggacaactccacacagtggtttcataatgagtccctcatcagctctcaggccagctcttatttcattgatgccgctacagtggacgactccggcgagtatcggtgtcagaccaatctgtctacactgtctgaccccgtgcagcttgaggtccacattggatggttgctcttgcaagccccacgctgggttttcaaagaggaagatccaatccatctgcggtgccacagctggaaaaacaccgctctccacaaagtcacatacctgcaaaatggcaaaggacgcaaatacttccatcacaattccgatttttacattccgaaggctaccctgaaagacagcggcagctatttctgccggggactcgtcggctccaagaatgtgtcctccgaaaccgtgaatatcacgattacccaaggactggctgtgcctacaatctctagcttctttccgcctggataccaagtctccttctgtcttgtgatggtcctcctgtttgctgtggacacaggactgtacttttccgtg

SEQ ID NO: 1667 - DNA, 1566 bp, synthetic construct
  source 1..1566: mol_type = other DNA
atggccttaccagtgaccgccttgctcctgccgctggccttgctgctccacgccgccaggccgctgttcaatcaagaggtgcagatccctctgaccgagagctactgtggcccctgtcctaagaactggatctgctacaagaacaactgctaccagttcttcgacgagagcaagaattggtacgagagccaggccagctgcatgagccagaatgccagcctgctgaaggtgtacagcaaagaggaccaggacctgctgaaactggtcaagagcgcccactggatgggccttgtgcacatccccaccaatggctcttggcagtgggaggacggcagcattctgagccctaacctgctgaccatcatcgagatgcagaagggcgactgcgccctgtacgccagcagctttaagggcttcatcgagaattgcagcaccccgaacacctacatctgtatgcagagaaccgttggcggaggcggaagtggaggcggaggatctggcggcggaggctctgacctctttaatcaagaagtccagattccactcaccgaatcctactgcggaccttgtccaaaaaattggatttgttataagaacaactgttatcaattctttgatgagtctaaaaattggtatgagtcccaggcttcctgcatgtctcagaacgcttctctgctgaaagtctactctaaagaagatcaggatctcctgaagctcgtcaagtctgcccattggatggggctcgtccacattcctaccaacggaagctggcaatgggaagatggctccatcctgtctccaaatctgctcacgattattgaaatgcagaaaggggattgtgctctctacgccagctccttcaagggatttattgagaactgtagcacgcccaatacttatatctgtatgcaacggaccgtgacgcgtggaatgaggactgaggatcttcccaaagctgtcgtctttctcgaaccccaatggtatcgggtgctcgaaaaagactctgtgacactgaaatgccaaggggcctactctcccgaggacaactccacacagtggtttcataatgagtccctcatcagctctcaggccagctcttatttcattgatgccgctacagtggacgactccggcgagtatcggtgtcagaccaatctgtctacactgtctgaccccgtgcagcttgaggtccacattggatggttgctcttgcaagccccacgctgggttttcaaagaggaagatccaatccatctgcggtgccacagctggaaaaacaccgctctccacaaagtcacatacctgcaaaatggcaaaggacgcaaatacttccatcacaattccgatttttacattccgaaggctaccctgaaagacagcggcagctatttctgccggggactcgtcggctccaagaatgtgtcctccgaaaccgtgaatatcacgattacccaaggactggctgtgcctacaatctctagcttctttccgcctggataccaagtctccttctgtcttgtgatggtcctcctgtttgctgtggacacaggactgtacttttccgtg

SEQ ID NO: 1668 - DNA, 1566 bp, synthetic construct
  source 1..1566: mol_type = other DNA
atggccttaccagtgaccgccttgctcctgccgctggccttgctgctccacgccgccaggccgctgttcaatcaagaggtgcagatccctctgaccgagagctactgtggcccctgtcctaagaactggatctgctacaagaacaactgctaccagttcttcgacgagagcaagaattggtacgagagccaggccagctgcatgagccagaatgccagcctgctgaaggtgtacagcaaagaggaccaggacctgctgaaactggtcaagagcgcccactggatgggccttgtgcacatccccaccaatggctcttggcagtgggaggacggcagcattctgagccctaacctgctgaccatcatcgagatgcagaagggcgactgcgccctgtacgccagcagctttaagggctacatcgagaattgcagcaccccgaacacctacatctgtatgcagagaaccgtttctggcggaggcggctctggaggaggcggaagtggcggcggaggcgacctctttaatcaagaagtccagattccactcaccgaatcctactgcggaccttgtccaaaaaattggatttgttataagaacaactgttatcaattctttgatgagtctaaaaattggtatgagtcccaggcttcctgcatgtctcagaacgcttctctgctgaaagtctactctaaagaagatcaggatctcctgaagctcgtcaagtctgcccattggatggggctcgtccacattcctaccaacggaagctggcaatgggaagatggctccatcctgtctccaaatctgctcacgattattgaaatgcagaaaggggattgtgctctctacgccagctccttcaagggatatattgagaactgtagcacgcccaatacttatatctgtatgcaacggaccgtgacgcgtggaatgaggactgaggatcttcccaaagctgtcgtctttctcgaaccccaatggtatcgggtgctcgaaaaagactctgtgacactgaaatgccaaggggcctactctcccgaggacaactccacacagtggtttcataatgagtccctcatcagctctcaggccagctcttatttcattgatgccgctacagtggacgactccggcgagtatcggtgtcagaccaatctgtctacactgtctgaccccgtgcagcttgaggtccacattggatggttgctcttgcaagccccacgctgggttttcaaagaggaagatccaatccatctgcggtgccacagctggaaaaacaccgctctccacaaagtcacatacctgcaaaatggcaaaggacgcaaatacttccatcacaattccgatttttacattccgaaggctaccctgaaagacagcggcagctatttctgccggggactcgtcggctccaagaatgtgtcctccgaaaccgtgaatatcacgattacccaaggactggctgtgcctacaatctctagcttctttccgcctggataccaagtctccttctgtcttgtgatggtcctcctgtttgctgtggacacaggactgtacttttccgtg

SEQ ID NO: 1669 - DNA, 2124 bp, synthetic construct
  source 1..2124: mol_type = other DNA
atggccttaccagtgaccgccttgctcctgccgctggccttgctgctccacgccgccaggccggacatccagatgacacagagccctagcagcctgtctgccagcgtgggagacagagtgaccatcacatgcaaggccagccaggatgtgggcacagccgtggattggtatcagcagaagcctggcaaggcccctaagctgctgatctactgggccagcacaagacacacaggcgtgcccagcagattttctggcagcggctctggcaccgacttcaccctgacaatatccagcctccagcctgaggacttcgccacctactactgccagcagtacaacagctaccctctgaccttcggccagggcaccaaggtggaaatcaaaagactcgaggacctgaagaacgtgttcccacctgaggtggccgtgttcgagcctagcgaggccgagatcagccacacccagaaagccaccctcgtgtgcctggctaccggcttctaccccgaccatgtggaactgtcttggtgggtcaacggcaaagaggtgcacagcggcgtgtctaccgacccccagccactgaaagaacagcccgccctgaacgacagccggtactgcctgagcagcagactgagagtgtccgccaccttctggcagaacccccggaaccacttcagatgccaggtgcagttctacggcctgagcgagaacgacgagtggacccaggacagagccaagcccgtgacccagatcgtgtctgccgaagcctggggcagagccgattgcggatcccagagcttcggcctgctggaccccaagctgtgctacctgctggatggcatcctgttcatctacggcgtgatcctgaccgccctgttcctgagagtgaagttcagcagaagcgccgacgcccctgcctaccagcagggacagaaccaactgtacaacgagctgaacctgggcagacgggaagagtacgacgtgctggacaagcggagaggcagggaccctgagatgggcggaaagccccagcggagaaagaacccccaggaaggactgtataacgaactccagaaagacaagatggccgaagcctacagcgagatcggcatgaagggcgagcggagaagaggcaagggccacgatggcctgtaccagggcctgagcaccgccaccaaggacacctatgacgccctgcacatgcaggccctgcctccaagaagggccaagcgatctggatctggagcaacaaacttctcactactcaaacaagcaggtgacgtggaggagaatcccgggcctactagtatggactggatttggcgcatccttttccttgtcggcgctgctaccggcgcgcattccttcgaagtgcagctggttgaatcaggtggcggcctggttcaacctggcggatctctgagactgagctgtgccgccagcggctacacctttaccgagtacacaatccactgggtccgacaggcccctggcaaaggacttgagtgggtcgccaacatcaaccccaacaatggcggcaccacctacaaccagaagttcgaggacagattcaccatcagccgggacaacagcaagaacaccctgtacctccagatgaactccctgagagccgaggacaccgccgtgtactattgtgccagaggctggaacttcgactactggggccagggaacactggtcaccgttagctctacgcgtatccagaaccctgatcctgccgtgtaccagctgcgggatagcaagagcagcgacaagagcgtgtgtctgttcaccgacttcgacagccagaccaacgtgtcccagagcaaggactccgacgtgtacatcaccgataagaccgtgctggacatgcggagcatggacttcaagagcaactccgccgtggcctggtccaacaagtccgatttcgcctgcgccaacgccttcaacaacagcattatccccgaggacacattcttcccaagccccgagagcagctgcggtaccattacccaaggactggctgtgcctacaatctctagcttctttccgcctggataccaagtctccttctgtcttgtgatggtcctcctgtttgctgtggacacaggactgtacttttccgtg

SEQ ID NO: 1670 - DNA, 1899 bp, synthetic construct
  source 1..1899: mol_type = other DNA
atggccttaccagtgaccgccttgctcctgccgctggccttgctgctccacgccgccaggccggacatccagatgacacagagccctagcagcctgtctgccagcgtgggagacagagtgaccatcacatgcaaggccagccaggatgtgggcacagccgtggattggtatcagcagaagcctggcaaggcccctaagctgctgatctactgggccagcacaagacacacaggcgtgcccagcagattttctggcagcggctctggcaccgacttcaccctgacaatatccagcctccagcctgaggacttcgccacctactactgccagcagtacaacagctaccctctgaccttcggccagggcaccaaggtggaaatcaaaagactcgaggacctgaagaacgtgttcccacctgaggtggccgtgttcgagcctagcgaggccgagatcagccacacccagaaagccaccctcgtgtgcctggctaccggcttctaccccgaccatgtggaactgtcttggtgggtcaacggcaaagaggtgcacagcggcgtgtctaccgacccccagccactgaaagaacagcccgccctgaacgacagccggtactgcctgagcagcagactgagagtgtccgccaccttctggcagaacccccggaaccacttcagatgccaggtgcagttctacggcctgagcgagaacgacgagtggacccaggacagagccaagcccgtgacccagatcgtgtctgccgaagcctggggcagagccgattgcggatccctgggagagcctcagctgtgctatatcctggacgccatcctgtttctgtacggcatcgtgctgaccctgctgtactgccggctgaagatccaagtgcggaaggccgccatcaccagctacgagaaatccgacggcgtgtacaccggcctgagcaccagaaatcaagagacatacgagacactgaagcacgaaaagcctccacaaagggccaagcgatctggatctggagcaacaaacttctcactactcaaacaagcaggtgacgtggaggagaatcccgggcctactagtatggactggatttggcgcatccttttccttgtcggcgctgctaccggcgcgcattccttcgaagtgcagctggttgaatcaggtggcggcctggttcaacctggcggatctctgagactgagctgtgccgccagcggctacacctttaccgagtacacaatccactgggtccgacaggcccctggcaaaggacttgagtgggtcgccaacatcaaccccaacaatggcggcaccacctacaaccagaagttcgaggacagattcaccatcagccgggacaacagcaagaacaccctgtacctccagatgaactccctgagagccgaggacaccgccgtgtactattgtgccagaggctggaacttcgactactggggccagggaacactggtcaccgttagctctacgcgtatccagaaccctgatcctgccgtgtaccagctgcgggatagcaagagcagcgacaagagcgtgtgtctgttcaccgacttcgacagccagaccaacgtgtcccagagcaaggactccgacgtgtacatcaccgataagaccgtgctggacatgcggagcatggacttcaagagcaactccgccgtggcctggtccaacaagtccgatttcgcctgcgccaacgccttcaacaacagcattatccccgaggacacattcttcccaagccccgagagcagctgcggtaccattacccaaggactggctgtgcctacaatctctagcttctttccgcctggataccaagtctccttctgtcttgtgatggtcctcctgtttgctgtggacacaggactgtacttttccgtg

SEQ ID NO: 1671 - DNA, 1827 bp, synthetic construct
  source 1..1827: mol_type = other DNA
atggccttaccagtgaccgccttgctcctgccgctggccttgctgctccacgccgccaggccggacatccagatgacacagagccctagcagcctgtctgccagcgtgggagacagagtgaccatcacatgcaaggccagccaggatgtgggcacagccgtggattggtatcagcagaagcctggcaaggcccctaagctgctgatctactgggccagcacaagacacacaggcgtgcccagcagattttctggcagcggctctggcaccgacttcaccctgacaatatccagcctccagcctgaggacttcgccacctactactgccagcagtacaacagctaccctctgaccttcggccagggcaccaaggtggaaatcaaaagactcgagggacagcctaaggccaatcctaccgtgacactgttccctccaagcagcgaagaactccaggccaacaaggccacacttgtgtgcctgatctccgacttctaccctggggctgtgacagtggcttggaaggccgatggatctcctgtgaaagccggcgtggaaaccaccaagccatccaagcagagcaacaacaaatacgccgccagctcctacctgagcctgacacctgagcagtggaagtcccacagatcctacagctgccaagtgacccacgaaggcagcaccgtggaaaagacagtggcccctacagagtgcagcggatccctgggagagcctcagctgtgctatatcctggacgccatcctgtttctgtacggcatcgtgctgaccctgctgtactgccggctgaagatccaagtgcggaaggccgccatcaccagctacgagaaatccgacggcgtgtacaccggcctgagcaccagaaatcaagagacatacgagacactgaagcacgaaaagcctccacaaagggccaagcgatctggatctggagcaacaaacttctcactactcaaacaagcaggtgacgtggaggagaatcccgggcctactagtatggactggatttggcgcatccttttccttgtcggcgctgctaccggcgcgcattccttcgaagtgcagctggttgaatcaggtggcggcctggttcaacctggcggatctctgagactgagctgtgccgccagcggctacacctttaccgagtacacaatccactgggtccgacaggcccctggcaaaggacttgagtgggtcgccaacatcaaccccaacaatggcggcaccacctacaaccagaagttcgaggacagattcaccatcagccgggacaacagcaagaacaccctgtacctccagatgaactccctgagagccgaggacaccgccgtgtactattgtgccagaggctggaacttcgactactggggccagggaacactggtcaccgttagctctacgcgtatccagaaccctgatcctgccgtgtaccagctgcgggatagcaagagcagcgacaagagcgtgtgtctgttcaccgacttcgacagccagaccaacgtgtcccagagcaaggactccgacgtgtacatcaccgataagaccgtgctggacatgcggagcatggacttcaagagcaactccgccgtggcctggtccaacaagtccgatttcgcctgcgccaacgccttcaacaacagcattatccccgaggacacattcttcccaagccccgagagcagctgcggtaccattacccaaggactggctgtgcctacaatctctagcttctttccgcctggataccaagtctccttctgtcttgtgatggtcctcctgtttgctgtggacacaggactgtacttttccgtg

SEQ ID NO: 1672 - DNA, 1854 bp, synthetic construct
  source 1..1854: mol_type = other DNA
atggccttaccagtgaccgccttgctcctgccgctggccttgctgctccacgccgccaggccggacatccagatgacacagagccctagcagcctgtctgccagcgtgggagacagagtgaccatcacatgcaaggccagccaggatgtgggcacagccgtggattggtatcagcagaagcctggcaaggcccctaagctgctgatctactgggccagcacaagacacacaggcgtgcccagcagattttctggcagcggctctggcaccgacttcaccctgacaatatccagcctccagcctgaggacttcgccacctactactgccagcagtacaacagctaccctctgaccttcggccagggcaccaaggtggaaatcaaaagactcgagggacagcctaaggccaatcctaccgtgacactgttccctccaagcagcgaagaactccaggccaacaaggccacacttgtgtgcctgatctccgacttctaccctggggctgtgacagtggcttggaaggccgatggatctcctgtgaaagccggcgtggaaaccaccaagccatccaagcagagcaacaacaaatacgccgccagctcctacctgagcctgacacctgagcagtggaagtcccacagatcctacagctgccaagtgacccacgaaggcagcaccgtggaaaagacagtggcccctacagagtgcagcggatccctgggagagcctcagctgtgctatatcctggacgccatcctgtttctgtacggcatcgtgctgaccctgctgtactgccggctgaagatccaagtgcggaaggccgccatcaccagctacgagaaatccgacggcgtgtacaccggcctgagcaccagaaatcaagagacatacgagacactgaagcacgaaaagcctccacaaagggccaagcgatctggatctggagcaacaaacttctcactactcaaacaagcaggtgacgtggaggagaatcccgggcctactagtatggactggatttggcgcatccttttccttgtcggcgctgctaccggcgcgcattccttcgaagtgcagctggttgaatcaggtggcggcctggttcaacctggcggatctctgagactgagctgtgccgccagcggctacacctttaccgagtacacaatccactgggtccgacaggcccctggcaaaggacttgagtgggtcgccaacatcaaccccaacaatggcggcaccacctacaaccagaagttcgaggacagattcaccatcagccgggacaacagcaagaacaccctgtacctccagatgaactccctgagagccgaggacaccgccgtgtactattgtgccagaggctggaacttcgactactggggccagggaacactggtcaccgttagctctacgcgtgcctctacaaagggaccctccgtgtttcctctggctcccagcagcaagtctacaagcggaggaacagccgctctgggctgcctggtcaaggattactttcccgagcctgtgaccgtgtcctggaatagcggagcactgacaagcggcgtgcacacctttccagccgtgctgcaaagcagcggcctgtactctctgagcagcgtggtcacagtgcctagctctagcctgggcacccagacctacatctgcaatgtgaaccacaagcctagcaacaccaaggtggacaagagagtggaacccaagagctgtggtaccattacccaaggactggctgtgcctacaatctctagcttctttccgcctggataccaagtctccttctgtcttgtgatggtcctcctgtttgctgtggacacaggactgtacttttccgtg

SEQ ID NO: 1673 - DNA, 1458 bp, synthetic construct
  source 1..1458: mol_type = other DNA
atggccttaccagtgaccgccttgctcctgccgctggccttgctgctccacgccgccaggccggacgtgcagatgatccagacccccgatagcctggccgtgtccctgggacagagagccaccatctcttgcagagccagcgagagcgtggacaactacggcatcagcttcatgcactggtatcagcagaagcccggccagagccccaagctgctgatctacagagcctccaacctggaaagcggcatccccgccagattttccggcagcggcagcagaaccgacttcaccctgaccatcaaccccgtggaaaccgacgacgtggcaacctactactgccagcagaacaacaaggacccccccacctttggcggaggcaccaagctggaaatcaagggcggaggcggaagtggaggcggaggatctggcggcggaggctctgggggaggcggctctcaggtgcaactccagcagtctggcgctgagcttgtgaagcctggggccagcgtgaagattagctgcaaggccagcggctacgccttcagcagctactggatgaactgggtcaagcagcggcctggcaagggcctggaatggatcggccaaatctaccccggcgacggcgacaccacctacaacggcaagttcaagggcaaggccaccctgacagccgacaagagcagcagcaccgtgtacatgcaactgaacagcctgaccagcgaggacagcgccgtgtacttctgcgtgcggtactactacggcagctccggctacttcgactattggggccagggcaccacactgaccgtgtcctctacgcgtggaatgaggactgaggatcttcccaaagctgtcgtctttctcgaaccccaatggtatcgggtgctcgaaaaagactctgtgacactgaaatgccaaggggcctactctcccgaggacaactccacacagtggtttcataatgagtccctcatcagctctcaggccagctcttatttcattgatgccgctacagtggacgactccggcgagtatcggtgtcagaccaatctgtctacactgtctgaccccgtgcagcttgaggtccacattggatggttgctcttgcaagccccacgctgggttttcaaagaggaagatccaatccatctgcggtgccacagctggaaaaacaccgctctccacaaagtcacatacctgcaaaatggcaaaggacgcaaatacttccatcacaattccgatttttacattccgaaggctaccctgaaagacagcggcagctatttctgccggggactcgtcggctccaagaatgtgtcctccgaaaccgtgaatatcacgattacccaaggactggctgtgcctacaatctctagcttctttccgcctggataccaagtctccttctgtcttgtgatggtcctcctgtttgctgtggacacaggactgtacttttcc

SEQ ID NO: 1674 - DNA, 1431 bp, synthetic construct
  source 1..1431: mol_type = other DNA
atggccttaccagtgaccgccttgctcctgccgctggccttgctgctccacgccgccaggccggacgtgcagatgatccagacccccagcagcctgtctgccagcctgggcgatagagtgaccatcagctgtcgggccagccaggacatcggcaactacctgaactggtatcagcagaaacccgacggcaccgtgaagctgctgatctactacaccagcagactgcacagcggcgtgcccagcagattttctggcagcggctctggcaccgagtacagcctgaccatctccaacctggaacaggaagatattgctacctacttctgtcagcaaggcagcgccctgccccctacatttggcggcggaacaaagctggaaatcaacggcggaggcggaagtggaggcggaggatctggcggcggaggctctgctctccagctccagcagtctggcgcagaactcgtgcggcctggcgcttctgtgaccctgagctgtaaagccagcggctacaccttcaccgactacgagatgcactgggtcaagcagacccctgtgcacggcctggaatggatcggagccatcgaccctgagacaggcggcaccgcctacaaccagaagttcgagggcaaggccatcctgaccgccgacaagagcagcagcacagcctacatggaactgcggagcctgacctccgaggacagccccgtgtactactgtgccagacggcggtactacggcagcagctccttcgactattggggccagggcaccaccctgaccgtgtctagtacgcgtggaatgaggactgaggatcttcccaaagctgtcgtctttctcgaaccccaatggtatcgggtgctcgaaaaagactctgtgacactgaaatgccaaggggcctactctcccgaggacaactccacacagtggtttcataatgagtccctcatcagctctcaggccagctcttatttcattgatgccgctacagtggacgactccggcgagtatcggtgtcagaccaatctgtctacactgtctgaccccgtgcagcttgaggtccacattggatggttgctcttgcaagccccacgctgggttttcaaagaggaagatccaatccatctgcggtgccacagctggaaaaacaccgctctccacaaagtcacatacctgcaaaatggcaaaggacgcaaatacttccatcacaattccgatttttacattccgaaggctaccctgaaagacagcggcagctatttctgccggggactcgtcggctccaagaatgtgtcctccgaaaccgtgaatatcacgattacccaaggactggctgtgcctacaatctctagcttctttccgcctggataccaagtctccttctgtcttgtgatggtcctcctgtttgctgtggacacaggactgtacttttcc

SEQ ID NO: 1675 - DNA, 1437 bp, synthetic construct
  source 1..1437: mol_type = other DNA
atggccttaccagtgaccgccttgctcctgccgctggccttgctgctccacgccgccaggccggacatcgtgctgacacagagccctgccaccctgtctctgagccctggcgatagagccaccatcagctgtagagccagcgagagcgtgaccatcctgggcagccacctgatctactggtatcagcagaagcccggccagccccccagactgctgattcagctggcctccaatgtgcagaccggcgtgccagccagattttccggcagcggcagcagaaccgacttcaccctgaccatcagcagcgtggaacccgaggacttcgccgtgtactactgcctccagagccggaccatccccagaacattcggccagggcaccaagctggaaatcaagagaggcggaggcggaagtggaggcggaggatctggcggcggaggctctcaggtgcagctggtgcagtctggccccgaagtgaagaaacccggcgagtccgtgaagatcagctgcaaggccagcggctacaccttccggcactacagcatgaactgggtcaagcaggccccaggccagggcctgaagtggatgggcagaatcaacaccgagagcggcgtgcccatctacgccgacgacttcaagggccggttcagcttcaccgtggacaccagcgccagcaccgcctacctggaaatctccagcctgaccagcgaggataccgccgtgtatttctgctccaacgactacctgtacagcctggatttctggggccagggaaccaccctgacagtgtcctctacgcgtggaatgaggactgaggatcttcccaaagctgtcgtctttctcgaaccccaatggtatcgggtgctcgaaaaagactctgtgacactgaaatgccaaggggcctactctcccgaggacaactccacacagtggtttcataatgagtccctcatcagctctcaggccagctcttatttcattgatgccgctacagtggacgactccggcgagtatcggtgtcagaccaatctgtctacactgtctgaccccgtgcagcttgaggtccacattggatggttgctcttgcaagccccacgctgggttttcaaagaggaagatccaatccatctgcggtgccacagctggaaaaacaccgctctccacaaagtcacatacctgcaaaatggcaaaggacgcaaatacttccatcacaattccgatttttacattccgaaggctaccctgaaagacagcggcagctatttctgccggggactcgtcggctccaagaatgtgtcctccgaaaccgtgaatatcacgattacccaaggactggctgtgcctacaatctctagcttctttccgcctggataccaagtctccttctgtcttgtgatggtcctcctgtttgctgtggacacaggactgtacttttcc

SEQ ID NO: 1676 - DNA, 1437 bp, synthetic construct
  source 1..1437: mol_type = other DNA
atggccttaccagtgaccgccttgctcctgccgctggccttgctgctccacgccgccaggccggacatccagatgacccagagccctagctcactgagcgccagcgtgggcgacagggtgaccattacctgctccgccagccaggacatcagcaactacctgaactggtaccagcagaagcccggcaaggcccccaagctgctgatctactacacctccaacctgcactccggcgtgcccagcaggttcagcggaagcggcagcggcaccgatttcaccctgaccatctccagcctgcagcccgaggacttcgccacctactactgccagcagtacaggaagctcccctggactttcggccagggcaccaaactggagatcaagcgtggcggaggcggaagtggaggcggaggatctggcggcggaggctctcaggtgcagctggtccagagcggcgccgaagtgaagaagcccggcagctccgtgaaagtgagctgcaaggccagcggcggcaccttcagcaactactggatgcactgggtgaggcaggcccccggacagggcctggagtggatgggcgccacctacaggggccacagcgacacctactacaaccagaagttcaagggccgggtgaccatcaccgccgacaagagcaccagcaccgcctacatggaactgagcagcctcaggagcgaggacaccgctgtgtattactgcgccaggggcgccatctacgacggctacgacgtgctggacaactggggccagggcacactggtgaccgtgtccagcacgcgtggaatgaggactgaggatcttcccaaagctgtcgtctttctcgaaccccaatggtatcgggtgctcgaaaaagactctgtgacactgaaatgccaaggggcctactctcccgaggacaactccacacagtggtttcataatgagtccctcatcagctctcaggccagctcttatttcattgatgccgctacagtggacgactccggcgagtatcggtgtcagaccaatctgtctacactgtctgaccccgtgcagcttgaggtccacattggatggttgctcttgcaagccccacgctgggttttcaaagaggaagatccaatccatctgcggtgccacagctggaaaaacaccgctctccacaaagtcacatacctgcaaaatggcaaaggacgcaaatacttccatcacaattccgatttttacattccgaaggctaccctgaaagacagcggcagctatttctgccggggactcgtcggctccaagaatgtgtcctccgaaaccgtgaatatcacgattacccaaggactggctgtgcctacaatctctagcttctttccgcctggataccaagtctccttctgtcttgtgatggtcctcctgtttgctgtggacacaggactgtacttttcc

SEQ ID NO: 1677 - DNA, 1452 bp, synthetic construct
  source 1..1452: mol_type = other DNA
atggccttaccagtgaccgccttgctcctgccgctggccttgctgctccacgccgccaggccggacatcgtgatgacccagagccccgatagcctggccgtgtctctgggagagagagccaccatcaactgcgagagcagccagagcctgctgaacagcggcaaccagaagaactacctgacctggtatcagcagaagcccggccagccccccaagcccctgatctattgggccagcaccagagaaagcggcgtgcccgatagattcagcggcagcggaagcggcaccgacttcaccctgaccatcagttctcttcaggccgaggacgtggccgtgtactactgccagaacgactacagctacccctacaccttcggccagggcaccaagctggaaatcaagagaggcggaggcggaagtggaggcggaggatctggcggcggaggctctgaagtgcagctggtgcagtctggggccgaagtgaagaagcctggcgagagcctgaagatcagctgcaagggcagcggctacagcttcaccgactactacatgaagtgggccagacagatgcccggcaagggcctggaatggatgggcgacatcatccccagcaacggggccaccttctacaaccagaaattcaagggccaagtgaccatctccgccgacaagagcatcagcaccacctacctccagtggtccagcctgaaggccagcgacaccgccatgtactattgcgccagaagccatctgctgcgggccagttggttcgcctattggggccagggaacaatggtcacagtgtccagcacgcgtggaatgaggactgaggatcttcccaaagctgtcgtctttctcgaaccccaatggtatcgggtgctcgaaaaagactctgtgacactgaaatgccaaggggcctactctcccgaggacaactccacacagtggtttcataatgagtccctcatcagctctcaggccagctcttatttcattgatgccgctacagtggacgactccggcgagtatcggtgtcagaccaatctgtctacactgtctgaccccgtgcagcttgaggtccacattggatggttgctcttgcaagccccacgctgggttttcaaagaggaagatccaatccatctgcggtgccacagctggaaaaacaccgctctccacaaagtcacatacctgcaaaatggcaaaggacgcaaatacttccatcacaattccgatttttacattccgaaggctaccctgaaagacagcggcagctatttctgccggggactcgtcggctccaagaatgtgtcctccgaaaccgtgaatatcacgattacccaaggactggctgtgcctacaatctctagcttctttccgcctggataccaagtctccttctgtcttgtgatggtcctcctgtttgctgtggacacaggactgtacttttcc

SEQ ID NO: 1678 - DNA, 1437 bp, synthetic construct
  source 1..1437: mol_type = other DNA
atggccttaccagtgaccgccttgctcctgccgctggccttgctgctccacgccgccaggccggacatccagatgacccagtctaccagttccctgagtgcatccctcggagacagggtgacgatcagttgcagcgcaagccaagggatcaataactatctgaactggtatcagcagaaaccggacggaacagtcgaactcctgatttattacaccagcacccttcagagtggcgtcccttcccggttcagtggctccggaagcgggaccgattactccctgaccatttctaatctggagccagaggacataggaacgtattattgccagcagtatagtaaactgccacgaacttttggaggggggacgaaactggagatcaaaggcggaggcggaagtggaggcggaggatctggcggcggaggctctcaggtgcaactccagcagtccggaagcgagcttatgatgccaggggcatcagtgaagatcagctgcaaggctactggctacaccttctctaattactggatagagtgggttaaacaaaggccagggcacggcctggaatggatcggcgagatcctgcctgggacaggccgaaccatttataacgagaagttcaaaggcaaggctactttcaccgcagatataagctctaatacagtgcaaatgcagctctcttccctgacaagtgaggatagtgccgtgtattattgcgcacgaagagattactatggaaatttttattacgctatggattattggggtcaaggaacaagtgtgaccgttagcagcacgcgtggaatgaggactgaggatcttcccaaagctgtcgtctttctcgaaccccaatggtatcgggtgctcgaaaaagactctgtgacactgaaatgccaaggggcctactctcccgaggacaactccacacagtggtttcataatgagtccctcatcagctctcaggccagctcttatttcattgatgccgctacagtggacgactccggcgagtatcggtgtcagaccaatctgtctacactgtctgaccccgtgcagcttgaggtccacattggatggttgctcttgcaagccccacgctgggttttcaaagaggaagatccaatccatctgcggtgccacagctggaaaaacaccgctctccacaaagtcacatacctgcaaaatggcaaaggacgcaaatacttccatcacaattccgatttttacattccgaaggctaccctgaaagacagcggcagctatttctgccggggactcgtcggctccaagaatgtgtcctccgaaaccgtgaatatcacgattacccaaggactggctgtgcctacaatctctagcttctttccgcctggataccaagtctccttctgtcttgtgatggtcctcctgtttgctgtggacacaggactgtacttttcc

SEQ ID NO: 1679 - DNA, 1422 bp, synthetic construct
  source 1..1422: mol_type = other DNA
atggccttaccagtgaccgccttgctcctgccgctggccttgctgctccacgccgccaggccggacatccagatgacccagagccctgccagcctgtccgtgtctgtgggcgagacagtgaccatcacctgtcgggccagcgagaacatctacagcaacctggcctggtatcagcagaagcagggcaagagcccccaactgctggtgtacgccgccaccaatctggccgatggcgtgcccagcagattttccggctctggcagcggcacccagtacagcctgaagatcaacagcctccagagcgaggacttcggcagctactactgccagcacttctggggcacctggacctttggaggaggcaccaccctggaaatcaagggcggaggcggaagtggaggcggaggatctggcggcggaggctctgaagtgcaactccagcagagcggccctgagcttgtgaagcctggcgcttccgtgaagatgagctgcaaggccagcggctacaccttcaccgactactacatgaagtggatgaagcagagccacggcaagtccctggaatggatcggcgacatcaaccccaacaacggcggcaccacctacaaccagaagttcaagggcaaggccaccctgaccgtggacaagagcagcagcaccgcctacatgcaactgaacagcctgaccagcgaggacagcgccgtgtactactgcgccagagactacggctacggctatttcgactactggggccagggcacaaccctgacagtgtcctctacgcgtggaatgaggactgaggatcttcccaaagctgtcgtctttctcgaaccccaatggtatcgggtgctcgaaaaagactctgtgacactgaaatgccaaggggcctactctcccgaggacaactccacacagtggtttcataatgagtccctcatcagctctcaggccagctcttatttcattgatgccgctacagtggacgactccggcgagtatcggtgtcagaccaatctgtctacactgtctgaccccgtgcagcttgaggtccacattggatggttgctcttgcaagccccacgctgggttttcaaagaggaagatccaatccatctgcggtgccacagctggaaaaacaccgctctccacaaagtcacatacctgcaaaatggcaaaggacgcaaatacttccatcacaattccgatttttacattccgaaggctaccctgaaagacagcggcagctatttctgccggggactcgtcggctccaagaatgtgtcctccgaaaccgtgaatatcacgattacccaaggactggctgtgcctacaatctctagcttctttccgcctggataccaagtctccttctgtcttgtgatggtcctcctgtttgctgtggacacaggactgtacttttcc

SEQ ID NO: 1680 - DNA, 1434 bp, synthetic construct
  source 1..1434: mol_type = other DNA
atggccttaccagtgaccgccttgctcctgccgctggccttgctgctccacgccgccaggccggacgagatcgtgctgacacagagccccgccaccctgtcactgtctccaggcgaaagagccaccctgagctgtagcgccagcagcagcgtgtcctacatgcactggtatcagcagaagcccggccaggcccccagactgctgatctacgataccagcaagctggcctccggcatccccgccagattttctggcagcggctccggcaccgacttcaccctgacaatcagcagcctggaacccgaggacgtggccgtgtactactgttttcaaggcagcgtgtaccccttcaccttcggccagggcaccaagctggaaatcaagagaggtggcggtggctcgggcggtggtgggtcgggtggcggcggatctcaggtgcagctccaggaatctggccctggcctcgtgaagcctagccagaccctgagcctgacctgtaccgtgtctggcggcagcatcagcacaagcggcatgggcgtgggctggatcagacagcaccctggcaagggcctggaatggatcggccacatttggtgggacgacgacaagcggtacaaccccgccctgaagtccagagtgaccatcagcgtggacaccagcaagaaccagttcagcctgaagctgagcagcgtgacagccgccgataccgccgtgtattattgcgcccggatggaactgtggtcctactacttcgactactggggccagggaaccctcgtgaccgtgtctagtacgcgtggaatgaggactgaggatcttcccaaagctgtcgtctttctcgaaccccaatggtatcgggtgctcgaaaaagactctgtgacactgaaatgccaaggggcctactctcccgaggacaactccacacagtggtttcataatgagtccctcatcagctctcaggccagctcttatttcattgatgccgctacagtggacgactccggcgagtatcggtgtcagaccaatctgtctacactgtctgaccccgtgcagcttgaggtccacattggatggttgctcttgcaagccccacgctgggttttcaaagaggaagatccaatccatctgcggtgccacagctggaaaaacaccgctctccacaaagtcacatacctgcaaaatggcaaaggacgcaaatacttccatcacaattccgatttttacattccgaaggctaccctgaaagacagcggcagctatttctgccggggactcgtcggctccaagaatgtgtcctccgaaaccgtgaatatcacgattacccaaggactggctgtgcctacaatctctagcttctttccgcctggataccaagtctccttctgtcttgtgatggtcctcctgtttgctgtggacacaggactgtacttttcc

SEQ ID NO: 1681 - DNA, 1431 bp, synthetic construct
  source 1..1431: mol_type = other DNA
atggccttaccagtgaccgccttgctcctgccgctggccttgctgctccacgccgccaggccggacatccagatgacacagactacatcctccctgtctgcctctctgggagacagagtcaccatcagttgcagggcaagtcaggacattagtaaatatttaaattggtatcagcagaaaccagatggaactgttaaactcctgatctaccatacatcaagattacactcaggagtcccatcaaggttcagtggcagtgggtctggaacagattattctctcaccattagcaacctggagcaagaagatattgccacttacttttgccaacagggtaatacgcttccgtacacgttcggaggggggaccaagctggagatcacaggtggcggtggctcgggcggtggtgggtcgggtggcggcggatctgaggtgaaactgcaggagtcaggacctggcctggtggcgccctcacagagcctgtccgtcacatgcactgtctcaggggtctcattacccgactatggtgtaagctggattcgccagcctccacgaaagggtctggagtggctgggagtaatatggggtagtgaaaccacatactataattcagctctcaaatccagactgaccatcatcaaggacaactccaagagccaagttttcttaaaaatgaacagtctgcaaactgatgacacagccatttactactgtgccaaacattattactacggtggtagctatgctatggactactggggtcaaggaacctcagtcaccgtctcctcaacgcgtggaatgaggactgaggatcttcccaaagctgtcgtctttctcgaaccccaatggtatcgggtgctcgaaaaagactctgtgacactgaaatgccaaggggcctactctcccgaggacaactccacacagtggtttcataatgagtccctcatcagctctcaggccagctcttatttcattgatgccgctacagtggacgactccggcgagtatcggtgtcagaccaatctgtctacactgtctgaccccgtgcagcttgaggtccacattggatggttgctcttgcaagccccacgctgggttttcaaagaggaagatccaatccatctgcggtgccacagctggaaaaacaccgctctccacaaagtcacatacctgcaaaatggcaaaggacgcaaatacttccatcacaattccgatttttacattccgaaggctaccctgaaagacagcggcagctatttctgccggggactcgtcggctccaagaatgtgtcctccgaaaccgtgaatatcacgattacccaaggactggctgtgcctacaatctctagcttctttccgcctggataccaagtctccttctgtcttgtgatggtcctcctgtttgctgtggacacaggactgtacttttcc

SEQ ID NO: 1682 - DNA, 1431 bp, synthetic construct
  source 1..1431: mol_type = other DNA
atggccttaccagtgaccgccttgctcctgccgctggccttgctgctccacgccgccaggccggagatcgtgatgacccagagccctgccaccctgtctctgagccctggcgaaagagccaccctgagctgtagagccagccaggacatcagcaagtacctgaactggtatcagcagaagcccggccaggcccccagactgctgatctaccacaccagcagactgcacagcggcatccccgccagattttctggctctggcagcggcaccgactacaccctgacaatcagcagcctccagcccgaggacttcgccgtgtacttctgtcagcaaggcaacaccctgccctacaccttcggccagggcaccaagctggaaatcaagggcggaggcggaagtggaggcggaggatctggcggcggaggctctcaggtgcaactccaggaatctggccctggcctcgtgaagcccagcgagacactgagcctgacctgtaccgtgtccggcgtgtccctgcctgactatggcgtgtcctggatcagacagccccctggcaagggcctggaatggatcggagtgatttggggcagcgaaaccacctactacaacagctccctgaagtccagagtgaccatctccaaggacaactccaagaaccaggtgtccctgaagctgagcagcgtgacagccgccgacaccgccgtgtattactgcgccaagcactactactacggcggcagctacgctatggactactggggccagggaaccctcgtgaccgtgtctagtacgcgtggaatgaggactgaggatcttcccaaagctgtcgtctttctcgaaccccaatggtatcgggtgctcgaaaaagactctgtgacactgaaatgccaaggggcctactctcccgaggacaactccacacagtggtttcataatgagtccctcatcagctctcaggccagctcttatttcattgatgccgctacagtggacgactccggcgagtatcggtgtcagaccaatctgtctacactgtctgaccccgtgcagcttgaggtccacattggatggttgctcttgcaagccccacgctgggttttcaaagaggaagatccaatccatctgcggtgccacagctggaaaaacaccgctctccacaaagtcacatacctgcaaaatggcaaaggacgcaaatacttccatcacaattccgatttttacattccgaaggctaccctgaaagacagcggcagctatttctgccggggactcgtcggctccaagaatgtgtcctccgaaaccgtgaatatcacgattacccaaggactggctgtgcctacaatctctagcttctttccgcctggataccaagtctccttctgtcttgtgatggtcctcctgtttgctgtggacacaggactgtacttttcc

SEQ ID NO: 1683 - DNA, 1437 bp, synthetic construct
  source 1..1437: mol_type = other DNA
atggccttaccagtgaccgccttgctcctgccgctggccttgctgctccacgccgccaggccggagatcgtgctgacacagagccctgccaccctgtctctgagccctggcgaaagagccaccctgagctgtagagccagccagagcgtgtccagctacctggcctggtatcagcagaagcccggccaggctccccggctgctgatctacgatgccagcaatagagccaccggcatccccgccagattttccggctctggcagcggcaccgacttcaccctgaccatcagctccctggaacccgaggacttcgccgtgtactactgccagcagcggagcaactggcccatcacattcggccagggcacccggctggaaatcaaaggcggaggcggaagtggaggcggaggatctggcggcggaggctctgaagtgcagctggtggaatcaggcggcggactggtgcagcctggcagaagcctgagactgagctgtgccgccagcggcttcaccttcaacgactacgccatgcactgggtgcgccaggcccctggaaaaggactggaatgggtgtccacaatcagctggaacagcggcagcatcggctacgccgatagcgtgaagggccggttcaccatcagccgggacaacgccaagaagtccctgtacctccagatgaacagcctgcgggccgaggacacagccctgtactattgcgccaaggacatccagtacggcaactactactacggcatggacgtgtggggccagggaaccaccgtgaccgtgtcatctacgcgtggaatgaggactgaggatcttcccaaagctgtcgtctttctcgaaccccaatggtatcgggtgctcgaaaaagactctgtgacactgaaatgccaaggggcctactctcccgaggacaactccacacagtggtttcataatgagtccctcatcagctctcaggccagctcttatttcattgatgccgctacagtggacgactccggcgagtatcggtgtcagaccaatctgtctacactgtctgaccccgtgcagcttgaggtccacattggatggttgctcttgcaagccccacgctgggttttcaaagaggaagatccaatccatctgcggtgccacagctggaaaaacaccgctctccacaaagtcacatacctgcaaaatggcaaaggacgcaaatacttccatcacaattccgatttttacattccgaaggctaccctgaaagacagcggcagctatttctgccggggactcgtcggctccaagaatgtgtcctccgaaaccgtgaatatcacgattacccaaggactggctgtgcctacaatctctagcttctttccgcctggataccaagtctccttctgtcttgtgatggtcctcctgtttgctgtggacacaggactgtacttttcc

SEQ ID NO: 1684 - DNA, 1446 bp, synthetic construct
  source 1..1446: mol_type = other DNA
atggccttaccagtgaccgccttgctcctgccgctggccttgctgctccacgccgccaggccggacatcgtgatgacccagacccccctgagcctgcctgtgacacctggcgagcctgccagcatctcctgcagaagcagcaagagcctgctgcacagcaacggcatcacctacctgtactggtatctgcagaaacccggccagagcccccaactgctgatctaccagatgagcaacctggtgtccggcgtgcccgacagattttctggcagcggctccggcaccgacttcaccctgaagatcagccgggtggaagccgaggacgtgggcgtgtactactgcgcccagaacctggaactgccctacacctttggcggcggaacaaaggtggaaatcaagcggggcggaggcggaagtggaggcggaggatctggcggcggaggctctcaggtgcaactggtgcagagcggagccgaagtgaaaaagcccggcagcagcgtgaaggtgtcctgcaaggccagcggctacgccttcagctactcctggatcaactgggtgcgccaggcccctggacagggcctggaatggatgggcagaatcttccccggcgacggcgacaccgactacaacggcaagttcaagggcagagtgaccatcaccgccgacaagagcaccagcaccgcctacatggaactgagcagcctgcggagcgaggataccgccgtgtactattgtgccagaaacgtgttcgacggctactggctggtgtactggggccagggaacacttgtgaccgtgtccagcacgcgtggaatgaggactgaggatcttcccaaagctgtcgtctttctcgaaccccaatggtatcgggtgctcgaaaaagactctgtgacactgaaatgccaaggggcctactctcccgaggacaactccacacagtggtttcataatgagtccctcatcagctctcaggccagctcttatttcattgatgccgctacagtggacgactccggcgagtatcggtgtcagaccaatctgtctacactgtctgaccccgtgcagcttgaggtccacattggatggttgctcttgcaagccccacgctgggttttcaaagaggaagatccaatccatctgcggtgccacagctggaaaaacaccgctctccacaaagtcacatacctgcaaaatggcaaaggacgcaaatacttccatcacaattccgatttttacattccgaaggctaccctgaaagacagcggcagctatttctgccggggactcgtcggctccaagaatgtgtcctccgaaaccgtgaatatcacgattacccaaggactggctgtgcctacaatctctagcttctttccgcctggataccaagtctccttctgtcttgtgatggtcctcctgtttgctgtggacacaggactgtacttttcc

SEQ ID NO: 1685 - DNA, 1449 bp, synthetic construct
  source 1..1449: mol_type = other DNA
atggccttaccagtgaccgccttgctcctgccgctggccttgctgctccacgccgccaggccggacatccagatgacccagagccccagcagcctgtctgccagcgtgggcgacagagtgaccatcacctgtcggagcagccagagcatcgtgcactccgtgggcaacaccttcctggaatggtatcagcagaagcccggcaaggcccccaagctgctgatctacaaggtgtccaacagattcagcggcgtgcccagcaggtttagcggctctggcagcggcaccgacttcaccctgaccatctctagcctccagcccgaggacttcgccacctactactgttttcaaggcagccagttcccctacaccttcggccagggaacaaaggtggaaatcaagcggggcggaggcggaagtggaggcggaggatctggcggcggaggctctgaagtgcaactggtggaaagcggaggcggcctggtgcagcctggcggatctctgagactgagctgtgccgccagcggctacgagttcagccggtcctggatgaactgggtgcgccaggcccctggcaagggactggaatgggtgggaagaatctaccccggcgacggcgacaccaactacagcggcaagttcaagggccggttcaccatcagcgccgacaccagcaagaacaccgcctacctccagatgaacagcctgcgggccgaggataccgccgtgtactactgtgccagagatggcagctcctgggactggtacttcgacgtgtggggacagggaacccttgtgaccgtgtccagcacgcgtggaatgaggactgaggatcttcccaaagctgtcgtctttctcgaaccccaatggtatcgggtgctcgaaaaagactctgtgacactgaaatgccaaggggcctactctcccgaggacaactccacacagtggtttcataatgagtccctcatcagctctcaggccagctcttatttcattgatgccgctacagtggacgactccggcgagtatcggtgtcagaccaatctgtctacactgtctgaccccgtgcagcttgaggtccacattggatggttgctcttgcaagccccacgctgggttttcaaagaggaagatccaatccatctgcggtgccacagctggaaaaacaccgctctccacaaagtcacatacctgcaaaatggcaaaggacgcaaatacttccatcacaattccgatttttacattccgaaggctaccctgaaagacagcggcagctatttctgccggggactcgtcggctccaagaatgtgtcctccgaaaccgtgaatatcacgattacccaaggactggctgtgcctacaatctctagcttctttccgcctggataccaagtctccttctgtcttgtgatggtcctcctgtttgctgtggacacaggactgtacttttcc

SEQ ID NO: 1686 - DNA, 1431 bp, synthetic construct
  source 1..1431: mol_type = other DNA
atggccttaccagtgaccgccttgctcctgccgctggccttgctgctccacgccgccaggccggagatcgtgctgacacagagccctggcaccctgagcctgtctccaggcgaaagagccacactgagctgtcgggcctctcagagcgtgggaggctacctggcttggtatcagcagaagccaggccaggcccccagactgctgatctacgacgccagcaatcgggccacaggcatccccgccagattttctggcagcggctccggcaccgacttcaccctgacaatcagcagcctggaacccgaggacttcgccgtgtactactgccagcagcggaacaactggccccccatgtacacattcggccagggcaccaagctggaaatcaagagaggcggaggcggaagtggaggcggaggatctggcggcggaggctctcaggtgcaactggtgcagagcggagccgaagtgaagaaacccggcagcagcgtgaaggtgtcctgcaaggcttccggcggcaccttcagcagctacgccatttcttgggtgcgccaggctcctggacagggcctggaatggatgggcggcatcatccctatcctgggcaccgccaactacgcccagaaattccagggcagagtgaccatcaccgccgacgagagcaccagcaccgcctacatggaactgagcagcctgcggagcgaggacacagccgtgtattattgcgccagatggggcggaggggccttcgacatttggggccagggaacaatggtcaccgtgtccagcacgcgtggaatgaggactgaggatcttcccaaagctgtcgtctttctcgaaccccaatggtatcgggtgctcgaaaaagactctgtgacactgaaatgccaaggggcctactctcccgaggacaactccacacagtggtttcataatgagtccctcatcagctctcaggccagctcttatttcattgatgccgctacagtggacgactccggcgagtatcggtgtcagaccaatctgtctacactgtctgaccccgtgcagcttgaggtccacattggatggttgctcttgcaagccccacgctgggttttcaaagaggaagatccaatccatctgcggtgccacagctggaaaaacaccgctctccacaaagtcacatacctgcaaaatggcaaaggacgcaaatacttccatcacaattccgatttttacattccgaaggctaccctgaaagacagcggcagctatttctgccggggactcgtcggctccaagaatgtgtcctccgaaaccgtgaatatcacgattacccaaggactggctgtgcctacaatctctagcttctttccgcctggataccaagtctccttctgtcttgtgatggtcctcctgtttgctgtggacacaggactgtacttttcc

SEQ ID NO: 1687 - DNA, 1422 bp, synthetic construct
  source 1..1422: mol_type = other DNA
atggccttaccagtgaccgccttgctcctgccgctggccttgctgctccacgccgccaggccggacatccagatgacccagagccccgccaccatcgagaacacaagcctgtctgccagcgtgggcgacagagtgaccatcacctgtagagccagccagggcatcagctcttggctgacctggtatcagcagaagcccgagaaggcccccaagagcctgatctacgccgccagctctctgcagtctggcgtgcccagcagattttccggcagcggctctggcaccgacttcaccctgacaatcagcagcctgcagcccgaggacttcgccacctactactgccagcagtacgacagctaccccatcaccttcggccagggcacccggctggaaatcaagggcggaggcggaagtggaggcggaggatctggcggcggaggctctcaggtgcaactgcagcagtggggagccggactgctgaagcctagcgagacactgagcctgacctgcgccgtgtacggcggcagcttcagcgcctactattggagctggatcagacagccccctggcaagggcctggaatggatcggcgacatcaatcacggcggaggcaccaactacaaccccagcctgaagtcccgcgtgaccatctccgtggacaccagcaagaaccagttctccctgaagctgaacagcgtgacagccgccgacacagccgtgtactactgtgccagcctgaccgcctattggggccagggatctcttgtgaccgtgtccagcacgcgtggaatgaggactgaggatcttcccaaagctgtcgtctttctcgaaccccaatggtatcgggtgctcgaaaaagactctgtgacactgaaatgccaaggggcctactctcccgaggacaactccacacagtggtttcataatgagtccctcatcagctctcaggccagctcttatttcattgatgccgctacagtggacgactccggcgagtatcggtgtcagaccaatctgtctacactgtctgaccccgtgcagcttgaggtccacattggatggttgctcttgcaagccccacgctgggttttcaaagaggaagatccaatccatctgcggtgccacagctggaaaaacaccgctctccacaaagtcacatacctgcaaaatggcaaaggacgcaaatacttccatcacaattccgatttttacattccgaaggctaccctgaaagacagcggcagctatttctgccggggactcgtcggctccaagaatgtgtcctccgaaaccgtgaatatcacgattacccaaggactggctgtgcctacaatctctagcttctttccgcctggataccaagtctccttctgtcttgtgatggtcctcctgtttgctgtggacacaggactgtacttttcc

SEQ ID NO: 1688 - DNA, 1434 bp, synthetic construct
  source 1..1434: mol_type = other DNA
atggccttaccagtgaccgccttgctcctgccgctggccttgctgctccacgccgccaggccggagatcgtgctgacccagagccctgatagcctggccgtgtctctgggcgagagagccaccatcaactgcaaggccagccagagcgtggacttcgacggcgacagctacctgaactggtatcagcagaagcccggccagccccccaaggtgctgatctatgccgccagcacactgcagagcggcgtgcccagcagattttctggcagcggctccggcaccgacttcaccctgaccatcaacagcctggaagccgaggacgccgccacctactactgccagcagagcaacgaggacccctggacctttggcggcggaacaaaggtggaaatcaagggcggaggcggaagtggaggcggaggatctggcggcggaggctctcaggtgcaactggtgcagtccggcgctgaagtgaagaaacctggggccagcgtgaaggtgtcctgcaaggtgtccggctacacctttaccgactactacattacctgggtgcgccaggcccctggacaggccctggaatggatgggctggatctaccccggcagcggcaacaccaagtacagccagaagttccagggcagattcgtgttcagcgtggacaccagcgccagcaccgcctacctgcaactgtctagcctgaaggccgaagataccgccgtgtactactgcgccaactacggcaactattggttcgcctattggggccagggaacccttgtgaccgtgtcctctacgcgtggaatgaggactgaggatcttcccaaagctgtcgtctttctcgaaccccaatggtatcgggtgctcgaaaaagactctgtgacactgaaatgccaaggggcctactctcccgaggacaactccacacagtggtttcataatgagtccctcatcagctctcaggccagctcttatttcattgatgccgctacagtggacgactccggcgagtatcggtgtcagaccaatctgtctacactgtctgaccccgtgcagcttgaggtccacattggatggttgctcttgcaagccccacgctgggttttcaaagaggaagatccaatccatctgcggtgccacagctggaaaaacaccgctctccacaaagtcacatacctgcaaaatggcaaaggacgcaaatacttccatcacaattccgatttttacattccgaaggctaccctgaaagacagcggcagctatttctgccggggactcgtcggctccaagaatgtgtcctccgaaaccgtgaatatcacgattacccaaggactggctgtgcctacaatctctagcttctttccgcctggataccaagtctccttctgtcttgtgatggtcctcctgtttgctgtggacacaggactgtacttttcc

SEQ ID NO: 1689 - DNA, 1428 bp, synthetic construct
  source 1..1428: mol_type = other DNA
atggccttaccagtgaccgccttgctcctgccgctggccttgctgctccacgccgccaggccggacatccagatgacccagagccccagcagcctgtctgccagcgtgggcgacagagtgaccatcacctgtagagccagccagggcatcagctcttggctggcctggtatcagcagaagcccgagaaggcccccaagagcctgatctacgccgcctctagtctccagagcggcgtgcccagcagattttctggcagcggctccggcaccgacttcaccctgacaatcagctccctccagcccgaggacttcgccacctactactgccagcagtacaacagctaccctcccacctttggcggaggcaccaaggtggaaatcaagggcggaggcggaagtggaggcggaggatctggcggcggaggctctgaagtgcaactggtgcagtctggcggagggctggtgcatcctgggggaagcctgagactgagctgtgccggctctggcttcgccttcagcagcagcaccatgcactggatcagacaggcccctggcaagggcctggaatggatcagcctgatcggaagcggagggggcatctactacggcgacagcgtgaagggccggttcaccatcagccgggacaacgccaagaacagcctgtacctccagatgaactccctgcgggccgaggacatggccgtgtactattgtgtgcggggctacttcgactgggtggactacttcgattactggggccagggcaccctcgtgaccgtgtcatctacgcgtggaatgaggactgaggatcttcccaaagctgtcgtctttctcgaaccccaatggtatcgggtgctcgaaaaagactctgtgacactgaaatgccaaggggcctactctcccgaggacaactccacacagtggtttcataatgagtccctcatcagctctcaggccagctcttatttcattgatgccgctacagtggacgactccggcgagtatcggtgtcagaccaatctgtctacactgtctgaccccgtgcagcttgaggtccacattggatggttgctcttgcaagccccacgctgggttttcaaagaggaagatccaatccatctgcggtgccacagctggaaaaacaccgctctccacaaagtcacatacctgcaaaatggcaaaggacgcaaatacttccatcacaattccgatttttacattccgaaggctaccctgaaagacagcggcagctatttctgccggggactcgtcggctccaagaatgtgtcctccgaaaccgtgaatatcacgattacccaaggactggctgtgcctacaatctctagcttctttccgcctggataccaagtctccttctgtcttgtgatggtcctcctgtttgctgtggacacaggactgtacttttcc

SEQ ID NO: 1690 - DNA, 1446 bp, synthetic construct
  source 1..1446: mol_type = other DNA
atggccttaccagtgaccgccttgctcctgccgctggccttgctgctccacgccgccaggccggacgtcgtgatgacccagagccctctgagcctgcctgtgacactgggacagcctgccagcatctcctgtcggagcagccagagcatcgtgcacagcgacggcaacacctacctggaatggtatcagcagcggccaggccagagccccagacggctgatctacaaggtgtccaacagattcagcggcgtgcccgacagattctccggcagcggctctggcaccgacttcaccctgaagatcagcagagtggaagccgaggacgtgggcgtgtactactgttttcaaggcagccacgccccctggacctttggcggaggaacaaaggtggaaatcaagggcggaggcggaagtggaggcggaggatctggcggcggaggctctgaagtgcaactggtggaatcaggcggcggactggtgcagcctggcggatctctgagactgagctgtgccgccagcggcttcaccttcagcagctacggaatgcactgggtgcgccaggcccctggcaaaggactggaatgggtggcctacatcaccaccagaagcagcaccatctactacgccgacagcgtgaagggccggttcaccatctccagagacaacgccaagaacagcctgtacctccagatgaactccctgcgggccgaggacaccgccgtgtactattgcaccagagagcccctgaccggctactacgctatggactattggggccagggcaccagcgtgaccgtgtctagtacgcgtggaatgaggactgaggatcttcccaaagctgtcgtctttctcgaaccccaatggtatcgggtgctcgaaaaagactctgtgacactgaaatgccaaggggcctactctcccgaggacaactccacacagtggtttcataatgagtccctcatcagctctcaggccagctcttatttcattgatgccgctacagtggacgactccggcgagtatcggtgtcagaccaatctgtctacactgtctgaccccgtgcagcttgaggtccacattggatggttgctcttgcaagccccacgctgggttttcaaagaggaagatccaatccatctgcggtgccacagctggaaaaacaccgctctccacaaagtcacatacctgcaaaatggcaaaggacgcaaatacttccatcacaattccgatttttacattccgaaggctaccctgaaagacagcggcagctatttctgccggggactcgtcggctccaagaatgtgtcctccgaaaccgtgaatatcacgattacccaaggactggctgtgcctacaatctctagcttctttccgcctggataccaagtctccttctgtcttgtgatggtcctcctgtttgctgtggacacaggactgtacttttcc

SEQ ID NO: 1691 - DNA, 1416 bp, synthetic construct
  source 1..1416: mol_type = other DNA
atggccttaccagtgaccgccttgctcctgccgctggccttgctgctccacgccgccaggccgcagatcgtgctgacacagagccctgccctgatgagcgccagccctggcgagaaagtgaccatgacctgtagcgccagcagcagcgtgcgctacatgtactggtatcagcagaagcccagaagcagccccaagccctggattcacctgaccagcaatctggcctctggcgtgcccgctagattttccggctctggcagcggcaccagctacagcctgaccatcagcagcatggaagccgaggacgccgccacctactactgccagcagtggtccagccaccccttcacatttggctccggcaccaagctggaaatcaagggcggaggcggaagtggaggcggaggatctggcggcggaggctctgatgtgcaactccaggaaagcggccctggccttgtgaagcctagccagagcctgtccctgacctgtaccgtgaccggcttcagcatcaccagcgactactcttggaactggatcagacagttccctggcaacaaactggaatggatgggctacatcagctactccggccacacctcctacaaccccagcctggaaagccggatctccatcaccagagacaccagcaagaaccagttcttcttgcaactgaacagcgtgaccaccgaggataccgccacatattactgtaccagaggcaactgggacgtggtgtactggggccagggcacacttgtgaccgtgtctgctacgcgtggaatgaggactgaggatcttcccaaagctgtcgtctttctcgaaccccaatggtatcgggtgctcgaaaaagactctgtgacactgaaatgccaaggggcctactctcccgaggacaactccacacagtggtttcataatgagtccctcatcagctctcaggccagctcttatttcattgatgccgctacagtggacgactccggcgagtatcggtgtcagaccaatctgtctacactgtctgaccccgtgcagcttgaggtccacattggatggttgctcttgcaagccccacgctgggttttcaaagaggaagatccaatccatctgcggtgccacagctggaaaaacaccgctctccacaaagtcacatacctgcaaaatggcaaaggacgcaaatacttccatcacaattccgatttttacattccgaaggctaccctgaaagacagcggcagctatttctgccggggactcgtcggctccaagaatgtgtcctccgaaaccgtgaatatcacgattacccaaggactggctgtgcctacaatctctagcttctttccgcctggataccaagtctccttctgtcttgtgatggtcctcctgtttgctgtggacacaggactgtacttttcc

SEQ ID NO: 1692 - DNA, 1443 bp, synthetic construct
  source 1..1443: mol_type = other DNA
atggccttaccagtgaccgccttgctcctgccgctggccttgctgctccacgccgccaggccggagatcgtgctgacacagagccctggaagcctggccgtgtctcctggcgagcgcgtgacaatgagctgcaagagcagccagagcgtgttcttcagcagctcccagaagaactacctggcctggtatcagcagatccccggccagagccccagactgctgatctactgggccagcaccagagaaagcggcgtgcccgatagattcaccggcagcggctctggcaccgacttcaccctgacaatcagcagcgtgcagcccgaggacctggctatctactactgccaccagtacctgagcagccggaccttcggccagggcaccaagctggaaatcaagagaggcggaggcggaagtggaggcggaggatctggcggcggaggctctcaggtgcaactgcagcagcctggcgctgaggtcgtgaagccaggcgcttccgtgaagatgtcctgcaaggccagcggctacaccttcaccagctactacatccactggatcaagcagacccctggacagggcctggaatgggtgggagtgatctaccccggcaacgacgacatcagctacaaccagaagttccagggcaaggccaccctgaccgccgacaagtctagcaccaccgcctacatgcaactgtccagcctgaccagcgaggacagcgccgtgtactactgcgccagagaagtgcggctgcggtacttcgatgtgtggggccagggaaccaccgtgaccgtgtcatctacgcgtggaatgaggactgaggatcttcccaaagctgtcgtctttctcgaaccccaatggtatcgggtgctcgaaaaagactctgtgacactgaaatgccaaggggcctactctcccgaggacaactccacacagtggtttcataatgagtccctcatcagctctcaggccagctcttatttcattgatgccgctacagtggacgactccggcgagtatcggtgtcagaccaatctgtctacactgtctgaccccgtgcagcttgaggtccacattggatggttgctcttgcaagccccacgctgggttttcaaagaggaagatccaatccatctgcggtgccacagctggaaaaacaccgctctccacaaagtcacatacctgcaaaatggcaaaggacgcaaatacttccatcacaattccgatttttacattccgaaggctaccctgaaagacagcggcagctatttctgccggggactcgtcggctccaagaatgtgtcctccgaaaccgtgaatatcacgattacccaaggactggctgtgcctacaatctctagcttctttccgcctggataccaagtctccttctgtcttgtgatggtcctcctgtttgctgtggacacaggactgtacttttcc

SEQ ID NO: 1693 - DNA, 1455 bp, synthetic construct
  source 1..1455: mol_type = other DNA
atggccttaccagtgaccgccttgctcctgccgctggccttgctgctccacgccgccaggccggacatcgtgatgacacagtcaccagatagcctcaccgtctccctgggggagcggaccaccattaattgtaaatccagccaaagcgtgctggactcaagcaagaacaagaatagcctcgcctggtatcagcagaagcccggtcagcctccaaagctgctgctttcttgggcctccaccagagagtccgggattcctgataggtttagtggttcaggctccggcacagattttactctgaccattgattctctccagccagaggattctgcaacttattactgccagcaaagcgcccactttcctataacttttggccagggaacccgacttgaaatcaagggcggaggcggaagtggaggcggaggatctggcggcggaggctctcaggtgcagctggtgcagagcggtgccgaagtgaagaaaccaggtgcatccgttaaagtttcatgtaaggctagtggatataccttcaccaattacggaatgaactgggtgaaacaggcccctggccagggactgaagtggatggggtggattaacacctacaccggggagccgacttatgcagacgactttaaggggcgggtcacgatgacctccgacacctccaccagtaccgcctacctggagctgcacaaccttaggtcagacgataccgccgtgtattactgtgcccgatggtcttggtccgacggatactatgtctacttcgactattggggccaggggaccacagttaccgtgtcctctacgcgtggaatgaggactgaggatcttcccaaagctgtcgtctttctcgaaccccaatggtatcgggtgctcgaaaaagactctgtgacactgaaatgccaaggggcctactctcccgaggacaactccacacagtggtttcataatgagtccctcatcagctctcaggccagctcttatttcattgatgccgctacagtggacgactccggcgagtatcggtgtcagaccaatctgtctacactgtctgaccccgtgcagcttgaggtccacattggatggttgctcttgcaagccccacgctgggttttcaaagaggaagatccaatccatctgcggtgccacagctggaaaaacaccgctctccacaaagtcacatacctgcaaaatggcaaaggacgcaaatacttccatcacaattccgatttttacattccgaaggctaccctgaaagacagcggcagctatttctgccggggactcgtcggctccaagaatgtgtcctccgaaaccgtgaatatcacgattacccaaggactggctgtgcctacaatctctagcttctttccgcctggataccaagtctccttctgtcttgtgatggtcctcctgtttgctgtggacacaggactgtacttttcc

SEQ ID NO: 1694 - DNA, 1455 bp, synthetic construct
  source 1..1455: mol_type = other DNA
atggccttaccagtgaccgccttgctcctgccgctggccttgctgctccacgccgccaggccggatgtgctgctgacccagagccctctgagcctgcctgtgacactgggacagcctgccagcatctcctgtcggagcagccagaccatcgtgcacagcaacggcaacacctacctggaatggttccagcagcggccaggccagagccccagactgctgatctaccaggtgtccaacagattcagcggcgtgcccgacagattctccggcagcggctctggcaccgacttcaccctgaagatcagccgggtggaagccgaggacgtgggcgtgtactactgttttcaaggcagccacgtgccccggacctttggcggaggaacaaaggtggaaatcaagagaggcggaggcggaagtggaggcggaggatctggcggcggaggctctcagatccaactggtgcagagcggcagcgagctgaagaaacctggggccagcgtgaaggtgtcctgcaaggccagcggctacacctttaccaactacggcatgaactgggtgcgccaggcccctggacagggcctgaaatggatgggctggatcaacaccaacaccggcgagcctaagtacgccgaagagttcaagggcagattcgccctgagcctggacaccagcgtgtccacagcctacctccagatcaacagcctgaaggccgaggataccgccgtgtacttctgcgccagaggctacggcaactacgccagaggggcttggctggcctattggggccagggaacactcgtgaccgtgtcctctacgcgtggaatgaggactgaggatcttcccaaagctgtcgtctttctcgaaccccaatggtatcgggtgctcgaaaaagactctgtgacactgaaatgccaaggggcctactctcccgaggacaactccacacagtggtttcataatgagtccctcatcagctctcaggccagctcttatttcattgatgccgctacagtggacgactccggcgagtatcggtgtcagaccaatctgtctacactgtctgaccccgtgcagcttgaggtccacattggatggttgctcttgcaagccccacgctgggttttcaaagaggaagatccaatccatctgcggtgccacagctggaaaaacaccgctctccacaaagtcacatacctgcaaaatggcaaaggacgcaaatacttccatcacaattccgatttttacattccgaaggctaccctgaaagacagcggcagctatttctgccggggactcgtcggctccaagaatgtgtcctccgaaaccgtgaatatcacgattacccaaggactggctgtgcctacaatctctagcttctttccgcctggataccaagtctccttctgtcttgtgatggtcctcctgtttgctgtggacacaggactgtacttttcc

SEQ ID NO: 1695 - DNA, 1440 bp, synthetic construct
  source 1..1440: mol_type = other DNA
atggccttaccagtgaccgccttgctcctgccgctggccttgctgctccacgccgccaggccggaccacatcgtgctgacccagagccctagcagcctgtctgccagcctgggcgacagagtgaccatcagctgtagagccagccaggacatcagcacctacctgaactggtatcagcagaaacccgacggcaccgtgaagctgctgatcttctacaccagcagactgcacgccggggtgcccagcagattttctggcagcggctctggcacccaccacagcctgaccatctccaacctggaacaggaagatattgctacctacttctgtcagcaaggcaacagcctgcccttcaccttcggcagcggcaccaagctggaaatcaagagaggcggaggcggaagtggaggcggaggatctggcggcggaggctctcaggtgcagctgaaagagagcggccctgagctggaaaagcctggggccagcgtgaagattagctgcaaggccagcggctacagcttcaccgcctacagcatgaactgggtcaagcagaacaacggcatgagcctggaatggatcggcagcatcgacccctactacggcgacaccaaatacgcccagaagttcaagggcaaggccaccctgaccgtggataaggccagcagcaccgcctacctccagctgaagtctctgaccagcgaggacagcgccgtgtactactgcgccagacggatgattaccaccggcgactggtacttcgacgtgtggggagccggaaccaccgtgacagtgtctagcacgcgtggaatgaggactgaggatcttcccaaagctgtcgtctttctcgaaccccaatggtatcgggtgctcgaaaaagactctgtgacactgaaatgccaaggggcctactctcccgaggacaactccacacagtggtttcataatgagtccctcatcagctctcaggccagctcttatttcattgatgccgctacagtggacgactccggcgagtatcggtgtcagaccaatctgtctacactgtctgaccccgtgcagcttgaggtccacattggatggttgctcttgcaagccccacgctgggttttcaaagaggaagatccaatccatctgcggtgccacagctggaaaaacaccgctctccacaaagtcacatacctgcaaaatggcaaaggacgcaaatacttccatcacaattccgatttttacattccgaaggctaccctgaaagacagcggcagctatttctgccggggactcgtcggctccaagaatgtgtcctccgaaaccgtgaatatcacgattacccaaggactggctgtgcctacaatctctagcttctttccgcctggataccaagtctccttctgtcttgtgatggtcctcctgtttgctgtggacacaggactgtacttttcc

SEQ ID NO: 1696 - DNA, 1440 bp, synthetic construct; identical to SEQ ID NO: 1695
  source 1..1440: mol_type = other DNA

SEQ ID NO: 1697 - DNA, 1440 bp, synthetic construct
  source 1..1440: mol_type = other DNA
atggccttaccagtgaccgccttgctcctgccgctggccttgctgctccacgccgccaggccggacatcgtgatgacccagagccccgatagcctggccgtgtctctgggagagagagccaccatcaactgccgggccagcaagagcgtgtccaccagcggctacagcttcatgcactggtatcagcagaagcccggccagccccccaagctgctgatctacctggcctccaacctggaaagcggcgtgcccgatagattcagcggcagcggctctggcaccgacttcaccctgaccatcagttctcttcaggccgaggacgtggccgtgtactactgccagcacagcagagaggtgccctggacattcggccagggcacaaaggtggaaatcaagcggggcggaggcggaagtggaggcggaggatctggcggcggaggctctcaggtgcagctggtgcagtctggggccgaagtgaagaaacctggggccagcgtgaaggtgtcctgcaaggccagcggatacacctttaccaactacggcatgaactgggtgcgccaggcccctggacagggcctggaatggatgggctggatcaacacctacaccggcgagcccacatacgccgacgccttcaagggcagattcgccttcagcctggacaccagcacctccaccgcctacctccagatcaacagcctgcggagcgacgacaccgccgtgtattattgcgccagagattacggcgactacgggatggactattggggccagggaaccaccgtgaccgtgtcctctacgcgtggaatgaggactgaggatcttcccaaagctgtcgtctttctcgaaccccaatggtatcgggtgctcgaaaaagactctgtgacactgaaatgccaaggggcctactctcccgaggacaactccacacagtggtttcataatgagtccctcatcagctctcaggccagctcttatttcattgatgccgctacagtggacgactccggcgagtatcggtgtcagaccaatctgtctacactgtctgaccccgtgcagcttgaggtccacattggatggttgctcttgcaagccccacgctgggttttcaaagaggaagatccaatccatctgcggtgccacagctggaaaaacaccgctctccacaaagtcacatacctgcaaaatggcaaaggacgcaaatacttccatcacaattccgatttttacattccgaaggctaccctgaaagacagcggcagctatttctgccggggactcgtcggctccaagaatgtgtcctccgaaaccgtgaatatcacgattacccaaggactggctgtgcctacaatctctagcttctttccgcctggataccaagtctccttctgtcttgtgatggtcctcctgtttgctgtggacacaggactgtacttttcc

SEQ ID NO: 1698 - DNA, 1428 bp, synthetic construct
  source 1..1428: mol_type = other DNA
atggccttaccagtgaccgccttgctcctgccgctggccttgctgctccacgccgccaggccggacatcgtgatgacccagacccccctgaccctgagcgtgacaatcggacagcctgccagcatctcctgcaagagcagccagagcctgctggacagcgacggcaagacctacctgaactggctgctgcagaggccaggccagagccccgagagactgatctacctggtgtccaagctggactccggcgtgcccgatagattcacaggcagcggctccggcaccgacttcaccctgaagatcagccgggtggaagccgaggacctgggcgtgtactgttgttggcagggcacccacttcccttacaccttcggcggagggaccaaggtggaaatcaagggcggcggaggcggaagtggaggcggaggatctggcggcggaggctctcaggtgcaactgcagcagcctggcgctgaacttgtgcggccaggcgcctctgtgaagctgagctgtaaagccagcggctacaccttcaccagctactggatgaactgggtcaagcagcgcccaggccagggcctggaatggatcggaatgatcgaccccagcgacagcgagacacactacaaccacatcttcaaggacaaggccaccctgaccgtggacaagtccagcagcacagcctacctgcaactgtccagcctgaccagcgaggacagcgccgtgtactactgcgcccggaacctgtatctgtggggccagggaacaagcgtgaccgtgtctagcacgcgtggaatgaggactgaggatcttcccaaagctgtcgtctttctcgaaccccaatggtatcgggtgctcgaaaaagactctgtgacactgaaatgccaaggggcctactctcccgaggacaactccacacagtggtttcataatgagtccctcatcagctctcaggccagctcttatttcattgatgccgctacagtggacgactccggcgagtatcggtgtcagaccaatctgtctacactgtctgaccccgtgcagcttgaggtccacattggatggttgctcttgcaagccccacgctgggttttcaaagaggaagatccaatccatctgcggtgccacagctggaaaaacaccgctctccacaaagtcacatacctgcaaaatggcaaaggacgcaaatacttccatcacaattccgatttttacattccgaaggctaccctgaaagacagcggcagctatttctgccggggactcgtcggctccaagaatgtgtcctccgaaaccgtgaatatcacgattacccaaggactggctgtgcctacaatctctagcttctttccgcctggataccaagtctccttctgtcttgtgatggtcctcctgtttgctgtggacacaggactgtacttttcc

SEQ ID NO: 1699 - DNA, 1437 bp, synthetic construct
  source 1..1437: mol_type = other DNA
atggccttaccagtgaccgccttgctcctgccgctggccttgctgctccacgccgccaggccggacatccagttgacccagtcccccagctcactcagcgccagtgtgggggaccgggtgaccattacctgtaaagccagtcagagtgtggactatgagggggatagcttcctgaattggtatcagcagaagcctggcaaagccccaaagctgctgatctacgctgcatctaatctggagtcaggcgtgccttctaggttctccggtagtgggtctgggaccgatttcacattgaccatttcatccctccaacccgaggatttcgctacatattactgtcagcagtccaatgaggaccctctcacctttggccagggcaccaaagttgaaattaagagaggcggaggcggaagtggaggcggaggatctggcggcggaggctctgaagtccaacttgtggagtctggagggggcctggtgcagcccggcggctctctcagactgtcttgtgcggcaagcggctacaccttcagctcttactggatagaatgggtgaggcaggcacctggaaagggactggagtggattggagagattctgccaggagggggagatacaaattacaatgaaatcttcaaggggcgggccaccttttcagcggataccagcaagaatacagcttacctgcagatgaatagcctccgggcagaagataccgctgtttattattgcacgagacgggtgccaataagactggactattgggggcaagggactcttgtcaccgtcagttcaacgcgtggaatgaggactgaggatcttcccaaagctgtcgtctttctcgaaccccaatggtatcgggtgctcgaaaaagactctgtgacactgaaatgccaaggggcctactctcccgaggacaactccacacagtggtttcataatgagtccctcatcagctctcaggccagctcttatttcattgatgccgctacagtggacgactccggcgagtatcggtgtcagaccaatctgtctacactgtctgaccccgtgcagcttgaggtccacattggatggttgctcttgcaagccccacgctgggttttcaaagaggaagatccaatccatctgcggtgccacagctggaaaaacaccgctctccacaaagtcacatacctgcaaaatggcaaaggacgcaaatacttccatcacaattccgatttttacattccgaaggctaccctgaaagacagcggcagctatttctgccggggactcgtcggctccaagaatgtgtcctccgaaaccgtgaatatcacgattacccaaggactggctgtgcctacaatctctagcttctttccgcctggataccaagtctccttctgtcttgtgatggtcctcctgtttgctgtggacacaggactgtacttttcc

SEQ ID NO: 1700 - DNA, 1461 bp, synthetic construct
  source 1..1461: mol_type = other DNA
atggccttaccagtgaccgccttgctcctgccgctggccttgctgctccacgccgccaggccggacatcgtgatgagccagagccctagcagcctggccgtgtccgtgggcgagaaagtgaccatgagctgcaagagcagccagtccctgctgcacagcagcaaccagaagaactacctggcctggtatcagcagaagcccggccagtcccccaaggtgctgatctactgggccagcaccagagaaagcggcgtgcccgatagattcaccggcagcggctctggcaccgacttcaccctgaccatcaccagcgtgaagtccgaggacctggctgtgtactactgccagcagtattacagctacccctggaccttcggcggaggcacccggctggaaatcaaaagaggcggaggcggaagtggaggcggaggatctggcggcggaggctctgaagtgcaactccagcagagcgtggccgagcttgtgaagcctggcgcttccgtgaagatgtcctgcaaggtgtccggctacaccctgacagaccacaccatccactggatgaagcagcggcctgagcagggcctggaatggatcggctacatctaccccagggacggcatcaccggctacaacgagaagttcaagggcaaggccacactgaccgccgacaccagcagcagcacagcctacatgcaactgaacagcctgaccagcgaggacagcgccgtgtacttctgtgccagatggggctacagctacagaaactacgcctactactacgactactggggccagggcacaaccctgaccgtgtctagtacgcgtggaatgaggactgaggatcttcccaaagctgtcgtctttctcgaaccccaatggtatcgggtgctcgaaaaagactctgtgacactgaaatgccaaggggcctactctcccgaggacaactccacacagtggtttcataatgagtccctcatcagctctcaggccagctcttatttcattgatgccgctacagtggacgactccggcgagtatcggtgtcagaccaatctgtctacactgtctgaccccgtgcagcttgaggtccacattggatggttgctcttgcaagccccacgctgggttttcaaagaggaagatccaatccatctgcggtgccacagctggaaaaacaccgctctccacaaagtcacatacctgcaaaatggcaaaggacgcaaatacttccatcacaattccgatttttacattccgaaggctaccctgaaagacagcggcagctatttctgccggggactcgtcggctccaagaatgtgtcctccgaaaccgtgaatatcacgattacccaaggactggctgtgcctacaatctctagcttctttccgcctggataccaagtctccttctgtcttgtgatggtcctcctgtttgctgtggacacaggactgtacttttcc

SEQ ID NO: 1701 - DNA, 1452 bp, synthetic construct
  source 1..1452: mol_type = other DNA
atggccttaccagtgaccgccttgctcctgccgctggccttgctgctccacgccgccaggccggagatcgtgctgacacagagccctggcaccctgagcctgtctccaggcgaaagagccacactgagctgtcgggccagccagagcgtgtccagctcttacctggcctggtatcagcagaagcccggccaggctccccggctgctgatctacggaacaagcagcagagccaccggcatccccgacagattttctggcagcggctccggcaccgacttcaccctgacaatcagcagactggaacccgaggacttcgccgtgtactactgccagcagtacggcagcagccccttcacctttggcggaggcaccaaggtggaaatcaagagaggcggaggcggaagtggaggcggaggatctggcggcggaggctctcaggtgcaactccaggaatctggccccggactggctaagcccagcgagacactgagcctgacctgtaccgtgtccggcgacagcatcaccagctactactggtcctggatcagacagccccctggcaagggcctggaatggatcggctacatctactacagcggcagcaccaactacaaccccagcctgaagtccagagtgaccatcagcgtggacaccagcaagaaccagttctccctgaagctgagcagcgtgacagccgccgacaccgccgtgtattattgcgccagagatcagcggagaatcgccgctgccggcacccacttttacggcatggatgtgtggggccagggcaccaccgtgaccgtgtcatctacgcgtggaatgaggactgaggatcttcccaaagctgtcgtctttctcgaaccccaatggtatcgggtgctcgaaaaagactctgtgacactgaaatgccaaggggcctactctcccgaggacaactccacacagtggtttcataatgagtccctcatcagctctcaggccagctcttatttcattgatgccgctacagtggacgactccggcgagtatcggtgtcagaccaatctgtctacactgtctgaccccgtgcagcttgaggtccacattggatggttgctcttgcaagccccacgctgggttttcaaagaggaagatccaatccatctgcggtgccacagctggaaaaacaccgctctccacaaagtcacatacctgcaaaatggcaaaggacgcaaatacttccatcacaattccgatttttacattccgaaggctaccctgaaagacagcggcagctatttctgccggggactcgtcggctccaagaatgtgtcctccgaaaccgtgaatatcacgattacccaaggactggctgtgcctacaatctctagcttctttccgcctggataccaagtctccttctgtcttgtgatggtcctcctgtttgctgtggacacaggactgtacttttcc

SEQ ID NO: 1702 - DNA, 1422 bp, synthetic construct
  source 1..1422: mol_type = other DNA
atggccttaccagtgaccgccttgctcctgccgctggccttgctgctccacgccgccaggccggacatccagatgacccagagccccagcagcctgtctgccagcgtgggcgacagagtgaccatcacctgtagagccagccagagcatcagcctgtggctgaactggtatcagcagaagcccggcaaggcccccaagctgctgatctacgccgccagcacactccagagcggcgtgccaagcagattttccggcagcggctccggcaccgacttcaccctgacaatcagctccctccagcccgaggacttcgccacctactactgccagcagtactacaccagcccctacaccttcggccagggcaccaaggtggaaatcaagagaggcggaggcggaagtggaggcggaggatctggcggcggaggctctcaggtgcaactgctggaatctggcggcggactggtgcagcctggcggatctctgagactgagctgtgccgccagcggcttcaccttcagcagctacgccatgagctgggtgcgccaggcccctggaaaaggactggaatgggtgtccgtgatccggtccagcggcagcagcacctattacgccgatagcgtgaagggccggttcaccatcagccgggacaacagcaagaacaccctgtacctccagatgaacagcctgcgggccgaggacaccgccgtgtactattgtgctaggggaggcggctacttcgactactggggccagggaacactcgtgaccgtgtcctctacgcgtggaatgaggactgaggatcttcccaaagctgtcgtctttctcgaaccccaatggtatcgggtgctcgaaaaagactctgtgacactgaaatgccaaggggcctactctcccgaggacaactccacacagtggtttcataatgagtccctcatcagctctcaggccagctcttatttcattgatgccgctacagtggacgactccggcgagtatcggtgtcagaccaatctgtctacactgtctgaccccgtgcagcttgaggtccacattggatggttgctcttgcaagccccacgctgggttttcaaagaggaagatccaatccatctgcggtgccacagctggaaaaacaccgctctccacaaagtcacatacctgcaaaatggcaaaggacgcaaatacttccatcacaattccgatttttacattccgaaggctaccctgaaagacagcggcagctatttctgccggggactcgtcggctccaagaatgtgtcctccgaaaccgtgaatatcacgattacccaaggactggctgtgcctacaatctctagcttctttccgcctggataccaagtctccttctgtcttgtgatggtcctcctgtttgctgtggacacaggactgtacttttcc

SEQ ID NO: 1703 - DNA, 1431 bp, synthetic construct
  source 1..1431: mol_type = other DNA
atggccttaccagtgaccgccttgctcctgccgctggccttgctgctccacgccgccaggccggacatccagatgacccagagccccagcagcctgtctgccagcgtgggcgacagagtgaccatcacctgtagagccagccagagcatcagcagctacctgaactggtatcagcagaagcccggcaaggcccccaaactgctgatctacgccgtgtccacactccagagcggcgtgcccagcagattttctggcagcggctccggcaccgacttcaccctgacaatcagctccctccagcccgaggacttcgccacctactactgtcagcagagcggcaccttccctcccaccacatttggacagggcaccaaggtggaaatcaagagaggcggaggcggaagtggaggcggaggatctggcggcggaggctctcaggtgcaactgctggaatctggcggcggactggtgcagcctggcggatctctgagactgagctgtgccgccagcggcttcaccttcagcagccacggaatgcactgggtgcgccaggcccctggaaagggactggaatgggtgtccgtgatctccggcagcggcagcaataccggctacgccgatagcgtgaagggccggttcaccatcagccgggacaacagcaagaacaccctgtacctccagatgaacagcctgcgggccgaggacaccgccgtgtactattgtgccagacagtggggcagctacgccttcgattcttggggccagggcaccctcgtgaccgtgtcatctacgcgtggaatgaggactgaggatcttcccaaagctgtcgtctttctcgaaccccaatggtatcgggtgctcgaaaaagactctgtgacactgaaatgccaaggggcctactctcccgaggacaactccacacagtggtttcataatgagtccctcatcagctctcaggccagctcttatttcattgatgccgctacagtggacgactccggcgagtatcggtgtcagaccaatctgtctacactgtctgaccccgtgcagcttgaggtccacattggatggttgctcttgcaagccccacgctgggttttcaaagaggaagatccaatccatctgcggtgccacagctggaaaaacaccgctctccacaaagtcacatacctgcaaaatggcaaaggacgcaaatacttccatcacaattccgatttttacattccgaaggctaccctgaaagacagcggcagctatttctgccggggactcgtcggctccaagaatgtgtcctccgaaaccgtgaatatcacgattacccaaggactggctgtgcctacaatctctagcttctttccgcctggataccaagtctccttctgtcttgtgatggtcctcctgtttgctgtggacacaggactgtacttttcc

SEQ ID NO: 1704 - DNA, 1407 bp, synthetic construct
  source 1..1407: mol_type = other DNA
atggccttaccagtgaccgccttgctcctgccgctggccttgctgctccacgccgccaggccgatgacccagagccccaagttcctgctggtgtctgccggcgacagagtgaccctgacatgcaaggccagccagagcgtgaacaacgacgtgtactggtatcagcaggaacccggccagtcccccaagctgctgatctactgggccagcaccagagaaagcggcgtgcccgatagattcaccggcagcggctctggcaccgacttcaccctgacaatcagcagcgtgcaggccgaggacctggccgtgtactactgcaagcagagctacaacctgtacaccttcggcggaggcaccaagctggaaatcaagagaggcggcggaggatctggcggaggcggatctgggggcggaggctctgaatctggaagaggactggtgcagcctggcggcagcagaaagctgtcttgtgccgccagcggcttcaccttcagcaccagcggaatgcactgggtgcgccaggcccctgagaagggactggaatgggtggcctacatcagctccggcagcaccaccatctaccacgccgataccgtgaagggccggttcaccatcagccgggacaaccccaagaataccctgttcctccagatgaccagcctgcggagcgaggacaccgccatgtactattgctgcgccagaagcggccagttcggcaactacttcgactactggggccagggcaccaccctgaccgtgtcatctacgcgtggaatgaggactgaggatcttcccaaagctgtcgtctttctcgaaccccaatggtatcgggtgctcgaaaaagactctgtgacactgaaatgccaaggggcctactctcccgaggacaactccacacagtggtttcataatgagtccctcatcagctctcaggccagctcttatttcattgatgccgctacagtggacgactccggcgagtatcggtgtcagaccaatctgtctacactgtctgaccccgtgcagcttgaggtccacattggatggttgctcttgcaagccccacgctgggttttcaaagaggaagatccaatccatctgcggtgccacagctggaaaaacaccgctctccacaaagtcacatacctgcaaaatggcaaaggacgcaaatacttccatcacaattccgatttttacattccgaaggctaccctgaaagacagcggcagctatttctgccggggactcgtcggctccaagaatgtgtcctccgaaaccgtgaatatcacgattacccaaggactggctgtgcctacaatctctagcttctttccgcctggataccaagtctccttctgtcttgtgatggtcctcctgtttgctgtggacacaggactgtacttttcc

SEQ ID NO: 1705 - DNA, 1422 bp, synthetic construct
  source 1..1422: mol_type = other DNA
atggccttaccagtgaccgccttgctcctgccgctggccttgctgctccacgccgccaggccgcagagcccatctagcctggctgtgtctgccggcgagaaagtgaccatgagctgcaagagcagccagagcctgctgaacagccggacccggaagaactacctggcctggtatcagcagaagcccggccagagccccaagctgctgatctactgggccagcaccagagaaagcggcgtgcccgatagattcaccggctctggcagcggcaccgacttcaccctgacaatcagcagcgtgcaggccgaggacctggccgtgtactactgcaagcagagcaacctgtacaccttcggcggaggcaccaagctggaaatcaagggcggaggcggaagtggaggcggaggatctggcggcggaggctctcaggtgcagctggaagagtctggacccgagcttgtgaagcctggggccagcgtgaagctgtcctgtaaagccagcggctacaccttcaccgagtacatcatccactgggtcaagcagcggagcggccagggcctggaatggatcggctggttttaccctggctccggcagcatcaagtacaacgagaagttcaaggacaaggccaccctgaccgccgacaagtccagcagcaccgtgtacatggaactgagcggcctgaccagcgaggacagcgccgtgtatttctgcgccagacacgacggctacagctacttcgactattggggccagggcaccacactgaccgtgtcctctacgcgtggaatgaggactgaggatcttcccaaagctgtcgtctttctcgaaccccaatggtatcgggtgctcgaaaaagactctgtgacactgaaatgccaaggggcctactctcccgaggacaactccacacagtggtttcataatgagtccctcatcagctctcaggccagctcttatttcattgatgccgctacagtggacgactccggcgagtatcggtgtcagaccaatctgtctacactgtctgaccccgtgcagcttgaggtccacattggatggttgctcttgcaagccccacgctgggttttcaaagaggaagatccaatccatctgcggtgccacagctggaaaaacaccgctctccacaaagtcacatacctgcaaaatggcaaaggacgcaaatacttccatcacaattccgatttttacattccgaaggctaccctgaaagacagcggcagctatttctgccggggactcgtcggctccaagaatgtgtcctccgaaaccgtgaatatcacgattacccaaggactggctgtgcctacaatctctagcttctttccgcctggataccaagtctccttctgtcttgtgatggtcctcctgtttgctgtggacacaggactgtacttttcc

SEQ ID NO: 1706 - DNA, 1431 bp, synthetic construct
  source 1..1431: mol_type = other DNA
atggccttaccagtgaccgccttgctcctgccgctggccttgctgctccacgccgccaggccggacatccagatgacccagagccccagcagcctgtctgcctctctgggcgagagagtgtccctgacctgtcgggccacacaggaactgagcggctacctgtcttggctgcagcagaagcccgacggcaccatcaagcggctgatctacgccgccagcaccctggatagcggcgtgcccaagagattcagcggcaacagaagcggcagcgactacagcctgaccatcagctccctggaaagcgaggacttcgccgactactactgcctgcagtacgccatctacccctacaccttcggcggaggcaccaagctggaaatcaagggcggaggcggaagtggaggcggaggatctggcggcggaggctctgaggtgcaactgcagcagtctggccccgagcttgtgaagcctggcgcctccgtgaagatgagctgcaaggccagcggctacacctttaccagctacttcatccactgggtcaagcagaaacccggccagggcctggaatggatcggcttcatcaacccttacaacgacggcagcaagtacaacgagaagttcaagggcaaggccaccctgaccagcgacaagagcagcagcaccgcctacatggaactgtccagcctgacatccgaggacagcgccgtgtactactgcaccagggacgacggctactacggctacgccatggactactggggccagggaacaagcgtcaccgtgtcctctacgcgtggaatgaggactgaggatcttcccaaagctgtcgtctttctcgaaccccaatggtatcgggtgctcgaaaaagactctgtgacactgaaatgccaaggggcctactctcccgaggacaactccacacagtggtttcataatgagtccctcatcagctctcaggccagctcttatttcattgatgccgctacagtggacgactccggcgagtatcggtgtcagaccaatctgtctacactgtctgaccccgtgcagcttgaggtccacattggatggttgctcttgcaagccccacgctgggttttcaaagaggaagatccaatccatctgcggtgccacagctggaaaaacaccgctctccacaaagtcacatacctgcaaaatggcaaaggacgcaaatacttccatcacaattccgatttttacattccgaaggctaccctgaaagacagcggcagctatttctgccggggactcgtcggctccaagaatgtgtcctccgaaaccgtgaatatcacgattacccaaggactggctgtgcctacaatctctagcttctttccgcctggataccaagtctccttctgtcttgtgatggtcctcctgtttgctgtggacacaggactgtacttttcc

SEQ ID NO: 1707 - DNA, 1446 bp, synthetic construct
  source 1..1446: mol_type = other DNA
atggccttaccagtgaccgccttgctcctgccgctggccttgctgctccacgccgccaggccggacaccatcgtgctgacacagagccctgcttccctggccgtgtccctgggacagagagccaccatctcttgcagagccagcgagagcgtggacagctacggcaacagcttcatgcactggtatcagcagaagcccggccagccccccaagctgctgatctacctggcctccaacctggaaagcggcgtgcccgccagattttctggcagcggcagcagaaccgacttcaccctgaccatcgaccccgtggaagccgatgatgccgccacctactactgccagcagaacaactacgacccctggaccttcggcggaggcaccaagctggaaatcaagggcggaggcggaagtggaggcggaggatctggcggcggaggctctgaagtgcaactccagcagagcggccctgagcttgtgaagcctggcgcttccgtgaagatgagctgcaaggccagcggctacaccttcaccagctacgtgatgcactgggtcaagcagaaacctggacagggcctggaatggatcggctacatcaacccctacaacgacggcaccaagtacaacgagaagttcaagggcaaggccaccctgacaagcgacaccagcagcagcaccgcctacatggaactgaacagcctgaccagcgaggacagcgccgtgtacttctgcgccagacccatctacttcgacaacgactacttcgattactggggccagggcaccaccctgaaggtgtcctctacgcgtggaatgaggactgaggatcttcccaaagctgtcgtctttctcgaaccccaatggtatcgggtgctcgaaaaagactctgtgacactgaaatgccaaggggcctactctcccgaggacaactccacacagtggtttcataatgagtccctcatcagctctcaggccagctcttatttcattgatgccgctacagtggacgactccggcgagtatcggtgtcagaccaatctgtctacactgtctgaccccgtgcagcttgaggtccacattggatggttgctcttgcaagccccacgctgggttttcaaagaggaagatccaatccatctgcggtgccacagctggaaaaacaccgctctccacaaagtcacatacctgcaaaatggcaaaggacgcaaatacttccatcacaattccgatttttacattccgaaggctaccctgaaagacagcggcagctatttctgccggggactcgtcggctccaagaatgtgtcctccgaaaccgtgaatatcacgattacccaaggactggctgtgcctacaatctctagcttctttccgcctggataccaagtctccttctgtcttgtgatggtcctcctgtttgctgtggacacaggactgtacttttcc

SEQ ID NO: 1708 - DNA, 1428 bp, synthetic construct
  source 1..1428: mol_type = other DNA
atggccttaccagtgaccgccttgctcctgccgctggccttgctgctccacgccgccaggccggacatccagatgacccagagccccagcagcctgtctgccagcgtgggcgacagagtgaccatcacatgcaaggccagccaggacgtgggaatcgccgtggcctggtatcagcagaaacccggcaaggtgcccaagctgctgatctactgggccagcaccagacacaccggcgtgcccgatagattttccggcagcggctccggcaccgacttcaccctgacaatcagctccctccagcccgaggacgtggcaacctactactgccagcagtacagcagctacccctacaccttcggccagggcaccaaggtggaaatcaagggcggaggcggaagtggaggcggaggatctggcggcggaggctctgaagtgcaactggtggaatcaggcggcggactggtgcagcctggcggatctctgagactgagctgtgccgccagcggcttcgacttcagccggtactggatgagctgggtgcgccaggcccctggcaaaggactggaatggatcggcgagatcaaccccgacagcagcaccatcaactacgcccccagcctgaaggacaagttcatcatcagccgggacaacgccaagaacagcctgtacctccagatgaactccctgcgggccgaggacaccgccgtgtactattgcgccagacccgacggcaactactggtacttcgacgtgtggggccagggaaccctcgtgaccgtgtcatctacgcgtggaatgaggactgaggatcttcccaaagctgtcgtctttctcgaaccccaatggtatcgggtgctcgaaaaagactctgtgacactgaaatgccaaggggcctactctcccgaggacaactccacacagtggtttcataatgagtccctcatcagctctcaggccagctcttatttcattgatgccgctacagtggacgactccggcgagtatcggtgtcagaccaatctgtctacactgtctgaccccgtgcagcttgaggtccacattggatggttgctcttgcaagccccacgctgggttttcaaagaggaagatccaatccatctgcggtgccacagctggaaaaacaccgctctccacaaagtcacatacctgcaaaatggcaaaggacgcaaatacttccatcacaattccgatttttacattccgaaggctaccctgaaagacagcggcagctatttctgccggggactcgtcggctccaagaatgtgtcctccgaaaccgtgaatatcacgattacccaaggactggctgtgcctacaatctctagcttctttccgcctggataccaagtctccttctgtcttgtgatggtcctcctgtttgctgtggacacaggactgtacttttcc

SEQ ID NO: 1709 - DNA, 1431 bp, synthetic construct
  source 1..1431: mol_type = other DNA
atggccttaccagtgaccgccttgctcctgccgctggccttgctgctccacgccgccaggccggacatcgtgatgacccagagccagaagagcatgagcaccagcgtgggcgacagagtgagcatcacctgcaaggccagccaggacgtgatcaccggcgtggcctggtaccagcagaagcccggccagagccccaagctgctgatctacagcgccagctacagatacaccggcgtgcccgacagattcaccggcagcggcagcggcaccgacttcaccttcaccatcagcaacgtgcaggccgaggacctggccgtgtactactgccagcagcactacagcacccccctgaccttcggcgccggcaccaagctggagctgaagggcggaggcggaagtggaggcggaggatctggcggcggaggctctcaggtgcagctgcagcagcccggcgccgagctggtgagacccggcgccagcgtgaagctgagctgcaaggccagcggctacagcttcaccacctactggatgaactgggtgaagcagagacccggccagggcctggagtggatcggcatgatccaccccagcgacagcgagaccagactgaaccagaagttcaaggacaaggccaccctgaccgtggacaagagcagcagcaccgcctacatgcagctgagcagccccaccagcgaggacagcgccgtgtactactgcgccagaagcaccatgatcgccaccagagccatggactactggggccagggcaccagcgtgaccgtgagcagcacgcgtggaatgaggactgaggatcttcccaaagctgtcgtctttctcgaaccccaatggtatcgggtgctcgaaaaagactctgtgacactgaaatgccaaggggcctactctcccgaggacaactccacacagtggtttcataatgagtccctcatcagctctcaggccagctcttatttcattgatgccgctacagtggacgactccggcgagtatcggtgtcagaccaatctgtctacactgtctgaccccgtgcagcttgaggtccacattggatggttgctcttgcaagccccacgctgggttttcaaagaggaagatccaatccatctgcggtgccacagctggaaaaacaccgctctccacaaagtcacatacctgcaaaatggcaaaggacgcaaatacttccatcacaattccgatttttacattccgaaggctaccctgaaagacagcggcagctatttctgccggggactcgtcggctccaagaatgtgtcctccgaaaccgtgaatatcacgattacccaaggactggctgtgcctacaatctctagcttctttccgcctggataccaagtctccttctgtcttgtgatggtcctcctgtttgctgtggacacaggactgtacttttcc

SEQ ID NO: 1710 - DNA, 1449 bp, synthetic construct
  source 1..1449: mol_type = other DNA
atggccttaccagtgaccgccttgctcctgccgctggccttgctgctccacgccgccaggccgcagagcgtgctgacacagcctccatccgtgtctggcgctccaggccagagagtgaccatctcctgtaccggcagcggcagcaacatcggagccccctacgacgtgtcctggtatcagcaactgcctggcaccgcccccaagctgctgatctaccacaacaacaagcggcccagcggcgtgcccgatagattcagcggctctaagagcggcaccagcgccagcctggctatcactggactccaggccgaggacgaggccgactactactgtgccacagtggaagccggcctgagcggctctgtgtttggcggcggaacaaagctgaccgtgctgggagctggcggaggcggaagtggaggcggaggatctggcggcggaggctctcaggtgcaactggtgcagagcggagccgaagtgaagaaacctggggccagcgtgaaggtgtcctgcaaggtgtccggctacaccctgaccgagctgagcattcactgggtgcgccaggcccctggcaagggactggaatggatgggcggcttcgaccccgaagagaacgagatcgtgtacgcccagcggttccagggcagagtgacaatgaccgaggacaccagcaccgacaccgcctacatggaactgagcagcctgcggagcgaggataccgccgtgtactactgcgccatcgtgggcagcttcagccctctgacactgggcctgtggggccagggaactatggtcaccgtgtccagcacgcgtggaatgaggactgaggatcttcccaaagctgtcgtctttctcgaaccccaatggtatcgggtgctcgaaaaagactctgtgacactgaaatgccaaggggcctactctcccgaggacaactccacacagtggtttcataatgagtccctcatcagctctcaggccagctcttatttcattgatgccgctacagtggacgactccggcgagtatcggtgtcagaccaatctgtctacactgtctgaccccgtgcagcttgaggtccacattggatggttgctcttgcaagccccacgctgggttttcaaagaggaagatccaatccatctgcggtgccacagctggaaaaacaccgctctccacaaagtcacatacctgcaaaatggcaaaggacgcaaatacttccatcacaattccgatttttacattccgaaggctaccctgaaagacagcggcagctatttctgccggggactcgtcggctccaagaatgtgtcctccgaaaccgtgaatatcacgattacccaaggactggctgtgcctacaatctctagcttctttccgcctggataccaagtctccttctgtcttgtgatggtcctcctgtttgctgtggacacaggactgtacttttcc

SEQ ID NO: 1711 - DNA, 1449 bp, synthetic construct
  source 1..1449: mol_type = other DNA
atggccttaccagtgaccgccttgctcctgccgctggccttgctgctccacgccgccaggccgcagagcgtgctgacacagcctccatccgtgtctggcgctccaggccagagagtgaccatctcctgtaccggcagcggcagcaacatcggagccccctacgacgtgtcctggtatcagcaactgcctggcaccgcccccaagctgctgatctaccacaacaacaagcggcccagcggcgtgcccgatagattcagcggctctaagagcggcaccagcgccagcctggctatcactggactccaggccgaggacgaggccgactactactgccagagctacgacagcagcagcatcagcaccatcttcggcggaggcaccaagctgacagtgctgggagctggcggaggcggaagtggaggcggaggatctggcggcggaggctctcaggtgcaactggtgcagagcggagccgaagtgaagaaacctggggccagcgtgaaggtgtcctgcaaggtgtccggctacaccctgaccgagctgagcattcactgggtgcgccaggcccctggcaagggactggaatggatgggcggcttcgaccccgaagagaacgagatcgtgtacgcccagcggttccagggcagagtgacaatgaccgaggacaccagcaccgacaccgcctacatggaactgagcagcctgcggagcgaggataccgccgtgtactactgtgccatcgtgggcagcttcagcggaatcgcctacagaccttggggccagggcacaatggtcaccgtgtctagcacgcgtggaatgaggactgaggatcttcccaaagctgtcgtctttctcgaaccccaatggtatcgggtgctcgaaaaagactctgtgacactgaaatgccaaggggcctactctcccgaggacaactccacacagtggtttcataatgagtccctcatcagctctcaggccagctcttatttcattgatgccgctacagtggacgactccggcgagtatcggtgtcagaccaatctgtctacactgtctgaccccgtgcagcttgaggtccacattggatggttgctcttgcaagccccacgctgggttttcaaagaggaagatccaatccatctgcggtgccacagctggaaaaacaccgctctccacaaagtcacatacctgcaaaatggcaaaggacgcaaatacttccatcacaattccgatttttacattccgaaggctaccctgaaagacagcggcagctatttctgccggggactcgtcggctccaagaatgtgtcctccgaaaccgtgaatatcacgattacccaaggactggctgtgcctacaatctctagcttctttccgcctggataccaagtctccttctgtcttgtgatggtcctcctgtttgctgtggacacaggactgtacttttcc

SEQ ID NO: 1712 - DNA, 1443 bp, synthetic construct
  source 1..1443: mol_type = other DNA
atggccttaccagtgaccgccttgctcctgccgctggccttgctgctccacgccgccaggccggacatccagatgacccagagccccagcagcctgtctgccagcgtgggcgacagagtgaccatcacctgtagcgccagcagcagcgtgtcctacatgtactggtatcagcagaagcccggcaaggcccccaagctgctgatctacctgaccagcaatctggcctccggcgtgcccagcagattttctggcagcggctccggcaccgacttcaccctgacaatcagctccctccagcccgaggacttcgccacctactactgtcagcagtggcggagcaaccccttcaccttcggccagggcaccaagctggaaatcaagagaggcggaggcggaagtggaggcggaggatctggcggcggaggctctcagatcaccctgaaagagtccggccccaccctcgtgaagcctacccagaccctgacactgacctgcaccttcagcggcttcagcctgagcacaagcggcatgggcgtgggctggatcagacagcctcctggaaaggccctggaatggctggcccacatttggtgggacgacgtgaagcggtacagccccagcctgaagtcccggctgaccattaccaaggacaccagcaagaaccaggtggtgctgaccatgacaaacatggaccccgtggacaccgccacatattactgcgcccggatcgtgtccttcgacaacgacgtggtgtccgctatggactactggggccagggaaccctcgtgaccgtgtctagtacgcgtggaatgaggactgaggatcttcccaaagctgtcgtctttctcgaaccccaatggtatcgggtgctcgaaaaagactctgtgacactgaaatgccaaggggcctactctcccgaggacaactccacacagtggtttcataatgagtccctcatcagctctcaggccagctcttatttcattgatgccgctacagtggacgactccggcgagtatcggtgtcagaccaatctgtctacactgtctgaccccgtgcagcttgaggtccacattggatggttgctcttgcaagccccacgctgggttttcaaagaggaagatccaatccatctgcggtgccacagctggaaaaacaccgctctccacaaagtcacatacctgcaaaatggcaaaggacgcaaatacttccatcacaattccgatttttacattccgaaggctaccctgaaagacagcggcagctatttctgccggggactcgtcggctccaagaatgtgtcctccgaaaccgtgaatatcacgattacccaaggactggctgtgcctacaatctctagcttctttccgcctggataccaagtctccttctgtcttgtgatggtcctcctgtttgctgtggacacaggactgtacttttcc

SEQ ID NO: 1713 - DNA, 1428 bp, synthetic construct
  source 1..1428: mol_type = other DNA
atggccttaccagtgaccgccttgctcctgccgctggccttgctgctccacgccgccaggccggagatcgtgatgacccagagccctgccaccctgtccgtgtctccaggcgaaagagccaccctgagctgcaaggcttcccagagcgtgtccaacgacgtcgtgtggtatcagcagaagcccggccaggcccccagactgctgatctactacgccagcaacagatacaccggcatccccgccagattcagcggctctggcagcggcaccgagttcaccctgacaatcagcagcctccagagcgaggacttcgccgtgtactactgtcagcaggactacaccagcccctggaccttcggccagggcaccaagctggaaatcaagagaggcggaggcggaagtggaggcggaggatctggcggcggaggctctcaggtgcaactggtgcagagcggagccgaagtgaagaaacctggggccagcgtgaaggtgtcctgcaaggccagcggctacacctttaccaactacggcatgaactgggtgcgccaggctcctggacagggcctggaatggatgggctggatcaacacctacaccggcgagcccacctacgccgacgacttcaagggcagagtgaccatgaccaccgacaccagcacctccaccgcctacatggaactgcggagcctgagaagcgacgacaccgccgtgtattattgcgcccggatcggcgacagcagccccagcgattattggggccagggaaccctcgtgaccgtgtcctctacgcgtggaatgaggactgaggatcttcccaaagctgtcgtctttctcgaaccccaatggtatcgggtgctcgaaaaagactctgtgacactgaaatgccaaggggcctactctcccgaggacaactccacacagtggtttcataatgagtccctcatcagctctcaggccagctcttatttcattgatgccgctacagtggacgactccggcgagtatcggtgtcagaccaatctgtctacactgtctgaccccgtgcagcttgaggtccacattggatggttgctcttgcaagccccacgctgggttttcaaagaggaagatccaatccatctgcggtgccacagctggaaaaacaccgctctccacaaagtcacatacctgcaaaatggcaaaggacgcaaatacttccatcacaattccgatttttacattccgaaggctaccctgaaagacagcggcagctatttctgccggggactcgtcggctccaagaatgtgtcctccgaaaccgtgaatatcacgattacccaaggactggctgtgcctacaatctctagcttctttccgcctggataccaagtctccttctgtcttgtgatggtcctcctgtttgctgtggacacaggactgtacttttcc

SEQ ID NO: 1714 - DNA, 1428 bp, synthetic construct
  source 1..1428: mol_type = other DNA
atggccttaccagtgaccgccttgctcctgccgctggccttgctgctccacgccgccaggccggacatcctgctgacccagagccccgtgatcctgtccgtgtctcctggcgagagagtgtccttcagctgtcgggccagccagagcatcggcaccaacatccactggtatcagcagcggaccaacggcagccccagactgctgattaagtacgccagcgagtccatcagcggcatccccagcagattttccggcagcggctccggcaccgacttcaccctgagcatcaacagcgtggaaagcgaggacattgccgactactactgccagcagaacaacaactggcccaccaccttcggagccggcaccaagctggaactgaagggcggaggcggaagtggaggcggaggatctggcggcggaggctctcaggtgcagctgaagcagagcggacctggcctggtgcagcctagccagagcctgtccatcacctgtaccgtgtccggcttcagcctgaccaactacggcgtgcactgggtgcgccagagccctggaaaaggactggaatggctgggagtgatttggagcggcggcaacaccgactacaacacccccttcaccagcagactgtctatcaacaaggacaacagcaagagccaggtgttcttcaagatgaacagcctccagagcaacgacaccgccatctactactgtgctagagccctgacctactatgactacgagttcgcctactggggccagggcacactcgtgacagtgtctgctacgcgtggaatgaggactgaggatcttcccaaagctgtcgtctttctcgaaccccaatggtatcgggtgctcgaaaaagactctgtgacactgaaatgccaaggggcctactctcccgaggacaactccacacagtggtttcataatgagtccctcatcagctctcaggccagctcttatttcattgatgccgctacagtggacgactccggcgagtatcggtgtcagaccaatctgtctacactgtctgaccccgtgcagcttgaggtccacattggatggttgctcttgcaagccccacgctgggttttcaaagaggaagatccaatccatctgcggtgccacagctggaaaaacaccgctctccacaaagtcacatacctgcaaaatggcaaaggacgcaaatacttccatcacaattccgatttttacattccgaaggctaccctgaaagacagcggcagctatttctgccggggactcgtcggctccaagaatgtgtcctccgaaaccgtgaatatcacgattacccaaggactggctgtgcctacaatctctagcttctttccgcctggataccaagtctccttctgtcttgtgatggtcctcctgtttgctgtggacacaggactgtacttttcc

SEQ ID NO: 1715 - DNA, 1428 bp, synthetic construct
  source 1..1428: mol_type = other DNA
atggccttaccagtgaccgccttgctcctgccgctggccttgctgctccacgccgccaggccggagatccagctggtgcagagcggagccgaagtgaagaagcctggcgagagcctgcggatcagctgcaagggcagcggcttcaacatcgaggactactacatccactgggtgcgccagatgcccggcaagggcctggaatggatgggcagaatcgaccccgagaacgacgagactaagtacggccccatcttccagggccacgtgaccatcagcgccgacaccagcatcaacaccgtgtacctccagtggtccagcctgaaggccagcgacaccgccatgtactactgcgcctttagaggcggcgtgtactggggccagggcaccacagtgacagtgtctagcggcggaggcggaagtggaggcggaggatctggcggcggaggctctgatgtcgtgatgacccagagccccgacagcctggctgtgtctctgggagagagagccaccatcaactgcaagtccagccagtccctgctggacagcgacggcaagacctacctgaactggctccagcagaagcccggccagccccccaagagactgatctccctggtgtccaagctggactccggcgtgcccgatagattttccggctctggcagcggcaccgacttcaccctgacaatcagctcccttcaggccgaggacgtggccgtgtactattgctggcagggcacacacttccccggcacctttggcggaggcaccaaggtggaaatcaagacgcgtggaatgaggactgaggatcttcccaaagctgtcgtctttctcgaaccccaatggtatcgggtgctcgaaaaagactctgtgacactgaaatgccaaggggcctactctcccgaggacaactccacacagtggtttcataatgagtccctcatcagctctcaggccagctcttatttcattgatgccgctacagtggacgactccggcgagtatcggtgtcagaccaatctgtctacactgtctgaccccgtgcagcttgaggtccacattggatggttgctcttgcaagccccacgctgggttttcaaagaggaagatccaatccatctgcggtgccacagctggaaaaacaccgctctccacaaagtcacatacctgcaaaatggcaaaggacgcaaatacttccatcacaattccgatttttacattccgaaggctaccctgaaagacagcggcagctatttctgccggggactcgtcggctccaagaatgtgtcctccgaaaccgtgaatatcacgattacccaaggactggctgtgcctacaatctctagcttctttccgcctggataccaagtctccttctgtcttgtgatggtcctcctgtttgctgtggacacaggactgtacttttcc

SEQ ID NO: 1716 - DNA, 1452 bp, synthetic construct
  source 1..1452: mol_type = other DNA
atggccttaccagtgaccgccttgctcctgccgctggccttgctgctccacgccgccaggccggagctgcagatgacccagagccctagcagcctgtctgccagcgtgggcgacagagtgaccatcacctgtagagccagccagagcatcagcagctacctgaactggtatcagcagaagcccggccagccccccaaactgctgatctactgggccagcaccagagaaagcggcgtgcccgatagattcagcggcagcgagagcggcaccaactacaccctgaccatcagctccctgcagcccgaggacttcgccacctacttttgccagcagagcgacagcctgcccatcacctttggacagggcacccggctggacattcagggcggaggcggaagtggaggcggaggatctggcggcggaggctctgaggtgcaactgctggaatctgggggcggagtggtgcagcctggcagaagcctgagactgagctgtgccgccagcggcttcaccttcagctcctacggaatgcactgggtgcgccaggcccctggcaaaggactggaatgggtggccgtgatctcctacgacggcagcaacaagtactacgccgacagcgtgaagggccggttcaccatcagccgggacaacagcaagaacaccctgtacctgcagatgaacagcctgcgggccgaggacaccgccgtgtactactgcgccaaggatatgggctggggcagcggctggcggccttactactactacggcatggacgtgtggggccagggcaccaccgtgacagtgtcatctacgcgtggaatgaggactgaggatcttcccaaagctgtcgtctttctcgaaccccaatggtatcgggtgctcgaaaaagactctgtgacactgaaatgccaaggggcctactctcccgaggacaactccacacagtggtttcataatgagtccctcatcagctctcaggccagctcttatttcattgatgccgctacagtggacgactccggcgagtatcggtgtcagaccaatctgtctacactgtctgaccccgtgcagcttgaggtccacattggatggttgctcttgcaagccccacgctgggttttcaaagaggaagatccaatccatctgcggtgccacagctggaaaaacaccgctctccacaaagtcacatacctgcaaaatggcaaaggacgcaaatacttccatcacaattccgatttttacattccgaaggctaccctgaaagacagcggcagctatttctgccggggactcgtcggctccaagaatgtgtcctccgaaaccgtgaatatcacgattacccaaggactggctgtgcctacaatctctagcttctttccgcctggataccaagtctccttctgtcttgtgatggtcctcctgtttgctgtggacacaggactgtacttttcc

SEQ ID NO: 1717 - DNA, 1449 bp, synthetic construct
  source 1..1449: mol_type = other DNA
atggccttaccagtgaccgccttgctcctgccgctggccttgctgctccacgccgccaggccggagcttgtgatgacccagagccccagcagcctgacagtgacagccggcgagaaagtgaccatgagctgcaagagcagccagagcctgctgaacagcggcaaccagaagaactacctgacctggtatcagcagaagcccggccagccccccaagctgctgatctactgggccagcaccagagaaagcggcgtgcccgatagattcaccggctctggcagcggcaccgacttcaccctgacaatcagcagcgtgcaggccgaggacctggccgtgtactactgccagaacgactacagctaccccctgaccttcggagccggcaccaagctggaaatcaagggcggaggcggaagtggaggcggaggatctggcggcggaggctctgaagtgcagctgctggaacagtctggcgccgaacttgtgcggcctggcaccagcgtgaagatcagctgtaaagccagcggctacgccttcaccaactactggctgggctgggtcaagcagaggcctggacacggcctggaatggatcggcgacatctttcccggctccggcaacatccactacaacgagaagttcaagggcaaggccaccctgaccgccgacaagtctagcagcaccgcctacatgcagctgtccagcctgacctttgaggacagcgccgtgtatttctgtgcccggctgcggaactgggacgagcccatggattattggggccagggcaccaccgtgaccgtgtctagtacgcgtggaatgaggactgaggatcttcccaaagctgtcgtctttctcgaaccccaatggtatcgggtgctcgaaaaagactctgtgacactgaaatgccaaggggcctactctcccgaggacaactccacacagtggtttcataatgagtccctcatcagctctcaggccagctcttatttcattgatgccgctacagtggacgactccggcgagtatcggtgtcagaccaatctgtctacactgtctgaccccgtgcagcttgaggtccacattggatggttgctcttgcaagccccacgctgggttttcaaagaggaagatccaatccatctgcggtgccacagctggaaaaacaccgctctccacaaagtcacatacctgcaaaatggcaaaggacgcaaatacttccatcacaattccgatttttacattccgaaggctaccctgaaagacagcggcagctatttctgccggggactcgtcggctccaagaatgtgtcctccgaaaccgtgaatatcacgattacccaaggactggctgtgcctacaatctctagcttctttccgcctggataccaagtctccttctgtcttgtgatggtcctcctgtttgctgtggacacaggactgtacttttcc

SEQ ID NO: 1718 - DNA, 1443 bp, synthetic construct
  source 1..1443: mol_type = other DNA
atggccttaccagtgaccgccttgctcctgccgctggccttgctgctccacgccgccaggccggacatccaaatgacacagagtccttctagtttgagtgcgagcgtgggggacagggtgaccattacctgcagggccagccagagcataagctcataccttaattggtaccagcaaaaaccaggtaaggcccctaagctcctgatctacgcggcctcttcacttcaatctggggtcccttcccgcttcagtggctccggcagcggcaccgacttcacgctcactatatcaagtctgcagcctgaggatctcgccacctattactgtcaacaaagttattccacccctttcacctttggaccgggcacgaaagtggatattaagggcggaggcggaagtggaggcggaggatctggcggcggaggctctgtgcacgaggtccagcttgtgcagtccggggcagaggtcaagaagcctggttctagcgtaaaagtgagttgcaaagcctcaggtgggacattttcatcctacgcgatcagttgggttagacaggctcctggtcaagggctggaatggatgggcggaattattccaatcttcggaacagcgaattacgcgcagaagttccagggtagagtaaccatcactgctgacaagtccacctccaccgcatacatggaattgtctagtctccggagcgaggatacggcggtgtattattgtgctacgttcgccctgtttggcttccgcgaacaggctttcgacatctgggggcagggcacgacagtcacggttagtagtacgcgtggaatgaggactgaggatcttcccaaagctgtcgtctttctcgaaccccaatggtatcgggtgctcgaaaaagactctgtgacactgaaatgccaaggggcctactctcccgaggacaactccacacagtggtttcataatgagtccctcatcagctctcaggccagctcttatttcattgatgccgctacagtggacgactccggcgagtatcggtgtcagaccaatctgtctacactgtctgaccccgtgcagcttgaggtccacattggatggttgctcttgcaagccccacgctgggttttcaaagaggaagatccaatccatctgcggtgccacagctggaaaaacaccgctctccacaaagtcacatacctgcaaaatggcaaaggacgcaaatacttccatcacaattccgatttttacattccgaaggctaccctgaaagacagcggcagctatttctgccggggactcgtcggctccaagaatgtgtcctccgaaaccgtgaatatcacgattacccaaggactggctgtgcctacaatctctagcttctttccgcctggataccaagtctccttctgtcttgtgatggtcctcctgtttgctgtggacacaggactgtacttttcc

SEQ ID NO: 1719 - DNA, 1425 bp, synthetic construct
  source 1..1425: mol_type = other DNA
atggccttaccagtgaccgccttgctcctgccgctggccttgctgctccacgccgccaggccgtacatccacgtgacacagagccctagcagcctgtccgtgtccatcggcgatagagtgaccatcaactgccagacctctcaaggcgtgggcagcgacctgcactggtatcagcacaaacctggcagagcccctaagctgctgatccaccatgccagctctgtggaagatggcgtgcccagcagattttccggcaccggatttcacaccagcttcaacctgacaatcaacgacctccaggccgacgacatcggcacctactactgtcaagtgctccagagcttcggcagaggcagcagactggatacaaaaggcggaggcggaagtggaggcggaggatctggcggcggaggctctagggcacacctggtgcagtctggcaccgccatgaagaaacctggcgcttccgtcagagtgtcctgtcagacaagcggctacaccttcacagcccacatcctgttctggttcagacaggccccaggcagaggactggaatgggtcggatggatcaagccccagtacggggccgtgaatttcggcggaggcttcagagacagagtgaccctgaccagggacgtgtaccgggaaatcgcctacatggacatccggggcctgaagcctgatgacaccgccgtgtactactgcgccagggatagaagctacggcgacagctcttgggctctcgatgcttggggacagggcacaacagtggtggtgtctgctacgcgtggaatgaggactgaggatcttcccaaagctgtcgtctttctcgaaccccaatggtatcgggtgctcgaaaaagactctgtgacactgaaatgccaaggggcctactctcccgaggacaactccacacagtggtttcataatgagtccctcatcagctctcaggccagctcttatttcattgatgccgctacagtggacgactccggcgagtatcggtgtcagaccaatctgtctacactgtctgaccccgtgcagcttgaggtccacattggatggttgctcttgcaagccccacgctgggttttcaaagaggaagatccaatccatctgcggtgccacagctggaaaaacaccgctctccacaaagtcacatacctgcaaaatggcaaaggacgcaaatacttccatcacaattccgatttttacattccgaaggctaccctgaaagacagcggcagctatttctgccggggactcgtcggctccaagaatgtgtcctccgaaaccgtgaatatcacgattacccaaggactggctgtgcctacaatctctagcttctttccgcctggataccaagtctccttctgtcttgtgatggtcctcctgtttgctgtggacacaggactgtacttttcc

SEQ ID NO: 1720 - DNA, 1440 bp, synthetic construct
  source 1..1440: mol_type = other DNA
atggccttaccagtgaccgccttgctcctgccgctggccttgctgctccacgccgccaggccggacatcgtgctgacccagagccctctgagcctggccgtgtctctgggacagcctgccatcatcagctgcaaggccagccagagcgtgtcctttgccggcacctctctgatgcactggtatcaccagaagcccggccagcagcccagactgctgatctacagagccagcaacctggaagccggcgtgcccgatagattttccggcagcggcagcaagaccgacttcaccctgaccatcagccccgtggaagccgaagatgccgccacctactactgccagcagagcagagagtacccctacaccttcggcggaggcaccaagctggaaatcaagaggggcggaggcggaagtggaggcggaggatctggcggcggaggctctcaggtccaactggtgcagagcggagccgaggtcgtgaagcctggcgcttccgtgaagattagctgcaaagccagcggctacacctttaccggctactttatgaactgggtcaagcagagccctggccagagcctggaatggatcggcagaatccacccctacgacggcgacaccttctacaaccagaagttccagggcaaggccaccctgacagtggacaagagcagcaacaccgcccacatggaactgctgagcctgaccagcgaggacttcgccgtgtactactgcaccagatacgacggcagccgggctatggactattggggccagggcaccaccgtgaccgtgtctagtacgcgtggaatgaggactgaggatcttcccaaagctgtcgtctttctcgaaccccaatggtatcgggtgctcgaaaaagactctgtgacactgaaatgccaaggggcctactctcccgaggacaactccacacagtggtttcataatgagtccctcatcagctctcaggccagctcttatttcattgatgccgctacagtggacgactccggcgagtatcggtgtcagaccaatctgtctacactgtctgaccccgtgcagcttgaggtccacattggatggttgctcttgcaagccccacgctgggttttcaaagaggaagatccaatccatctgcggtgccacagctggaaaaacaccgctctccacaaagtcacatacctgcaaaatggcaaaggacgcaaatacttccatcacaattccgatttttacattccgaaggctaccctgaaagacagcggcagctatttctgccggggactcgtcggctccaagaatgtgtcctccgaaaccgtgaatatcacgattacccaaggactggctgtgcctacaatctctagcttctttccgcctggataccaagtctccttctgtcttgtgatggtcctcctgtttgctgtggacacaggactgtacttttcc

SEQ ID NO: 1721 - DNA, 1428 bp, synthetic construct
  source 1..1428: mol_type = other DNA
atggccttaccagtgaccgccttgctcctgccgctggccttgctgctccacgccgccaggccggacgttgtgatgacccagacccccctgagcctgcctgtgacacctggcgaacctgccagcatcagctgtcggagcagccagagcctggtgcacagaaacggcaacacctacctgcactggtatctccagaagcccggccagagccccaagctgctgatccacaaggtgtccaacagattcagcggcgtgcccgacagattctccggcagcggctctggcaccgacttcaccctgaagatcagccgggtggaagccgaggacctgggcgtgtacttctgtagccagagcacccatgtgccccccctgacatttggagccggcaccaagctggaactgaagggcggaggcggaagtggaggcggaggatctggcggcggaggctctgaagtgcagctggtgcagtctggcgctgaggtggaaaagcctggggccagcgtgaagattagctgcaaggccagcggcagcagcttcaccggctacaacatgaactgggtgcgccagaacatcggcaagagcctggaatggatcggagccatcgacccctactacggcggcaccagctacaaccagaagttcaagggcagagccaccctgaccgtggacaagagcaccagcaccgcctacatgcacctgaagtccctgcggagcgaggacaccgccgtgtactactgtgtgtccggcatggaatattggggccagggcaccagcgtgaccgtgtctagtacgcgtggaatgaggactgaggatcttcccaaagctgtcgtctttctcgaaccccaatggtatcgggtgctcgaaaaagactctgtgacactgaaatgccaaggggcctactctcccgaggacaactccacacagtggtttcataatgagtccctcatcagctctcaggccagctcttatttcattgatgccgctacagtggacgactccggcgagtatcggtgtcagaccaatctgtctacactgtctgaccccgtgcagcttgaggtccacattggatggttgctcttgcaagccccacgctgggttttcaaagaggaagatccaatccatctgcggtgccacagctggaaaaacaccgctctccacaaagtcacatacctgcaaaatggcaaaggacgcaaatacttccatcacaattccgatttttacattccgaaggctaccctgaaagacagcggcagctatttctgccggggactcgtcggctccaagaatgtgtcctccgaaaccgtgaatatcacgattacccaaggactggctgtgcctacaatctctagcttctttccgcctggataccaagtctccttctgtcttgtgatggtcctcctgtttgctgtggacacaggactgtacttttcc

SEQ ID NO: 1722 - DNA, 1422 bp, synthetic construct
  source 1..1422: mol_type = other DNA
atggccttaccagtgaccgccttgctcctgccgctggccttgctgctccacgccgccaggccggagatcgtgatgacccagacccctgccaccctgtctgtgtctgccggcgagagagtgaccattacctgcaaggccagccagagcgtgtccaacgacgtgacctggtatcagcagaagcccggccaggcccccagactgctgatctacagcgccagcaacagatacagcggcgtgcccgccagattttccggcagcggctacggcaccgagttcaccttcaccatcagcagcgtgcagagcgaggacttcgccgtgtacttctgtcagcaagactacagcagcttcggccagggcaccaagctggaaatcaagaggggcggaggcggaagtggaggcggaggatctggcggcggaggctctcaggtgcagctggtggaatctggacctggcgtggtgcagcctggcagaagcctgagaatcagctgtgccgtgtccggcttcagcgtgaccaactacggcgtgcactgggtgcgccagccacctggaaaaggactggaatggctgggcgtgatctgggctggcggcatcaccaactacaacagcgccttcatgtcccggctgaccatctccaaggacaacagcaagaacaccgtgtacctccagatgaacagcctgcgggccgaggacaccgccatgtactactgtgcttccagaggcggccactacggctacgccctggattattggggccagggaaccctcgtgaccgtgtcctctacgcgtggaatgaggactgaggatcttcccaaagctgtcgtctttctcgaaccccaatggtatcgggtgctcgaaaaagactctgtgacactgaaatgccaaggggcctactctcccgaggacaactccacacagtggtttcataatgagtccctcatcagctctcaggccagctcttatttcattgatgccgctacagtggacgactccggcgagtatcggtgtcagaccaatctgtctacactgtctgaccccgtgcagcttgaggtccacattggatggttgctcttgcaagccccacgctgggttttcaaagaggaagatccaatccatctgcggtgccacagctggaaaaacaccgctctccacaaagtcacatacctgcaaaatggcaaaggacgcaaatacttccatcacaattccgatttttacattccgaaggctaccctgaaagacagcggcagctatttctgccggggactcgtcggctccaagaatgtgtcctccgaaaccgtgaatatcacgattacccaaggactggctgtgcctacaatctctagcttctttccgcctggataccaagtctccttctgtcttgtgatggtcctcctgtttgctgtggacacaggactgtacttttcc

SEQ ID NO: 1723 - DNA, 1431 bp, synthetic construct
  source 1..1431: mol_type = other DNA
atggccttaccagtgaccgccttgctcctgccgctggccttgctgctccacgccgccaggccggacatccagatgacccagaccgccagcagcctgcctgcctctctgggcgacagagtgaccatctcctgtagcgccagccaggacatcagcaactacctgaactggtatcagcagaaacccgacggcaccgtgaagctgctgatcttctacagcagcaacctgcacagcggcgtgcccagcagattttctggcggcggaagcggcaccgactacagcctgaccatcagcaatctggaacccgaggacattgccacctacttttgccaccagtacagcaagctgccctggacctttggcggaggcaccaagctggaaatcaagagaggcggaggcggaagtggaggcggaggatctggcggcggaggctctgaagtgaccctggtggaaagcggcggagacttcgtgaagcctggcggctctctgaaggtgtcctgtgccgccagcggcttcgcctttagccactacgccatgagctgggtgcgccagacccctgccaagagactggaatgggtggcctacatcagcagcggcggctccggcacctactactccgatagcgtgaagggccggttcaccatcagccgggacaacgccaagaacaccctgtacctccagatgcggagcctgcggagcgaggacagcgccatgtatttctgcaccagagtgaagctgggcacctattacttcgactcttggggccagggcaccaccctgaccgtgtcatctacgcgtggaatgaggactgaggatcttcccaaagctgtcgtctttctcgaaccccaatggtatcgggtgctcgaaaaagactctgtgacactgaaatgccaaggggcctactctcccgaggacaactccacacagtggtttcataatgagtccctcatcagctctcaggccagctcttatttcattgatgccgctacagtggacgactccggcgagtatcggtgtcagaccaatctgtctacactgtctgaccccgtgcagcttgaggtccacattggatggttgctcttgcaagccccacgctgggttttcaaagaggaagatccaatccatctgcggtgccacagctggaaaaacaccgctctccacaaagtcacatacctgcaaaatggcaaaggacgcaaatacttccatcacaattccgatttttacattccgaaggctaccctgaaagacagcggcagctatttctgccggggactcgtcggctccaagaatgtgtcctccgaaaccgtgaatatcacgattacccaaggactggctgtgcctacaatctctagcttctttccgcctggataccaagtctccttctgtcttgtgatggtcctcctgtttgctgtggacacaggactgtacttttcc

SEQ ID NO: 1724 - DNA, 1437 bp, synthetic construct
  source 1..1437: mol_type = other DNA
atggccttaccagtgaccgccttgctcctgccgctggccttgctgctccacgccgccaggccgcagttcgtgctgacccagagcccttctgcctctgctgccctgggagcctctgccaagctgacctgtacactgagcagcgcccacaagacctacaccatcgactggtatcagcagcagaagggaaaggcccccagatacctgatccaagtgaagtccgacggcacctacacaaaggccaccggcgtgcccgatagattcagcggcagtagcagcggagccgatagatacctgattatccccagcgtgcaggccgacgacgaggccgattactactgcggcaccgattacaccggcggctacgtgttcggcggaggcacacaactgaccgtgacaggcggaggcggaagtggaggcggaggatctggcggcggaggctctgagcaactgaaagagtctggcggcggactgttcaagcccaccgataccctgaccctgacctgcaccgtgtccggcttcagcctgagctactacggcgtgaactgggtgcgccaggcccctggcaatggcctggaatggatcggcacaatcggcggcagcggcgacacctactatgcctcttgggccaagtccagaagcaccatcatcagaaacaccaacgagaacaccgtgaccctgaagatgaccagcctgacagccgccgacaccgccacctacttttgcgtcagatacgccaacatcggctacgagtatttcaacgtgtggggacccggcaccctcgtgaccgtgtcatctacgcgtggaatgaggactgaggatcttcccaaagctgtcgtctttctcgaaccccaatggtatcgggtgctcgaaaaagactctgtgacactgaaatgccaaggggcctactctcccgaggacaactccacacagtggtttcataatgagtccctcatcagctctcaggccagctcttatttcattgatgccgctacagtggacgactccggcgagtatcggtgtcagaccaatctgtctacactgtctgaccccgtgcagcttgaggtccacattggatggttgctcttgcaagccccacgctgggttttcaaagaggaagatccaatccatctgcggtgccacagctggaaaaacaccgctctccacaaagtcacatacctgcaaaatggcaaaggacgcaaatacttccatcacaattccgatttttacattccgaaggctaccctgaaagacagcggcagctatttctgccggggactcgtcggctccaagaatgtgtcctccgaaaccgtgaatatcacgattacccaaggactggctgtgcctacaatctctagcttctttccgcctggataccaagtctccttctgtcttgtgatggtcctcctgtttgctgtggacacaggactgtacttttcc

SEQ ID NO: 1725 - DNA, 1434 bp, synthetic construct
  source 1..1434: mol_type = other DNA
atggccttaccagtgaccgccttgctcctgccgctggccttgctgctccacgccgccaggccggacatccagatgacccagagccccagcagcctgtctgccagcgtgggcgacagagtgaccatcacctgtagagccagccagggcatcagctcttggctggcctggtatcagcagaagcccgagaaggcccccaagagcctgatctacgccgcctctagtctccagagcggcgtgcccagcagattttctggcagcggctccggcaccgacttcaccctgacaatcagctccctccagcccgaggacttcgccacctactactgccagcagtacaacagctacccccccacctttggcggaggcaccaaggtggaaatcaagggcggaggcggaagtggaggcggaggatctggcggcggaggctctgaagtgcaactggtggaatcaggcggcggactggtgcagcctggcgagtctctgagactgagctgtgtggcctccggcttcaccttcagccggtacaagatgaactgggtgcgccaggcccctggcaagggactggaatgggtgtcctacatcagccgcagcggcagagacatctactacgccgacagcgtgaagggccggttcaccatcagcagagacaacgccaagaacagcctgtacctccagatgaactccctgcgggacgaggacaccgccgtgtactactgtgccggaaccgtgaccacctattactacttcggcatggacgtgtggggccacggcaccaccgtgacagtgtcatctacgcgtggaatgaggactgaggatcttcccaaagctgtcgtctttctcgaaccccaatggtatcgggtgctcgaaaaagactctgtgacactgaaatgccaaggggcctactctcccgaggacaactccacacagtggtttcataatgagtccctcatcagctctcaggccagctcttatttcattgatgccgctacagtggacgactccggcgagtatcggtgtcagaccaatctgtctacactgtctgaccccgtgcagcttgaggtccacattggatggttgctcttgcaagccccacgctgggttttcaaagaggaagatccaatccatctgcggtgccacagctggaaaaacaccgctctccacaaagtcacatacctgcaaaatggcaaaggacgcaaatacttccatcacaattccgatttttacattccgaaggctaccctgaaagacagcggcagctatttctgccggggactcgtcggctccaagaatgtgtcctccgaaaccgtgaatatcacgattacccaaggactggctgtgcctacaatctctagcttctttccgcctggataccaagtctccttctgtcttgtgatggtcctcctgtttgctgtggacacaggactgtacttttcc

SEQ ID NO: 1726 - DNA, 1431 bp, synthetic construct
  source 1..1431: mol_type = other DNA
atggccttaccagtgaccgccttgctcctgccgctggccttgctgctccacgccgccaggccgcagtctgtggtcacacagccacctagcatgtctgccgctccaggccagcaagtgaccatctcttgtagcggcggcaacagcaacatcgagcggaactacgtgtcctggtatctgcaactgcctggcacagcccctaagctggtcatcttcgacaacgacagacggcccagcggcatccccgatagattttctggcagcaagagcggcaccagcgccacactgggaattaccggacttcagacaggcgacgaggccgactactactgtggcacatgggactctagcctgagaggctgggttttcggcggaggcacaaagctgacagtgcttggtggcggaggcggaagtggaggcggaggatctggcggcggaggctctgaagtgcagctcgttgagtctggcggcggactgattcaacctggcggaagcctgagactgagctgtgccgcttccggcttcaccttcagcaactacgccatgaactgggttcgacaggcccctggcaaaggactggaatgggtgtccaccatcaacggcagaggcagcagcaccatctacgccgattctgtgaagggcagattcaccatcagccgggacaacagcaagaacaccctgtacctccagatgaactccctgagagccgaggacaccgccacctattactgtgcccggtacatcagcagaggactgggcgattcttggggccagggcacactggttacagtgacgcgtggaatgaggactgaggatcttcccaaagctgtcgtctttctcgaaccccaatggtatcgggtgctcgaaaaagactctgtgacactgaaatgccaaggggcctactctcccgaggacaactccacacagtggtttcataatgagtccctcatcagctctcaggccagctcttatttcattgatgccgctacagtggacgactccggcgagtatcggtgtcagaccaatctgtctacactgtctgaccccgtgcagcttgaggtccacattggatggttgctcttgcaagccccacgctgggttttcaaagaggaagatccaatccatctgcggtgccacagctggaaaaacaccgctctccacaaagtcacatacctgcaaaatggcaaaggacgcaaatacttccatcacaattccgatttttacattccgaaggctaccctgaaagacagcggcagctatttctgccggggactcgtcggctccaagaatgtgtcctccgaaaccgtgaatatcacgattacccaaggactggctgtgcctacaatctctagcttctttccgcctggataccaagtctccttctgtcttgtgatggtcctcctgtttgctgtggacacaggactgtacttttcc

SEQ ID NO: 1727 - DNA, 1434 bp, synthetic construct
  source 1..1434: mol_type = other DNA
atggccttaccagtgaccgccttgctcctgccgctggccttgctgctccacgccgccaggccgcagtctgtgctgacacagcctccatctgcctctggcacacctggacagagagtgaccatcagctgtagcggcagcagaagcaacgtcggcggcaactacgtgttctggtatcagcaggtcccaggcgctacccctaagctgctgatctacagaagcaatcagcggcctagcggcgtgcccgatagatttgccggaagcaagagcggcagctctgccagccttgccatctctggactgagaagcgaggacgaggccgactactactgtgccacctgggatgatagcctgagcggcttcgtgtttggcaccggcaccaaagtgacagtgcttggtggcggaggcggaagtggaggcggaggatctggcggcggaggctctgaagttcagctggttgaatctggcggcggactggttaagcctggcggatctctgagactgtcttgtgccgccagcggcttcaccttcagcgattactacatgagctggatcagacaggcccctggcaaaggactggaatgggtgtcctacatcagcagcagcggctccaccatctactacgccgatagcgtgaagggcagattcaccatcagccgggacaacgccaagaacagcctgtacctccagatgaactccctgagagccgaggacaccgccgtgtactattgcgccagaggctacggcaaagcctacgatcaatggggccagggcacactggtcaccgtttcttctacgcgtggaatgaggactgaggatcttcccaaagctgtcgtctttctcgaaccccaatggtatcgggtgctcgaaaaagactctgtgacactgaaatgccaaggggcctactctcccgaggacaactccacacagtggtttcataatgagtccctcatcagctctcaggccagctcttatttcattgatgccgctacagtggacgactccggcgagtatcggtgtcagaccaatctgtctacactgtctgaccccgtgcagcttgaggtccacattggatggttgctcttgcaagccccacgctgggttttcaaagaggaagatccaatccatctgcggtgccacagctggaaaaacaccgctctccacaaagtcacatacctgcaaaatggcaaaggacgcaaatacttccatcacaattccgatttttacattccgaaggctaccctgaaagacagcggcagctatttctgccggggactcgtcggctccaagaatgtgtcctccgaaaccgtgaatatcacgattacccaaggactggctgtgcctacaatctctagcttctttccgcctggataccaagtctccttctgtcttgtgatggtcctcctgtttgctgtggacacaggactgtacttttcc

SEQ ID NO: 1728 - DNA, 1431 bp, synthetic construct
  source 1..1431: mol_type = other DNA
atggccttaccagtgaccgccttgctcctgccgctggccttgctgctccacgccgccaggccggacatccagatgacccagagccccagcagcctgtctgccagcgtgggcgacagagtgaccatcacctgtagagccagccaggacgtgaacaccgccgtggcctggtatcagcagaagcctggcaaggcccccaagctgctgatctacagcgccagcttcctggaaagcggcgtgcccagcagattcagcggaagcagaagcggcaccgacttcaccctgaccatcagctccctccagcccgaggacttcgccacctactactgccagcagcactacaccacccctcccaccttcggccagaccaaggtggaaatcaagagaggcggaggcggaagtggaggcggaggatctggcggcggaggctctgaagtgcaactggtggaatctggcggcggactggtgcagcctggcggatctctgagactgagctgtgccgccagcggcttcaacatcaaggacacctacatccactgggtgcgccaggcccctggaaagggactggaatgggtggcccggatctaccccaccaacggctacaccagatacgccgacagcgtgaagggccggttcaccatcagcgccgacaccagcaagaataccgcctacctccagatgaacagcctgcgggccgaggataccgccgtgtactactgctcaagatggggaggcgacggcttctacgctatggacgtgtggggccagggcacccttgtgaccgtgtcatctacgcgtggaatgaggactgaggatcttcccaaagctgtcgtctttctcgaaccccaatggtatcgggtgctcgaaaaagactctgtgacactgaaatgccaaggggcctactctcccgaggacaactccacacagtggtttcataatgagtccctcatcagctctcaggccagctcttatttcattgatgccgctacagtggacgactccggcgagtatcggtgtcagaccaatctgtctacactgtctgaccccgtgcagcttgaggtccacattggatggttgctcttgcaagccccacgctgggttttcaaagaggaagatccaatccatctgcggtgccacagctggaaaaacaccgctctccacaaagtcacatacctgcaaaatggcaaaggacgcaaatacttccatcacaattccgatttttacattccgaaggctaccctgaaagacagcggcagctatttctgccggggactcgtcggctccaagaatgtgtcctccgaaaccgtgaatatcacgattacccaaggactggctgtgcctacaatctctagcttctttccgcctggataccaagtctccttctgtcttgtgatggtcctcctgtttgctgtggacacaggactgtacttttcc

SEQ ID NO: 1729 - DNA, 1470 bp, synthetic construct
  source 1..1470: mol_type = other DNA
atggccttaccagtgaccgccttgctcctgccgctggccttgctgctccacgccgccaggccgcagtctgccctgacacagcctcctagcgcctctggctctcccggccagagcatcaccatcagctgtaccggcaccagcaacaacttcgtgtcctggtatcagcagcacgccggcaaggcccccaagctcgtgatctacgacgtgaacaagcggcccagcggcgtgcccgatagattcagcggcagcaagagcggcaacaccgccagcctgacagtgtctggcctccagaccgatgacgaggccgtgtactactgcggcagcctcgtgggcaactgggacgtgatctttggcggaggcaccaagctgaccgtgctgggcggaggcggaagtggaggcggaggatctggcggcggaggctctcagccccagctccaggaatctggccccacactggtggaagccagcgagacactgagcctgacctgtgccgtgtccggcgattctaccgccgcctgcaatagcttctggggctgggtgcgccagcctcctggaaagggactggaatgggtgggaagcctgagccactgcgccagctattggaaccggggctggacctaccacaaccccagcctgaagtccagactgaccctggccctggacacccccaagaacctggtgttcctgaagctgaacagcgtgacagccgccgacaccgccacctactactgtgccagatttggcggcgaggtgctgcggtacaccgactggcctaaacctgcctgggtggacctgtggggcagaggaacactcgtgaccgtgtccagcacgcgtggaatgaggactgaggatcttcccaaagctgtcgtctttctcgaaccccaatggtatcgggtgctcgaaaaagactctgtgacactgaaatgccaaggggcctactctcccgaggacaactccacacagtggtttcataatgagtccctcatcagctctcaggccagctcttatttcattgatgccgctacagtggacgactccggcgagtatcggtgtcagaccaatctgtctacactgtctgaccccgtgcagcttgaggtccacattggatggttgctcttgcaagccccacgctgggttttcaaagaggaagatccaatccatctgcggtgccacagctggaaaaacaccgctctccacaaagtcacatacctgcaaaatggcaaaggacgcaaatacttccatcacaattccgatttttacattccgaaggctaccctgaaagacagcggcagctatttctgccggggactcgtcggctccaagaatgtgtcctccgaaaccgtgaatatcacgattacccaaggactggctgtgcctacaatctctagcttctttccgcctggataccaagtctccttctgtcttgtgatggtcctcctgtttgctgtggacacaggactgtacttttcc

SEQ ID NO: 1730 - DNA, 1455 bp, synthetic construct
  source 1..1455: mol_type = other DNA
atggccttaccagtgaccgccttgctcctgccgctggccttgctgctccacgccgccaggccggagctggtgctgacacagagccctggcaccctgtctctgtctgccggcgaaagagccaccctgagctgtagagccagccagagcgtgtcctctggcagcctggcttggtatcagcagaagccaggccaggcccccagactgctgatctacggcgcttctaccagagccaccggcatccccgatagattcagcggctctggctccggcaccgacttcaccctgacaatcggcagactggaacccgaggacctggccgtgtactactgccagcagtacggcaccagcccctacacattcggccagggcaccaagctggaaatcggcggaggcggaagtggaggcggaggatctggcggcggaggctctctggaacagagcggagccgaagtgaagaaacccggcagcagcgtgcaggtgtcctgcaaagcaagcggcggcaccttctctatgtacggcttcaactgggtgcgccaggctcctggacacggcctggaatggatgggcggcatcatccccatcttcggcacctccaactacgcccagaaattccggggcagagtgaccttcaccgccgaccaggccacaagcaccgcctacatggaactgaccaacctgcggagcgacgacaccgccgtgtattattgcgccagagacttcggccccgactgggaggatggcgacagctacgatggcagcggcagaggcttcttcgacttctggggccagggaacccttgtgaccgtgtcctcaacgcgtggaatgaggactgaggatcttcccaaagctgtcgtctttctcgaaccccaatggtatcgggtgctcgaaaaagactctgtgacactgaaatgccaaggggcctactctcccgaggacaactccacacagtggtttcataatgagtccctcatcagctctcaggccagctcttatttcattgatgccgctacagtggacgactccggcgagtatcggtgtcagaccaatctgtctacactgtctgaccccgtgcagcttgaggtccacattggatggttgctcttgcaagccccacgctgggttttcaaagaggaagatccaatccatctgcggtgccacagctggaaaaacaccgctctccacaaagtcacatacctgcaaaatggcaaaggacgcaaatacttccatcacaattccgatttttacattccgaaggctaccctgaaagacagcggcagctatttctgccggggactcgtcggctccaagaatgtgtcctccgaaaccgtgaatatcacgattacccaaggactggctgtgcctacaatctctagcttctttccgcctggataccaagtctccttctgtcttgtgatggtcctcctgtttgctgtggacacaggactgtacttttcc

SEQ ID NO: 1731 - DNA, 1395 bp, synthetic construct
  source 1..1395: mol_type = other DNA
atggccttaccagtgaccgccttgctcctgccgctggccttgctgctccacgccgccaggccggacatccagatgacccagagccccagcagcctgtctgccagcgtgggcgacagagtgaccatcacctgtcaggccagccaggacatcaacaactacctgaactggtatcagcagaagcccggcaaggcccccaagctgctgatctacgacgccagcaatctgcagaccggcgtgcccagcagattttccggctctggcagcggcaccgacttcaccttcaccatcgaggacattgccacctactactgccagcagtacaccttcggccctggcaccaaggtggacatcaaaggcggaggcggaagtggaggcggaggatctggcggcggaggctctgaagtgcaactgctggaatctggcggcggactggtgcagcctggcggatctctgagactgagctgtgccgccagcggcttcacctttagctggtacagcatgacctgggtgcgccaggcccctggcaaaggactggaatgggtgtccagcatcgtgccctggggcgatttcacccagtacgccgatagcgtgaagggccggttcaccatcagccgggacaacagcaagaacaccctgtacctgcagatgaacagcctgcgggccgaggacaccgccgtgtactattgtgccaagggacctggctggggcagcttcgatctgtggggcagaggaacccttgtgaccgtgtccagcacgcgtggaatgaggactgaggatcttcccaaagctgtcgtctttctcgaaccccaatggtatcgggtgctcgaaaaagactctgtgacactgaaatgccaaggggcctactctcccgaggacaactccacacagtggtttcataatgagtccctcatcagctctcaggccagctcttatttcattgatgccgctacagtggacgactccggcgagtatcggtgtcagaccaatctgtctacactgtctgaccccgtgcagcttgaggtccacattggatggttgctcttgcaagccccacgctgggttttcaaagaggaagatccaatccatctgcggtgccacagctggaaaaacaccgctctccacaaagtcacatacctgcaaaatggcaaaggacgcaaatacttccatcacaattccgatttttacattccgaaggctaccctgaaagacagcggcagctatttctgccggggactcgtcggctccaagaatgtgtcctccgaaaccgtgaatatcacgattacccaaggactggctgtgcctacaatctctagcttctttccgcctggataccaagtctccttctgtcttgtgatggtcctcctgtttgctgtggacacaggactgtacttttcc

SEQ ID NO: 1732 - DNA, 1425 bp, synthetic construct
  source 1..1425: mol_type = other DNA
atggccttaccagtgaccgccttgctcctgccgctggccttgctgctccacgccgccaggccggacatccagatgacccagagccccagcagcctgtctgccagcgtgggcgacagagtgaccatcacctgtaccgccagcctgagcgtgtccagcacctacctgcactggtatcagcagaagcccggcagcagccccaagctgtggatctacagcaccagcaacctggcctccggcgtgcccagcagattttctggcagcggctctggcaccagctacaccctgaccatcagctccctccagcccgaggacttcgccacctactactgccaccagtaccacagaagccccctgacctttggcggaggcaccaaggtggaaatcaagagaggcggaggcggaagtggaggcggaggatctggcggcggaggctctgaagtgcaactggtggaatctggcggcggactggtgcagcctggcggatctctgagactgagctgtgccgccagcggcttcagcctgaccaaatacggcgtgcactgggtgcgccaggcccctggaaaaggactggaatgggtgggagtgaagtgggctggcggctccaccgactacaacagcgccctgatgagccggttcaccatcagcaaggacaacgccaagaacagcctgtacctccagatgaactccctgcgggccgaggacaccgccgtgtactactgtgccagagatcaccgggacgctatggactactggggccagggaacactcgtgaccgtgtcctctacgcgtggaatgaggactgaggatcttcccaaagctgtcgtctttctcgaaccccaatggtatcgggtgctcgaaaaagactctgtgacactgaaatgccaaggggcctactctcccgaggacaactccacacagtggtttcataatgagtccctcatcagctctcaggccagctcttatttcattgatgccgctacagtggacgactccggcgagtatcggtgtcagaccaatctgtctacactgtctgaccccgtgcagcttgaggtccacattggatggttgctcttgcaagccccacgctgggttttcaaagaggaagatccaatccatctgcggtgccacagctggaaaaacaccgctctccacaaagtcacatacctgcaaaatggcaaaggacgcaaatacttccatcacaattccgatttttacattccgaaggctaccctgaaagacagcggcagctatttctgccggggactcgtcggctccaagaatgtgtcctccgaaaccgtgaatatcacgattacccaaggactggctgtgcctacaatctctagcttctttccgcctggataccaagtctccttctgtcttgtgatggtcctcctgtttgctgtggacacaggactgtacttttcc

SEQ ID NO: 1733 - DNA, 1437 bp, synthetic construct
  source 1..1437: mol_type = other DNA
atggccttaccagtgaccgccttgctcctgccgctggccttgctgctccacgccgccaggccggacatccagatgacccagagccccagcagcctgtctgccagcgtgggcgacagagtgaccatcacatgcaaggccagccaggacgtgggaacagccgtggcctggtatcagcagaagcctggcaaggcccccaagctgctgatctacagcgccagctacagatccaccggcgtgcccagcagattttccggctctggcagcggcaccgacttcaccctgaccatctctagcctccagcccgaggacttcgccacctactactgccagcaccactactccgccccctggacatttggcggaggcaccaaggtggaaatcaagggcggaggcggaagtggaggcggaggatctggcggcggaggctctgaagtgcaactggtggaatcaggcggcggactggtgcagcctggcggatctctgagactgagctgtgccgccagcggcttcaccttcagcagaaacggcatgagctgggtgcgccaggcccctggaaaaggactggaatgggtggcaaccgtgtccagcggcggcagctacatctactacgccgacagcgtgaagggccggttcaccatctccagagacaacgccaagaacagcctgtacctccagatgaactccctgcgggccgaggacaccgccgtgtactattgtgccagacagggcaccaccgccctggctaccagattcttcgatgtgtggggccagggcaccctcgtgaccgtgtcatctacgcgtggaatgaggactgaggatcttcccaaagctgtcgtctttctcgaaccccaatggtatcgggtgctcgaaaaagactctgtgacactgaaatgccaaggggcctactctcccgaggacaactccacacagtggtttcataatgagtccctcatcagctctcaggccagctcttatttcattgatgccgctacagtggacgactccggcgagtatcggtgtcagaccaatctgtctacactgtctgaccccgtgcagcttgaggtccacattggatggttgctcttgcaagccccacgctgggttttcaaagaggaagatccaatccatctgcggtgccacagctggaaaaacaccgctctccacaaagtcacatacctgcaaaatggcaaaggacgcaaatacttccatcacaattccgatttttacattccgaaggctaccctgaaagacagcggcagctatttctgccggggactcgtcggctccaagaatgtgtcctccgaaaccgtgaatatcacgattacccaaggactggctgtgcctacaatctctagcttctttccgcctggataccaagtctccttctgtcttgtgatggtcctcctgtttgctgtggacacaggactgtacttttcc

SEQ ID NO: 1734 - DNA, 1425 bp, synthetic construct
  source 1..1425: mol_type = other DNA
atggccttaccagtgaccgccttgctcctgccgctggccttgctgctccacgccgccaggccggacatccagatgacccagagcttcagcagcctgagcgccagcgtgggcgacagagtgaccatcacctgtagagccagccaggacatcagcaactacctgaactggtatcagcagaagcccggcaaggcccccaagctgctgatctactacaccagcagactgcacagcggcgtgcccagcagattttctggcagcggctccggcaccgactacaccctgacaatcagctccctgcagcccgaggacttcgctacctacttctgtcagcaaggcaacaccctgccctggacctttggcggaggcaccaagctggaaatcaagagaggcggaggcggaagtggaggcggaggatctggcggcggaggctctgaagtgcaactggtgcagtccggcggagggctggtgcagagcggaggatctctgagactgagctgcagagccagcggctacaccttcacccggtactggatgctgtgggtgcgccagaggccaggcaagggactggaatgggtggccgagatcaacccccggaacgaccggaccaactacaacgagaagttcaagacccggttcaccatcagcgtggacagaagcaagaacaccctgtacctgcagatggacagcctgcgggccgaggataccgccgtgtacttttgtgctctgggaggcggctacgctatggactactggggccagggaacccttgtgaccgtgtcctctacgcgtggaatgaggactgaggatcttcccaaagctgtcgtctttctcgaaccccaatggtatcgggtgctcgaaaaagactctgtgacactgaaatgccaaggggcctactctcccgaggacaactccacacagtggtttcataatgagtccctcatcagctctcaggccagctcttatttcattgatgccgctacagtggacgactccggcgagtatcggtgtcagaccaatctgtctacactgtctgaccccgtgcagcttgaggtccacattggatggttgctcttgcaagccccacgctgggttttcaaagaggaagatccaatccatctgcggtgccacagctggaaaaacaccgctctccacaaagtcacatacctgcaaaatggcaaaggacgcaaatacttccatcacaattccgatttttacattccgaaggctaccctgaaagacagcggcagctatttctgccggggactcgtcggctccaagaatgtgtcctccgaaaccgtgaatatcacgattacccaaggactggctgtgcctacaatctctagcttctttccgcctggataccaagtctccttctgtcttgtgatggtcctcctgtttgctgtggacacaggactgtacttttcc

SEQ ID NO: 1735 - DNA, 1425 bp, synthetic construct
  source 1..1425: mol_type = other DNA
atggccttaccagtgaccgccttgctcctgccgctggccttgctgctccacgccgccaggccggacatccagatgacccagagcccccctagcctgtctgcctctgtgggcggcaaagtgaccatcacatgcaaggccagccaggacatcgaccgctacatggcctggtatcaggacaagcccggcaagggacccaagctgctgatccacgataccagcaccctccagcccggcatccccagcagattttctggcagcggctccggcagagactacagcttcagcatcagcaacctggaacccgaggacattgccacctactactgcctccagtacgacaacctgtggaccttcggcggaggcaccaagctggaaatcaagagaggcggaggcggaagtggaggcggaggatctggcggcggaggctctcaggtgcaactggtgcagagcggagccgagcttgtgaagcctggcgcttccgtgaagatgagctgcaaagccagcggctacatcttcaccaactacaacatccactgggtcaagaagtccccaggccagggcctggaatggatcggagccatctaccccggaaacggcgacgccccttacagccagaagttccaggacagagccaccctgaccgccgacaccagcagcagcaccacctacatggaactgagcagcctgaccagcgaggacagcgccgtgtactattgcgtgcgggccaactgggatgtggccttcgcctattggggccagggcacactggtgtccgtgtcctctacgcgtggaatgaggactgaggatcttcccaaagctgtcgtctttctcgaaccccaatggtatcgggtgctcgaaaaagactctgtgacactgaaatgccaaggggcctactctcccgaggacaactccacacagtggtttcataatgagtccctcatcagctctcaggccagctcttatttcattgatgccgctacagtggacgactccggcgagtatcggtgtcagaccaatctgtctacactgtctgaccccgtgcagcttgaggtccacattggatggttgctcttgcaagccccacgctgggttttcaaagaggaagatccaatccatctgcggtgccacagctggaaaaacaccgctctccacaaagtcacatacctgcaaaatggcaaaggacgcaaatacttccatcacaattccgatttttacattccgaaggctaccctgaaagacagcggcagctatttctgccggggactcgtcggctccaagaatgtgtcctccgaaaccgtgaatatcacgattacccaaggactggctgtgcctacaatctctagcttctttccgcctggataccaagtctccttctgtcttgtgatggtcctcctgtttgctgtggacacaggactgtacttttcc

SEQ ID NO: 1736 - DNA, 1428 bp, synthetic construct
  source 1..1428: mol_type = other DNA
atggccttaccagtgaccgccttgctcctgccgctggccttgctgctccacgccgccaggccggacatccagatgacccagagccctgccagcctgtctgcctctgtgggcgagacagtgaccatcacctgtcgggtgtccggcaacatccacaactacctggcctggtatcagcagaagcagggcaagagcccccaactgctggtgtacaacgccaagaccctggccgatggcgtgcccagcagattttctggctctggcagcggcacccagtacagcctgaagatcaacagcctccagcccgaggacttcggcagctactactgccagcacttctggtccaacccctacaccttcggcggaggcaccaagctggaaatcaagggcggaggcggaagtggaggcggaggatctggcggcggaggctctcaggtgcaactccagcagtctggcgcttccgtgaaggtgtcctgcaaggccagcgaactcgtgcggcctggcacaggctacgccttcaccaattacctgatcgagtgggtcaagcagaggcccggacagggcctggaatggatcggagtgattaacccaggcagcggcggcaccaactacaacgagaagttcaagggcaaggccaccctgaccgccgacaagagcagcagcacagcctacatgcaactgagcagcctgaccagcgacgacagcgccgtgtacttctgcgcccggtacagaagctacgactggtacttcgacgtgtggggagccggcaccaccgtgacagtgtcatctacgcgtggaatgaggactgaggatcttcccaaagctgtcgtctttctcgaaccccaatggtatcgggtgctcgaaaaagactctgtgacactgaaatgccaaggggcctactctcccgaggacaactccacacagtggtttcataatgagtccctcatcagctctcaggccagctcttatttcattgatgccgctacagtggacgactccggcgagtatcggtgtcagaccaatctgtctacactgtctgaccccgtgcagcttgaggtccacattggatggttgctcttgcaagccccacgctgggttttcaaagaggaagatccaatccatctgcggtgccacagctggaaaaacaccgctctccacaaagtcacatacctgcaaaatggcaaaggacgcaaatacttccatcacaattccgatttttacattccgaaggctaccctgaaagacagcggcagctatttctgccggggactcgtcggctccaagaatgtgtcctccgaaaccgtgaatatcacgattacccaaggactggctgtgcctacaatctctagcttctttccgcctggataccaagtctccttctgtcttgtgatggtcctcctgtttgctgtggacacaggactgtacttttcc

SEQ ID NO: 1737 - DNA, 1428 bp, synthetic construct
  source 1..1428: mol_type = other DNA
atggccttaccagtgaccgccttgctcctgccgctggccttgctgctccacgccgccaggccggacatccagatgacacagtctccggcgtcactgtccgcctccgtgggggagactgtgactattatttgtagggcatcagttaacatctactcttatttggcctggtaccagcagaagcaaggcaagagtcctcagctgctggtgtataatgcgaagatcctggcagagggcgtgccgagccggttctccggcagcggctcaggtacccaattttccctcaagatcaattcactgcagccagaggactttggcagttactattgtcaacaccactacggcacattcactttcgggtccggtacaaaattggagattaagcgaggcggaggcggaagtggaggcggaggatctggcggcggaggctctcaggtacagttgaaagaaagcgggcctggactggtagcgccttcccaatctctctccatcacgtgcaccatctctggcttctccctgacttcctatggagttcactgggtgaggcagccccccggcaagggactggaatggctggtcgtcatctggtccgacgggtccacaacctacaactccgctctgaaaagtcggctctctatttctaaagataatagcaagagccaggtgtttctgaaaatgaactctctgcagaccgatgatacggccatttactactgcgcttcacactatggctcaaccttggcattcgcttcctggggccacggaacactggtgaccgtttccgcagccacgcgtggaatgaggactgaggatcttcccaaagctgtcgtctttctcgaaccccaatggtatcgggtgctcgaaaaagactctgtgacactgaaatgccaaggggcctactctcccgaggacaactccacacagtggtttcataatgagtccctcatcagctctcaggccagctcttatttcattgatgccgctacagtggacgactccggcgagtatcggtgtcagaccaatctgtctacactgtctgaccccgtgcagcttgaggtccacattggatggttgctcttgcaagccccacgctgggttttcaaagaggaagatccaatccatctgcggtgccacagctggaaaaacaccgctctccacaaagtcacatacctgcaaaatggcaaaggacgcaaatacttccatcacaattccgatttttacattccgaaggctaccctgaaagacagcggcagctatttctgccggggactcgtcggctccaagaatgtgtcctccgaaaccgtgaatatcacgattacccaaggactggctgtgcctacaatctctagcttctttccgcctggataccaagtctccttctgtcttgtgatggtcctcctgtttgctgtggacacaggactgtacttttcc

SEQ ID NO: 1738 - DNA, 1452 bp, synthetic construct
  source 1..1452: mol_type = other DNA
atggccttaccagtgaccgccttgctcctgccgctggccttgctgctccacgccgccaggccggacattgtgatgacccagtctcacaaattcatgtccacatcagtaggagacagggtcagcgtcacctgcaaggccagtcagaatgtgggtaataatgtagcctggtatcaacagaaaccagggcaatctcctaaagtactgatttactcggcatcctaccggtacagtggagtccctgatcgcttcacaggcagtggatctgggacagatttcactctcaccatcagtaatgtgcagtctgaagacttggcagagtatttctgtcagcaatataacacctatccattcacgttcggctcggggacaaagttggaaataaaaggcggaggcggaagtggaggcggaggatctggcggcggaggctctgaggtacagctggaggaaagcggtggaggactggtgcaacctggagggtctatgaagctctcttgcgtagcttctgggttcacgttctccaattactggatgaactgggtgcggcagtcccccgagaaaggcctggaatgggtagcagaaattcggttcaagtcccataactatgctacacactttgccgagtctgtcaaaggccggttcactattagtcgagacgacagcaagtcttcagtctacctgcagatgaataacttgcgggcagaggacacaggtatctactactgcaccaggagaatcggcaactccgactatgactggtggtactttgacgtctggggagcaggcaccagcgtgacggtgagttcagcctcaacgcgtggaatgaggactgaggatcttcccaaagctgtcgtctttctcgaaccccaatggtatcgggtgctcgaaaaagactctgtgacactgaaatgccaaggggcctactctcccgaggacaactccacacagtggtttcataatgagtccctcatcagctctcaggccagctcttatttcattgatgccgctacagtggacgactccggcgagtatcggtgtcagaccaatctgtctacactgtctgaccccgtgcagcttgaggtccacattggatggttgctcttgcaagccccacgctgggttttcaaagaggaagatccaatccatctgcggtgccacagctggaaaaacaccgctctccacaaagtcacatacctgcaaaatggcaaaggacgcaaatacttccatcacaattccgatttttacattccgaaggctaccctgaaagacagcggcagctatttctgccggggactcgtcggctccaagaatgtgtcctccgaaaccgtgaatatcacgattacccaaggactggctgtgcctacaatctctagcttctttccgcctggataccaagtctccttctgtcttgtgatggtcctcctgtttgctgtggacacaggactgtacttttcc

SEQ ID NO: 1739 - DNA, 1428 bp, synthetic construct
  source 1..1428: mol_type = other DNA
atggccttaccagtgaccgccttgctcctgccgctggccttgctgctccacgccgccaggccggacatccagatgacccagagcagcagcagcttcagcgtgtccctgggcgacagagtgaccatcacatgcaaggccagcgaggacatctacatccggctggcctggtatcagcagaagcccggcaacgcccccagactgctgattagcgccgccacctctctggaaaccggcatccccagcagattctccggctctggcagcggcgaggactacaccctgacaatcaccagcctccagaccgaggacgtggcaacctactactgccagcagtattggaccaccccctggacctttggcggaggcaccaagctggaaatcaagagaggcggaggcggaagtggaggcggaggatctggcggcggaggctctgatgtgcagctccaggaatctggccccggactcgtgaagcctagccagagcctgagcctgacatgcaccgtgaccggctacagcatcaccatcgactacacctggaactggatcagacagttccccggcaacaaactggaatggatgggctacatcacctacagcggcagcaccgactacaaccccagcctgaagtccagaagctccatcaccagagacacctctatgaaccagttcttcttgcagctgaacagcgtgaccaccgaggacaccgccacctactattgcgccagactgggcagaagatacgccctggactattggggccagggcaccagcgtgacagtgtcctctacgcgtggaatgaggactgaggatcttcccaaagctgtcgtctttctcgaaccccaatggtatcgggtgctcgaaaaagactctgtgacactgaaatgccaaggggcctactctcccgaggacaactccacacagtggtttcataatgagtccctcatcagctctcaggccagctcttatttcattgatgccgctacagtggacgactccggcgagtatcggtgtcagaccaatctgtctacactgtctgaccccgtgcagcttgaggtccacattggatggttgctcttgcaagccccacgctgggttttcaaagaggaagatccaatccatctgcggtgccacagctggaaaaacaccgctctccacaaagtcacatacctgcaaaatggcaaaggacgcaaatacttccatcacaattccgatttttacattccgaaggctaccctgaaagacagcggcagctatttctgccggggactcgtcggctccaagaatgtgtcctccgaaaccgtgaatatcacgattacccaaggactggctgtgcctacaatctctagcttctttccgcctggataccaagtctccttctgtcttgtgatggtcctcctgtttgctgtggacacaggactgtacttttcc

SEQ ID NO: 1740 - DNA, 1425 bp, synthetic construct
  source 1..1425: mol_type = other DNA
atggccttaccagtgaccgccttgctcctgccgctggccttgctgctccacgccgccaggccggatgtgcagctccaggaaagcggccctggcctcgtgaagcctagccagagcctgagcctgacatgcaccgtgaccggctacagcatcaccagcgactacacctggaactggatcagacagttccccggcaacaagctggaatggatgggctacatcacctacagcggcagcaccagctacaaccccagcctgaagtcccggaactccatcaccagagacaccagcaagaaccagttcttcttgcagctgaacagcgtgaccaccgaggacaccgccacctactactgcgccagactgggcagacggtacaccatggactattggggccagggcacctccgtgaccgtgtctagcggaggcggaggaagtggcggcggaggatctgggggaggcggaagcgatatccagatgacccagtccagcagcagcttcagcgtgtccctgggcgacagagtgaccatcacctgtatggcctccgaggacatctacatccggctggcctggtatcagcagaagcccggcaacgcccccagactgctgattagcgccgccacctctctggaaaccggcgtgccaagcagattcagcggctctggcagcggcaaggactacaccctgagcatcacctccttgcagaccgaggacgtgggcacctactattgccagcagtattggagcagcccctggacctttggcggaggcacaaagctggaaatcaacacgcgtggaatgaggactgaggatcttcccaaagctgtcgtctttctcgaaccccaatggtatcgggtgctcgaaaaagactctgtgacactgaaatgccaaggggcctactctcccgaggacaactccacacagtggtttcataatgagtccctcatcagctctcaggccagctcttatttcattgatgccgctacagtggacgactccggcgagtatcggtgtcagaccaatctgtctacactgtctgaccccgtgcagcttgaggtccacattggatggttgctcttgcaagccccacgctgggttttcaaagaggaagatccaatccatctgcggtgccacagctggaaaaacaccgctctccacaaagtcacatacctgcaaaatggcaaaggacgcaaatacttccatcacaattccgatttttacattccgaaggctaccctgaaagacagcggcagctatttctgccggggactcgtcggctccaagaatgtgtcctccgaaaccgtgaatatcacgattacccaaggactggctgtgcctacaatctctagcttctttccgcctggataccaagtctccttctgtcttgtgatggtcctcctgtttgctgtggacacaggactgtacttttcc

SEQ ID NO: 1741 - DNA, 1425 bp, synthetic construct
  source 1..1425: mol_type = other DNA
atggccttaccagtgaccgccttgctcctgccgctggccttgctgctccacgccgccaggccggacatccagatgacccagagcagcagcagcttcagcgtgagcctgggcgacagagtgaccatcacctgcatggccagcgaggacatctacatcagactggcctggtaccagcagaagcccggcaacgcccccagactgctgatcagcgccgccaccagcctggagaccggcgtgcccagcagattcagcggcagcggcagcggcaaggactacaccctgagcatcaccagcctgcagaccgaggacgtgggcacctactactgccagcagtactggagcagcccctggaccttcggcggcggcaccaagctggagatcaacggcggaggcggaagtggaggcggaggatctggcggcggaggctctgacgtgcagctgcaggagagcggccccggcctggtgaagcccagccagagcctgagcctgacctgcaccgtgaccggctacagcatcaccagcgactacacctggaactggatcagacagttccccggcaacaagctggagtggatgggctacatcacctacagcggcagcaccagctacaaccccagcctgaagagcagaaacagcatcaccagagacaccagcaagaaccagttcttcctgcagctgaacagcgtgaccaccgaggacaccgccacctactactgcgccagactgggcagaagatacacaatggactactggggccagggcaccagcgtgaccgtgagcagcacgcgtggaatgaggactgaggatcttcccaaagctgtcgtctttctcgaaccccaatggtatcgggtgctcgaaaaagactctgtgacactgaaatgccaaggggcctactctcccgaggacaactccacacagtggtttcataatgagtccctcatcagctctcaggccagctcttatttcattgatgccgctacagtggacgactccggcgagtatcggtgtcagaccaatctgtctacactgtctgaccccgtgcagcttgaggtccacattggatggttgctcttgcaagccccacgctgggttttcaaagaggaagatccaatccatctgcggtgccacagctggaaaaacaccgctctccacaaagtcacatacctgcaaaatggcaaaggacgcaaatacttccatcacaattccgatttttacattccgaaggctaccctgaaagacagcggcagctatttctgccggggactcgtcggctccaagaatgtgtcctccgaaaccgtgaatatcacgattacccaaggactggctgtgcctacaatctctagcttctttccgcctggataccaagtctccttctgtcttgtgatggtcctcctgtttgctgtggacacaggactgtacttttcc

SEQ ID NO: 1742 - DNA, 1431 bp, synthetic construct
  source 1..1431: mol_type = other DNA
atggccttaccagtgaccgccttgctcctgccgctggccttgctgctccacgccgccaggccggaccagatcgtgctgacccagtcccccgctattatgtccgcatcaccgggcgaaaaagtgacgatctcctgtagcgcttcatctagcgtctcctacatgtattggtatcaacagaaacctgggtctagcccaaagccgtggatctacagaaccagtaaccttgccagtggggtgccagcccgcttcagcggtagtggcagtggaacttcctatagcctcacaataagcaacatggaggctgaagatgccgctgcctattactgccagcagtaccacagttacccaaccacgttcggcgggggaactaagctcgaagtaaaaggcggaggcggaagtggaggcggaggatctggcggcggaggctctgaggtgcagctggtggaatctgggggcggcctggtccaacctaagggatcactcaagctctcttgtgcggccagcggattctctttcaatacctatgctatgaattgggtgagacaggcgcccggaaagggcctcgaatggatagcccatatccggtcaaaatcaaacaatttcgcaacctactatgcggactccgtgaaggaccgattttccatctcccgagatgcctccgagaatattctgttcctgcagatgaataacctcaagacagaggacaccgccatgtactactgtgtgcgccagggcggtgactttcccatggattactgggggcaggggaccagcgtgaccgtgagctctacgcgtggaatgaggactgaggatcttcccaaagctgtcgtctttctcgaaccccaatggtatcgggtgctcgaaaaagactctgtgacactgaaatgccaaggggcctactctcccgaggacaactccacacagtggtttcataatgagtccctcatcagctctcaggccagctcttatttcattgatgccgctacagtggacgactccggcgagtatcggtgtcagaccaatctgtctacactgtctgaccccgtgcagcttgaggtccacattggatggttgctcttgcaagccccacgctgggttttcaaagaggaagatccaatccatctgcggtgccacagctggaaaaacaccgctctccacaaagtcacatacctgcaaaatggcaaaggacgcaaatacttccatcacaattccgatttttacattccgaaggctaccctgaaagacagcggcagctatttctgccggggactcgtcggctccaagaatgtgtcctccgaaaccgtgaatatcacgattacccaaggactggctgtgcctacaatctctagcttctttccgcctggataccaagtctccttctgtcttgtgatggtcctcctgtttgctgtggacacaggactgtacttttcc

SEQ ID NO: 1743 - DNA, 1434 bp, synthetic construct
  source 1..1434: mol_type = other DNA
atggccttaccagtgaccgccttgctcctgccgctggccttgctgctccacgccgccaggccggacatccagatgacccagagccccagcagcctgtctgccagcgtgggcgacagagtgaccatcacctgtagagccagccagagcatcagcagctacctgaactggtatcagcagaagcccggcaaggcccccaaactgctgatctacgacgccagcaacctggaaaccggcgtgcccagcagattttccggcagcggctctggcaccgacttcaccttcaccatcagctccctccagcccgaggacattgccacctactactgccagcagtacgacaacctgcccctgacctttggcggaggcaccaaggtggacatcaagagaggcggaggcggaagtggaggcggaggatctggcggcggaggctctcaggtgcaactggtggaatctggcggcggagtggtgcagcctggcagaagcctgagactgagctgtgccgccagcggcttcacctttagcagctacgccatgcactgggtgcgccaggcccctggaaaaggcctggaatgggtggccgtgatctcctacgacggctccaacaagtattacgccgacagcgtgaagggccggttcaccatctccagagacaacagcaagaacaccctgtacctccagatgaacagcctgcgggccgaggacaccgccgtgtactattgtgccagggctcacaacagcagctcttggagcttcgactactggggccagggcaccctcgtgaccgtgtcatctacgcgtggaatgaggactgaggatcttcccaaagctgtcgtctttctcgaaccccaatggtatcgggtgctcgaaaaagactctgtgacactgaaatgccaaggggcctactctcccgaggacaactccacacagtggtttcataatgagtccctcatcagctctcaggccagctcttatttcattgatgccgctacagtggacgactccggcgagtatcggtgtcagaccaatctgtctacactgtctgaccccgtgcagcttgaggtccacattggatggttgctcttgcaagccccacgctgggttttcaaagaggaagatccaatccatctgcggtgccacagctggaaaaacaccgctctccacaaagtcacatacctgcaaaatggcaaaggacgcaaatacttccatcacaattccgatttttacattccgaaggctaccctgaaagacagcggcagctatttctgccggggactcgtcggctccaagaatgtgtcctccgaaaccgtgaatatcacgattacccaaggactggctgtgcctacaatctctagcttctttccgcctggataccaagtctccttctgtcttgtgatggtcctcctgtttgctgtggacacaggactgtacttttcc

SEQ ID NO: 1744 - DNA, 1461 bp, synthetic construct
  source 1..1461: mol_type = other DNA
atggccttaccagtgaccgccttgctcctgccgctggccttgctgctccacgccgccaggccggacgtcgtgatgacccagagccctctgagcctgcctgtgtccctgggcgatcaggccagcatctcctgcagatccagccagagactggtgcacagcaacggcaacacctacctgcactggtatctgcagaagcccggccagagccccaagctgctgatctaccgggtgtccaacagattccccggcgtgcccgatagattcagcggctctggcagcggcaccgacttcaccctgaagatcagccgggtggaagccgaggacctgggcatctatttctgcagccagagcacccacgtgccctacacctttggcggaggcaccaagctggaaatcaagcggggcggaggcggaagtggaggcggaggatctggcggcggaggctctgaagtgcggctgcagcagtctggccccgacctgattaagcctggggccagcgtgaagatgagctgcaaggccagcggctacaccttcaccggctacgtgatgcactgggtcaagcagaggccaggccagggcctggaatggatcggcttcatcaacccctacaacgacgacatccagagcaacgagcggttccggggcaaggccaccctgaccagcgataagagcagcaccaccgcctacatggaactgagcagcctgacctccgaggacagcgccgtgtactactgtgctaggggagccggctacaacttcgacggggcctacagattcttcgacttttggggccagggcaccacactgaccgtgtcctctacgcgtggaatgaggactgaggatcttcccaaagctgtcgtctttctcgaaccccaatggtatcgggtgctcgaaaaagactctgtgacactgaaatgccaaggggcctactctcccgaggacaactccacacagtggtttcataatgagtccctcatcagctctcaggccagctcttatttcattgatgccgctacagtggacgactccggcgagtatcggtgtcagaccaatctgtctacactgtctgaccccgtgcagcttgaggtccacattggatggttgctcttgcaagccccacgctgggttttcaaagaggaagatccaatccatctgcggtgccacagctggaaaaacaccgctctccacaaagtcacatacctgcaaaatggcaaaggacgcaaatacttccatcacaattccgatttttacattccgaaggctaccctgaaagacagcggcagctatttctgccggggactcgtcggctccaagaatgtgtcctccgaaaccgtgaatatcacgattacccaaggactggctgtgcctacaatctctagcttctttccgcctggataccaagtctccttctgtcttgtgatggtcctcctgtttgctgtggacacaggactgtacttttcc

SEQ ID NO: 1745 - DNA, 1434 bp, synthetic construct
  source 1..1434: mol_type = other DNA
atggccttaccagtgaccgccttgctcctgccgctggccttgctgctccacgccgccaggccgagctacgagctgacccagcctcctagcgtgtccgtgtctcctggacagaccgccaccatctcttgcagcggcgatcaactgggcgggaagtacggccactggtatcagaagaagcccggccagagccccgtgctggtgctgtaccaggacagaaaacggcctgccggcatccccgagagattcagcggaagcagcagcggcaacaccatcaccctgaccatcagcggcacccaggccgtggatgaggccgactactactgccaggcttgggacaccaatctgggcggcgtgttcggcggaggcaccaaagtgacagtgctgggacagggcggaggcggaagtggaggcggaggatctggcggcggaggctctcaggtgcaactggtggaaagcggagccgaagtgaagaaacctggggccagcgtgaaggtgtcctgcaaggccagcggctacacctttaccggctactacatgcactgggtgcgccaggctccaggccagggactggaatggatgggccggatcaaccccaatagcggcggcaccaactacgcccagaaattccagggcagagtgaccatgaccagagacaccagcatcagcaccgcctacatggaactgagccggctgagaagcgacgacaccgccgtgtactactgcgccagccctagaggcagaggcagcgccttcgatatttggggccagggcacactcgtgaccgtgtcctctacgcgtggaatgaggactgaggatcttcccaaagctgtcgtctttctcgaaccccaatggtatcgggtgctcgaaaaagactctgtgacactgaaatgccaaggggcctactctcccgaggacaactccacacagtggtttcataatgagtccctcatcagctctcaggccagctcttatttcattgatgccgctacagtggacgactccggcgagtatcggtgtcagaccaatctgtctacactgtctgaccccgtgcagcttgaggtccacattggatggttgctcttgcaagccccacgctgggttttcaaagaggaagatccaatccatctgcggtgccacagctggaaaaacaccgctctccacaaagtcacatacctgcaaaatggcaaaggacgcaaatacttccatcacaattccgatttttacattccgaaggctaccctgaaagacagcggcagctatttctgccggggactcgtcggctccaagaatgtgtcctccgaaaccgtgaatatcacgattacccaaggactggctgtgcctacaatctctagcttctttccgcctggataccaagtctccttctgtcttgtgatggtcctcctgtttgctgtggacacaggactgtacttttcc

SEQ ID NO: 1746 - DNA, 1443 bp, synthetic construct
  source 1..1443: mol_type = other DNA
atggccttaccagtgaccgccttgctcctgccgctggccttgctgctccacgccgccaggccgaacttcatgctgacccagccccacagcgtgtccgagagccctggcaagaccgtgaccatctcctgcaccagaagcagcggctctatcgccagcaaatacgtgcagtggtatcagcagaggcccggcagcagccctaccaccgtgatctacgaggacaaccagaggcctagcggcgtgcccgatagattcagcggcagcatcgacaccagcagcaacagcgccagcctgaccatcagcggcctgagaacagaggacgaggccgactactactgccacagctacgacagcaacaaccactccgtgttcggcggaggcaccaaagtgacagtgctgggacagggcggaggcggaagtggaggcggaggatctggcggcggaggctctgaagtgcaactggtggaaagcgggggaggcgtggtgcagccaggcggatctctgagactgagctgtgccgccagcggcttcaccttcagcagctacgccatgagctgggtgcgccaggcccctggaaaaggcctggaatgggtgtccgccatctctggctctggcggcagcacctactacgccgatagcgtgaagggccggttcagcatcagccgggacaacagcaagaacaccctgtacctccagatgaacagcctgcgggccgaggacaccgccgtgtactactgtgccagaaccagaagctccggggccttcgacatctggggccagggaacactcgtgaccgtgtcctctacgcgtggaatgaggactgaggatcttcccaaagctgtcgtctttctcgaaccccaatggtatcgggtgctcgaaaaagactctgtgacactgaaatgccaaggggcctactctcccgaggacaactccacacagtggtttcataatgagtccctcatcagctctcaggccagctcttatttcattgatgccgctacagtggacgactccggcgagtatcggtgtcagaccaatctgtctacactgtctgaccccgtgcagcttgaggtccacattggatggttgctcttgcaagccccacgctgggttttcaaagaggaagatccaatccatctgcggtgccacagctggaaaaacaccgctctccacaaagtcacatacctgcaaaatggcaaaggacgcaaatacttccatcacaattccgatttttacattccgaaggctaccctgaaagacagcggcagctatttctgccggggactcgtcggctccaagaatgtgtcctccgaaaccgtgaatatcacgattacccaaggactggctgtgcctacaatctctagcttctttccgcctggataccaagtctccttctgtcttgtgatggtcctcctgtttgctgtggacacaggactgtacttttcc

SEQ ID NO: 1747 - DNA, 1431 bp, synthetic construct
  source 1..1431: mol_type = other DNA
atggccttaccagtgaccgccttgctcctgccgctggccttgctgctccacgccgccaggccggacatccagatgaaccagagccccagcagcctgagcgccagcctgggcgataccatcaccatcacctgtcacgccagccagaacatcaacgtgtggctgagctggtatcagcagaagcccggcaacatccccaagctgctgatctacaaggccagcaacctgcacaccggcgtgcccagcagattttctggcagcggctctggcaccggcttcaccattaccatcagctccctccagcccgaggacattgccacctactactgccagcagggccagagctacccctggacatttggcggaggcaccaagctggaaatcaagagaggcggaggcggaagtggaggcggaggatctggcggcggaggctctgaagtgcaactccagcagagcggcccagagcttgtgaagcctggcgcttccgtgaagattagctgcaaagccagcggctacagcttcaccggctacttcatgaactgggtcaagcagagccacggcaagagcctggagtacatcggcagattcaacccctacaacggcgagacactgtacaaccagaagttcaagggcaaggccaccctgaccgtggacaagagcagcagcaccgtgcacatggaactgctgagcgtgaccagcgaggacagcgccgtgtactactgtggcagaagcggcaacgacgacgctatggactattggggccagggcaccagcgtgaccgtgtctagtgctacgcgtggaatgaggactgaggatcttcccaaagctgtcgtctttctcgaaccccaatggtatcgggtgctcgaaaaagactctgtgacactgaaatgccaaggggcctactctcccgaggacaactccacacagtggtttcataatgagtccctcatcagctctcaggccagctcttatttcattgatgccgctacagtggacgactccggcgagtatcggtgtcagaccaatctgtctacactgtctgaccccgtgcagcttgaggtccacattggatggttgctcttgcaagccccacgctgggttttcaaagaggaagatccaatccatctgcggtgccacagctggaaaaacaccgctctccacaaagtcacatacctgcaaaatggcaaaggacgcaaatacttccatcacaattccgatttttacattccgaaggctaccctgaaagacagcggcagctatttctgccggggactcgtcggctccaagaatgtgtcctccgaaaccgtgaatatcacgattacccaaggactggctgtgcctacaatctctagcttctttccgcctggataccaagtctccttctgtcttgtgatggtcctcctgtttgctgtggacacaggactgtacttttcc

SEQ ID NO: 1748 - DNA, 1422 bp, synthetic construct
  source 1..1422: mol_type = other DNA
atggccttaccagtgaccgccttgctcctgccgctggccttgctgctccacgccgccaggccggacatcctgctgacacagagccccgccatcctgtccgtgtctccaggcgagagagtgtcctttagctgccgggccagccagaacatcggcaccagcatccactggtatcagcagcggaccaacggcagccccagactgctgattaagtacgccagcgagtccgtgtccggcatccccagcagattttctggcagcggctccggcaccgacttcaccctgagcatcaacagcgtggaaagcgaggacattgccgactactactgccagcacaccaatagctggcccaccacctttggcggaggcaccaagctggaaatcaagagaggcggaggcggaagtggaggcggaggatctggcggcggaggctctcaggtgcaactccagcagtccgacgccgagcttgtgaagcctggcgcttccgtgaagattagctgcaaggccagcggctacaccttcaccgaccacgccattcactgggtcaagcagaagcccgagcagggcctggaatggatcggctacttcagccccggcaacggcgacatcaagtacaacgagaagttcaagggcaaggccaccctgaccgccgacaagagcagcagcacagcctacatgcaactgaacagcctgaccagcgaggactccgccgtgtacttctgcaagcggagctacggcaactacgactactggggccagggcaccacactgaccgtgtctagtacgcgtggaatgaggactgaggatcttcccaaagctgtcgtctttctcgaaccccaatggtatcgggtgctcgaaaaagactctgtgacactgaaatgccaaggggcctactctcccgaggacaactccacacagtggtttcataatgagtccctcatcagctctcaggccagctcttatttcattgatgccgctacagtggacgactccggcgagtatcggtgtcagaccaatctgtctacactgtctgaccccgtgcagcttgaggtccacattggatggttgctcttgcaagccccacgctgggttttcaaagaggaagatccaatccatctgcggtgccacagctggaaaaacaccgctctccacaaagtcacatacctgcaaaatggcaaaggacgcaaatacttccatcacaattccgatttttacattccgaaggctaccctgaaagacagcggcagctatttctgccggggactcgtcggctccaagaatgtgtcctccgaaaccgtgaatatcacgattacccaaggactggctgtgcctacaatctctagcttctttccgcctggataccaagtctccttctgtcttgtgatggtcctcctgtttgctgtggacacaggactgtacttttcc

SEQ ID NO: 1749 - DNA, 1437 bp, synthetic construct
  source 1..1437: mol_type = other DNA
atggccttaccagtgaccgccttgctcctgccgctggccttgctgctccacgccgccaggccggacatcgtgatgacccagagccccgatagcctggccgtgtctctgggagagagagccaccatcaactgcaagagcagccagagcctgctgaacagcggcgaccagaagaactacctgacctggtatcagcagaagcccggccagccccccaagctgctgatctactgggccagcaccagagaaagcggcgtgcccgatagattcagcggcagcggaagtggcaccgacttcaccctgaccatcagttctcttcaggccgaggacgtggccgtgtactactgccagaacgactacagctaccccctgaccttcggccagggcaccaaggtggaaatcaagggcggaggcggaagtggaggcggaggatctggcggcggaggctctcaggtgcagctggtgcagtctggggccgaagtgaagaaaaccggcagcagcgtgaaggtgtcctgcaaggccagcggctacacctttaccgaccacgccattcacgtgtggcggcaggctccaggacaggccctggaatggatgggccacttcagccccggcaacaccgacatcaagtacaacgacaagttcaagggcagagtgaccctgaccgtggaccgcagcatgagcaccgcctacatggaactgagcagcctgcggagcgaggacaccgccatgtactattgcaagaccagcaccttctttttcgactactggggccagggaacaatggtcaccgtgtccagcacgcgtggaatgaggactgaggatcttcccaaagctgtcgtctttctcgaaccccaatggtatcgggtgctcgaaaaagactctgtgacactgaaatgccaaggggcctactctcccgaggacaactccacacagtggtttcataatgagtccctcatcagctctcaggccagctcttatttcattgatgccgctacagtggacgactccggcgagtatcggtgtcagaccaatctgtctacactgtctgaccccgtgcagcttgaggtccacattggatggttgctcttgcaagccccacgctgggttttcaaagaggaagatccaatccatctgcggtgccacagctggaaaaacaccgctctccacaaagtcacatacctgcaaaatggcaaaggacgcaaatacttccatcacaattccgatttttacattccgaaggctaccctgaaagacagcggcagctatttctgccggggactcgtcggctccaagaatgtgtcctccgaaaccgtgaatatcacgattacccaaggactggctgtgcctacaatctctagcttctttccgcctggataccaagtctccttctgtcttgtgatggtcctcctgtttgctgtggacacaggactgtacttttcc

SEQ ID NO: 1750 - DNA, 1434 bp, synthetic construct
  source 1..1434: mol_type = other DNA
atggccttaccagtgaccgccttgctcctgccgctggccttgctgctccacgccgccaggccggacatccagatgacccagagccccagcagcctgtctgccagcgtgggcgacagagtgaccatcacatgcaaggccagccaggacgtgtccattgccgtggcctggtatcagcagaagcccggcaaggcccccaaggtgctgatctacagcgccagctacagatacaccggcgtgcccgacagattcagcggctctggcagcggcaccgacttcaccttcaccatcagctccctccagcccgaggatattgccgtgtactactgccagcagcactacatcacccccctgacctttggcggaggcaccaaggtggaaatcaagggcggaggcggaagtggaggcggaggatctggcggcggaggctctcagatccaactggtgcagagcggccacgaagtgaagaaacctggggccagcgtgaaggtgtcctgcaaagccagcggctacacctttaccaactacggcatgaactgggtgcgccaggcccctggacagggcctggaatggatgggctggatcaacaccaagaccggcgagcccacctacgccgaagagttcaagggcagattcgtgttcagcctggaaaccagcgcctccaccgcctacctccagatcagctctctgaaggccgaggacaccgccatgtacttttgcggcagaggcggctacggcagcagctactggtacttcgatgtgtggggccagggcaccaccgtgaccgtgtcatctacgcgtggaatgaggactgaggatcttcccaaagctgtcgtctttctcgaaccccaatggtatcgggtgctcgaaaaagactctgtgacactgaaatgccaaggggcctactctcccgaggacaactccacacagtggtttcataatgagtccctcatcagctctcaggccagctcttatttcattgatgccgctacagtggacgactccggcgagtatcggtgtcagaccaatctgtctacactgtctgaccccgtgcagcttgaggtccacattggatggttgctcttgcaagccccacgctgggttttcaaagaggaagatccaatccatctgcggtgccacagctggaaaaacaccgctctccacaaagtcacatacctgcaaaatggcaaaggacgcaaatacttccatcacaattccgatttttacattccgaaggctaccctgaaagacagcggcagctatttctgccggggactcgtcggctccaagaatgtgtcctccgaaaccgtgaatatcacgattacccaaggactggctgtgcctacaatctctagcttctttccgcctggataccaagtctccttctgtcttgtgatggtcctcctgtttgctgtggacacaggactgtacttttcc

SEQ ID NO: 1751 - DNA, 1443 bp, synthetic construct
  source 1..1443: mol_type = other DNA
atggccttaccagtgaccgccttgctcctgccgctggccttgctgctccacgccgccaggccgcaggctgtcgtgacacagcctcctagcgcctctggcacaccaggccagagagtgaccatctcctgtagcggcagcagcagcaacatcggcagcaacaccgtgaactggtatcagcaggtgcccggcaccgctcccaagctgctgatctacagcaacaaccagcggcccagcggcgtgcccgatagattttctggcagcaagagcggcaccagcgccagcctggctatctctggactccagtccgaggacgaggccgactactattgcgccgcctgggacgatagcctgaacggctgggtgttcggcggaggcaccaagctgacagtgctgggcggaggcggaagtggaggcggaggatctggcggcggaggctctcagatgcaactggtgcagagcggagccgaagtgaaagagcctggcgagagcctgcggatctcctgcaagggcagcggctacagcttcaccaatttctggatctcttgggtgcgccagatgcccggcaagggcctggaatggatgggcagagtggaccccggctactcctacagcacctacagccctagcttccagggccacgtgaccatcagcgccgacaagagcaccagcaccgcctacctccagtggaacagcctgaaggccagcgacaccgccatgtactactgcgccagagtgcagtacagcggctattacgattggttcgacccctggggccagggcacactcgtgacagtgtcaagcacgcgtggaatgaggactgaggatcttcccaaagctgtcgtctttctcgaaccccaatggtatcgggtgctcgaaaaagactctgtgacactgaaatgccaaggggcctactctcccgaggacaactccacacagtggtttcataatgagtccctcatcagctctcaggccagctcttatttcattgatgccgctacagtggacgactccggcgagtatcggtgtcagaccaatctgtctacactgtctgaccccgtgcagcttgaggtccacattggatggttgctcttgcaagccccacgctgggttttcaaagaggaagatccaatccatctgcggtgccacagctggaaaaacaccgctctccacaaagtcacatacctgcaaaatggcaaaggacgcaaatacttccatcacaattccgatttttacattccgaaggctaccctgaaagacagcggcagctatttctgccggggactcgtcggctccaagaatgtgtcctccgaaaccgtgaatatcacgattacccaaggactggctgtgcctacaatctctagcttctttccgcctggataccaagtctccttctgtcttgtgatggtcctcctgtttgctgtggacacaggactgtacttttcc

SEQ ID NO: 1752 - DNA, 1425 bp, synthetic construct
  source 1..1425: mol_type = other DNA
atggccttaccagtgaccgccttgctcctgccgctggccttgctgctccacgccgccaggccggacatccagatgacccagagccccagcacactgagcgccagcgtgggcgacagagtgaccatcacctgtcgggccagccagaacatcaacaagtggctggcctggtatcagcagaggcccggaaaagccccccagctgctgatctacaaggccagcagcctggaaagcggcgtgcccagcagattttctggcagcggctctggcaccgagtacaccctgaccatcagctccctccagcccgacgacttcgccacctactactgccagcagtacaacagctacgccaccttcggccagggcaccaaggtggaaatcaagagaggcggaggcggaagtggaggcggaggatctggcggcggaggctctcaggtgcagctggtgcagtctggggccgaagtgaagaagcctggcgagagcctgaagatcagctgcaagggctccggctacaacttctctaacaagtggatcggctgggtgcgccagctgcctggcagaggactggaatggatcgccatcatctaccccggctacagcgacatcacctacagccccagcttccagggccgcgtgacaatcagcgccgacaccagcatcaacaccgcctacctgcactggcacagcctgaaggccagcgacaccgccatgtactactgcgtgcggcatacagccctggctggcttcgattattggggcctgggcaccctcgtgaccgtgtctagtacgcgtggaatgaggactgaggatcttcccaaagctgtcgtctttctcgaaccccaatggtatcgggtgctcgaaaaagactctgtgacactgaaatgccaaggggcctactctcccgaggacaactccacacagtggtttcataatgagtccctcatcagctctcaggccagctcttatttcattgatgccgctacagtggacgactccggcgagtatcggtgtcagaccaatctgtctacactgtctgaccccgtgcagcttgaggtccacattggatggttgctcttgcaagccccacgctgggttttcaaagaggaagatccaatccatctgcggtgccacagctggaaaaacaccgctctccacaaagtcacatacctgcaaaatggcaaaggacgcaaatacttccatcacaattccgatttttacattccgaaggctaccctgaaagacagcggcagctatttctgccggggactcgtcggctccaagaatgtgtcctccgaaaccgtgaatatcacgattacccaaggactggctgtgcctacaatctctagcttctttccgcctggataccaagtctccttctgtcttgtgatggtcctcctgtttgctgtggacacaggactgtacttttcc

SEQ ID NO: 1753 - DNA, 1440 bp, synthetic construct
  source 1..1440: mol_type = other DNA
atggccttaccagtgaccgccttgctcctgccgctggccttgctgctccacgccgccaggccgcagagcgtcgtgacacagcctcctagcgtgtcagtggcccctggcaagaccgccagaatcacctgtggccggaacaacatcggcagcaagagcgtgcactggtatcagcagaagcccggccaggctcctgtgctggtggtgtacgacgacagcgacagacccagcggcatccccgagagattcagcggcagcaactccggcaataccgccaccctgaccatcagcagagtggaagccggcgacgaggccgactactactgccaagtgtgggacagcagcagcgatcacgtggtgtttggcggaggcaccaagctgacagtgctgggtggcggaggcggaagtggaggcggaggatctggcggcggaggctctgaagtgcaactggtgcagtctggcggaggggtcgtgcggcctggcggatctctgagactgtcttgtgccgccagcggcttcaccttcgacgactacggcatgagctgggtgcgccaggcccctggaaaaggcctggaatgggtgtccggcatcaactggaatggcggcagcaccggctacgccgattctgtgcggggcagattcaccatcagccgggacaacgccaagaacagcctgtacctgcagatgaactccctgcgggccgaggacaccgccctgtactattgcgccagagagcggggctacggctaccacgaccctcacgattattggggccagggcacccttgtcaccgtgtcctctacgcgtggaatgaggactgaggatcttcccaaagctgtcgtctttctcgaaccccaatggtatcgggtgctcgaaaaagactctgtgacactgaaatgccaaggggcctactctcccgaggacaactccacacagtggtttcataatgagtccctcatcagctctcaggccagctcttatttcattgatgccgctacagtggacgactccggcgagtatcggtgtcagaccaatctgtctacactgtctgaccccgtgcagcttgaggtccacattggatggttgctcttgcaagccccacgctgggttttcaaagaggaagatccaatccatctgcggtgccacagctggaaaaacaccgctctccacaaagtcacatacctgcaaaatggcaaaggacgcaaatacttccatcacaattccgatttttacattccgaaggctaccctgaaagacagcggcagctatttctgccggggactcgtcggctccaagaatgtgtcctccgaaaccgtgaatatcacgattacccaaggactggctgtgcctacaatctctagcttctttccgcctggataccaagtctccttctgtcttgtgatggtcctcctgtttgctgtggacacaggactgtacttttcc

SEQ ID NO: 1754 - DNA, 1437 bp, synthetic construct
  source 1..1437: mol_type = other DNA
atggccttaccagtgaccgccttgctcctgccgctggccttgctgctccacgccgccaggccggacatcgtgctgacacagagccctgcttctctggccgtgtctctgggacagagagccaccatcagctgtagagccagcgagagcgtggacaactacggcaacaccttcatgcactggtatcagcagaagcccggccagcctcctaagctgctgatctacagagccagcaacctggaaagcggcatccccgccagattttctggcagcggcagcagaaccgacttcaccctgaccatcaatcccgtggaagccgacgacgtggcaacctactactgccagcagagcaacgaggaccctcctacatttggagccggcaccaagctggaactgaaaggcggaggcggaagtggaggcggaggatctggcggcggaggctctcagattcagctggtgcagtctggccccgagctgaagaaacctggcgagacagtgaagatcagctgcaaggccagcggctacatcttcaccaattacggcatgaactgggtcaagcaggcccctggcaagagcttcaagtggatgggctggatcaacacctacaccggcgagagcacatacagcgccgacttcaagggcagattcgccttcagcctggaaaccagcgccagcacagcctacctgcacatcaacgacctgaagaacgaggacaccgccacctacttttgcgccagaagcggcggctacgaccctatggattattggggccagggcaccagcgtgaccgtttcttctacgcgtggaatgaggactgaggatcttcccaaagctgtcgtctttctcgaaccccaatggtatcgggtgctcgaaaaagactctgtgacactgaaatgccaaggggcctactctcccgaggacaactccacacagtggtttcataatgagtccctcatcagctctcaggccagctcttatttcattgatgccgctacagtggacgactccggcgagtatcggtgtcagaccaatctgtctacactgtctgaccccgtgcagcttgaggtccacattggatggttgctcttgcaagccccacgctgggttttcaaagaggaagatccaatccatctgcggtgccacagctggaaaaacaccgctctccacaaagtcacatacctgcaaaatggcaaaggacgcaaatacttccatcacaattccgatttttacattccgaaggctaccctgaaagacagcggcagctatttctgccggggactcgtcggctccaagaatgtgtcctccgaaaccgtgaatatcacgattacccaaggactggctgtgcctacaatctctagcttctttccgcctggataccaagtctccttctgtcttgtgatggtcctcctgtttgctgtggacacaggactgtacttttcc

SEQ ID NO: 1755 - DNA, 1431 bp, synthetic construct
  source 1..1431: mol_type = other DNA
atggccttaccagtgaccgccttgctcctgccgctggccttgctgctccacgccgccaggccggagatcgtgctgacacagagccctggcaccctgagcctgtctccaggcgaaagagccacactgagctgtcgggccagccagagcgtgtccaatacctacctggcctggtatcaccagaggcccggacaggctccccggctgctgatctatggcgcttctagcagagccaccggcatccccgatagattcagcggctctggcagcggcaccgacttcgccctgacaatcagctccctggaacccgaggacttcgccgtgtactactgccagcagtacagcaactcctggaccttcggccagggcaccaaggtggaaatcaagagaggcggaggcggaagtggaggcggaggatctggcggcggaggctctcaggtgcaactggtggaatctggcgggggagtggtgcagcctggcagaagcctgagactgtcttgtgccgccagcggcttcaccttcagcagctacgacatgcactgggtgcgccaggcccctggcaaaggactggaatgggtggccgtgatctcctacgacggcaccaacgagtattacgccgacagcgtgaagggccggttcaccatctccagagacaccagcaagaacaccctgtacctccagatgaacagcctgcgggccgaggacacagccgtgtattattgcgccagagagcggtacttcgactggtccttcgactactggggccagggaaccctggtgtccgtgtctagtacgcgtggaatgaggactgaggatcttcccaaagctgtcgtctttctcgaaccccaatggtatcgggtgctcgaaaaagactctgtgacactgaaatgccaaggggcctactctcccgaggacaactccacacagtggtttcataatgagtccctcatcagctctcaggccagctcttatttcattgatgccgctacagtggacgactccggcgagtatcggtgtcagaccaatctgtctacactgtctgaccccgtgcagcttgaggtccacattggatggttgctcttgcaagccccacgctgggttttcaaagaggaagatccaatccatctgcggtgccacagctggaaaaacaccgctctccacaaagtcacatacctgcaaaatggcaaaggacgcaaatacttccatcacaattccgatttttacattccgaaggctaccctgaaagacagcggcagctatttctgccggggactcgtcggctccaagaatgtgtcctccgaaaccgtgaatatcacgattacccaaggactggctgtgcctacaatctctagcttctttccgcctggataccaagtctccttctgtcttgtgatggtcctcctgtttgctgtggacacaggactgtacttttcc

SEQ ID NO: 1756 - DNA, 1428 bp, synthetic construct
  source 1..1428: mol_type = other DNA
atggccttaccagtgaccgccttgctcctgccgctggccttgctgctccacgccgccaggccggagctgacacaggaccctgctgtgtctgttgccctgggccagacagtgcggattacctgtcaaggcgacagcctgagaagcaactacgccaactggtatcagcagaagcccggacaggctcccgtgctggttatctacggccagaacaacagacccagcggcatccccgatagattcagcggctctagctctggcaataccgccagcctgacaatcactggcgctcaggctgccgatgaggccgactactactgcgatagcagagtgtccaccggcaatcacgtggtgtttggcggcggaacaaagctgacagtgctcggacaaggcggaggcggaagtggaggcggaggatctggcggcggaggctctgaagttcagctggtgcagagcggagccgaagtgaagaaacctggggcctctgtgaaggtgtcctgcaaggcttccggctacacctttaccagctacgccatgcactgggtccgacaggcacctggacaacggcttgaatggatgggctggatcaacgccggcaacggcaacaccaagtacagccagaaattccagggccgcgtgaccatcaccagagatacaagcgccagcaccgcctacatggaactgtctagcctgagatccgaggacaccgccgtgtactactgtgccagagacatcagctacggcagcttcgactattggggccagggcacactggtcaccgttagctctacgcgtggaatgaggactgaggatcttcccaaagctgtcgtctttctcgaaccccaatggtatcgggtgctcgaaaaagactctgtgacactgaaatgccaaggggcctactctcccgaggacaactccacacagtggtttcataatgagtccctcatcagctctcaggccagctcttatttcattgatgccgctacagtggacgactccggcgagtatcggtgtcagaccaatctgtctacactgtctgaccccgtgcagcttgaggtccacattggatggttgctcttgcaagccccacgctgggttttcaaagaggaagatccaatccatctgcggtgccacagctggaaaaacaccgctctccacaaagtcacatacctgcaaaatggcaaaggacgcaaatacttccatcacaattccgatttttacattccgaaggctaccctgaaagacagcggcagctatttctgccggggactcgtcggctccaagaatgtgtcctccgaaaccgtgaatatcacgattacccaaggactggctgtgcctacaatctctagcttctttccgcctggataccaagtctccttctgtcttgtgatggtcctcctgtttgctgtggacacaggactgtacttttcc

SEQ ID NO: 1757 - DNA, 1416 bp, synthetic construct
  source 1..1416: mol_type = other DNA
atggccttaccagtgaccgccttgctcctgccgctggccttgctgctccacgccgccaggccggacatccagatgacacagagccctagcagcctgtctgccagcgtgggagacagagtgaccatcacctgtagcgccaccagcagcatcagctacatgcactggtatcagcagaagcccggcaaggcccctaaaggctggatctacgataccagcaaactggcccacggcgtgcccagcagattttctggttctggcagcggcaccgacttcaccctgacaatatctagcctccagcctgaggacttcgccacctactactgccaccagagaagaagctaccccttcaccttcggccagggcaccaaggtggaaatcaaaggcggaggcggaagtggaggcggaggatctggcggcggaggctctgaagtgcaactggttcagagcggagccgaagtgaagaaacctggggcctctgtgaaggtgtcctgcaaggcttccggctacacctttaccaatttctggattcactgggtccgacaggctccaggccaaggactggaatggatcggagagatcgaccccagcgacagctacaccaactacaaccagaaattcaaaggccgggtcaccatcaccagagacaccagcacaagcaccgcctacctggaactgagcagcctgagaagcgaggacaccgccgtgtactactgcgccagggaaatcaccaccgtggattattggggccagggaaccctggtcaccgtgtcatctacgcgtggaatgaggactgaggatcttcccaaagctgtcgtctttctcgaaccccaatggtatcgggtgctcgaaaaagactctgtgacactgaaatgccaaggggcctactctcccgaggacaactccacacagtggtttcataatgagtccctcatcagctctcaggccagctcttatttcattgatgccgctacagtggacgactccggcgagtatcggtgtcagaccaatctgtctacactgtctgaccccgtgcagcttgaggtccacattggatggttgctcttgcaagccccacgctgggttttcaaagaggaagatccaatccatctgcggtgccacagctggaaaaacaccgctctccacaaagtcacatacctgcaaaatggcaaaggacgcaaatacttccatcacaattccgatttttacattccgaaggctaccctgaaagacagcggcagctatttctgccggggactcgtcggctccaagaatgtgtcctccgaaaccgtgaatatcacgattacccaaggactggctgtgcctacaatctctagcttctttccgcctggataccaagtctccttctgtcttgtgatggtcctcctgtttgctgtggacacaggactgtacttttcc

SEQ ID NO: 1758 - DNA, 1437 bp, synthetic construct
  source 1..1437: mol_type = other DNA
atggccttaccagtgaccgccttgctcctgccgctggccttgctgctccacgccgccaggccggacatccagatgacacagagccctagcagcctgtctgccagcgtgggagacagagtgaccatcacatgcaaggccagccagggcttcaacaaatacgtggcctggtatcagcagaagcccggcaaggctcctaagctgctgatctactacaccagcacactccagcctggcgtgcccagcagattttctggctctggcagcggcagagactacaccctgacaatatccagcctccagccagaggacttcgccacctactactgtctccagtacggcaacctgctgtacgcctttggacagggcaccaaggtggaaatcaagagaggcggaggcggaagtggaggcggaggatctggcggcggaggctctgaagttcagcttgtgcagagcggagccgaagtgaagaaacctggggcctctgtgaaggtgtcctgcaaagccagcggctacacctttaccagctactggatcggctgggtccgacaggctcctggacaaggactggaatggatcggcgacatctatcccggcggaggctacaccaactacaacgagaagttcaagggccgcgtgacaatcaccagagacacctctacaagcaccgcctacctggaactgagcagcctgagaagcgaggacaccgccgtgtactactgcgccagactggatggcagcagctacagaggcgctatggattcttggggccagggcacactggtcaccgtttcttctacgcgtggaatgaggactgaggatcttcccaaagctgtcgtctttctcgaaccccaatggtatcgggtgctcgaaaaagactctgtgacactgaaatgccaaggggcctactctcccgaggacaactccacacagtggtttcataatgagtccctcatcagctctcaggccagctcttatttcattgatgccgctacagtggacgactccggcgagtatcggtgtcagaccaatctgtctacactgtctgaccccgtgcagcttgaggtccacattggatggttgctcttgcaagccccacgctgggttttcaaagaggaagatccaatccatctgcggtgccacagctggaaaaacaccgctctccacaaagtcacatacctgcaaaatggcaaaggacgcaaatacttccatcacaattccgatttttacattccgaaggctaccctgaaagacagcggcagctatttctgccggggactcgtcggctccaagaatgtgtcctccgaaaccgtgaatatcacgattacccaaggactggctgtgcctacaatctctagcttctttccgcctggataccaagtctccttctgtcttgtgatggtcctcctgtttgctgtggacacaggactgtacttttcc

SEQ ID NO: 1759 - DNA, 1425 bp, synthetic construct
  source 1..1425: mol_type = other DNA
atggccttaccagtgaccgccttgctcctgccgctggccttgctgctccacgccgccaggccggacatccagatgacacagagccctagcagcctgtctgccagcgtgggagacagagtgaccatcacctgtagagccagccaggacatccggtactacctgaactggtatcagcagaagcccggcaaggcccctaagctgctgatctatgtggcctccagcctccagagcggagtgccttctagattttctggcagcggctccggcaccgagtttaccctgacagtgtctagcttgcagcccgaggacttcgccacctactactgcctgcaagtgtacagcacccctcggacctttggacagggcaccaaggtggaaatcaaaggcggaggcggaagtggaggcggaggatctggcggcggaggctctgaagtgcagcttgttgaatctggcggcggactggctaagcctggcggatctctgagactgtcttgtgccgccagcggcttccggttcaccttcaacaactactacatggactgggtccgacaggcccctggacaaggacttgaatgggtgtccagaatcagcagcagcggcgaccctacttggtacgccgattctgtgaagggcagattcaccatcagcagagagaacgccaagaacaccctgttcctccagatgaactccctgagagccgaggacaccgccgtgtactattgtgcctctctgaccaccggcagcgattcttggggacagggcgtgctggttaccgtgtcatctacgcgtggaatgaggactgaggatcttcccaaagctgtcgtctttctcgaaccccaatggtatcgggtgctcgaaaaagactctgtgacactgaaatgccaaggggcctactctcccgaggacaactccacacagtggtttcataatgagtccctcatcagctctcaggccagctcttatttcattgatgccgctacagtggacgactccggcgagtatcggtgtcagaccaatctgtctacactgtctgaccccgtgcagcttgaggtccacattggatggttgctcttgcaagccccacgctgggttttcaaagaggaagatccaatccatctgcggtgccacagctggaaaaacaccgctctccacaaagtcacatacctgcaaaatggcaaaggacgcaaatacttccatcacaattccgatttttacattccgaaggctaccctgaaagacagcggcagctatttctgccggggactcgtcggctccaagaatgtgtcctccgaaaccgtgaatatcacgattacccaaggactggctgtgcctacaatctctagcttctttccgcctggataccaagtctccttctgtcttgtgatggtcctcctgtttgctgtggacacaggactgtacttttcc

SEQ ID NO: 1760 - DNA, 1428 bp, synthetic construct
  source 1..1428: mol_type = other DNA
atggccttaccagtgaccgccttgctcctgccgctggccttgctgctccacgccgccaggccggagatcgtgatgacacagagccccgccacactgagtgtgtctccaggcgaaagagccacactgtcctgtagagccagccagagcgtgtccagaaacctggcctggtatcagcagaagcctggacaggctccccggctgttgatctacggcgcttctacaagagccaccggcattcccgccagattttctggctctggcagcggcaccgagttcaccctgacaatcggaagcctccagagcgaggacttcgccgtgtactactgccagcagtacaagacctggcctcggacctttggacagggcaccaacgtggaaatcaaaggcggaggcggaagtggaggcggaggatctggcggcggaggctctcaagttcagctgcaacaatggggagccggcctgctgaagcctagcgaaacactgtctctgacctgcgccgtgttcggcggctctttcagcggctactactggtcctggatcagacagcctcctggcaaaggactggaatggatcggcgagatcaaccaccggggcaacaccaacgacaaccccagcctgaaaagcagagtgaccatcagcgtggacaccagcaagaaccagttcgccctgaagctgagcagcgtgacagccgctgataccgccgtgtattattgcgccagagagcggggctacacctacggcaatttcgatcactggggccagggcaccctggtcacagtttcttctacgcgtggaatgaggactgaggatcttcccaaagctgtcgtctttctcgaaccccaatggtatcgggtgctcgaaaaagactctgtgacactgaaatgccaaggggcctactctcccgaggacaactccacacagtggtttcataatgagtccctcatcagctctcaggccagctcttatttcattgatgccgctacagtggacgactccggcgagtatcggtgtcagaccaatctgtctacactgtctgaccccgtgcagcttgaggtccacattggatggttgctcttgcaagccccacgctgggttttcaaagaggaagatccaatccatctgcggtgccacagctggaaaaacaccgctctccacaaagtcacatacctgcaaaatggcaaaggacgcaaatacttccatcacaattccgatttttacattccgaaggctaccctgaaagacagcggcagctatttctgccggggactcgtcggctccaagaatgtgtcctccgaaaccgtgaatatcacgattacccaaggactggctgtgcctacaatctctagcttctttccgcctggataccaagtctccttctgtcttgtgatggtcctcctgtttgctgtggacacaggactgtacttttcc

SEQ ID NO: 1761 - DNA, 1446 bp, synthetic construct
  source 1..1446: mol_type = other DNA
atggccttaccagtgaccgccttgctcctgccgctggccttgctgctccacgccgccaggccggacatccagatgacccagagccccagcagcctgtctgccagcgtgggcgacagagtgaccatcacatgcaaggccagcaagaacatcagaagctacctggcctggtatcagcagaagcccggcaaggcccccaagctgctgatctacagcggcagcacactgcacagcggcgtgcccagcagattttccggctctggcagcggcaccgacttcaccctgaccatctctagcctccagcccgaggacttcgccacctactactgccagcagcaccacgagtaccccctgacattcggccagggcaccaaggtggaaatcaagagaggcggaggcggaagtggaggcggaggatctggcggcggaggctctcaggtgcaactccaggaatctggccccggactcgtgaagcccagcgagacactgagcctgacctgtaccgtgtccggctacaccatcaccagcggctacgactggtcctggatcagacagcctcctggcaagggcctggaatggatcggctacatcaactacggcggctccaccaactacaagcccagcctgggaagccgcgtgacaatcagcgtggacacctccaagaaccagttcagcctgaagctgagcagcgtgacagccgccgataccgccgtgtactactgcgcccggtacaacgagtacaagagctacatctacgattggtacttcgacttctggggccagggaaccctcgtgaccgtgtctagtacgcgtggaatgaggactgaggatcttcccaaagctgtcgtctttctcgaaccccaatggtatcgggtgctcgaaaaagactctgtgacactgaaatgccaaggggcctactctcccgaggacaactccacacagtggtttcataatgagtccctcatcagctctcaggccagctcttatttcattgatgccgctacagtggacgactccggcgagtatcggtgtcagaccaatctgtctacactgtctgaccccgtgcagcttgaggtccacattggatggttgctcttgcaagccccacgctgggttttcaaagaggaagatccaatccatctgcggtgccacagctggaaaaacaccgctctccacaaagtcacatacctgcaaaatggcaaaggacgcaaatacttccatcacaattccgatttttacattccgaaggctaccctgaaagacagcggcagctatttctgccggggactcgtcggctccaagaatgtgtcctccgaaaccgtgaatatcacgattacccaaggactggctgtgcctacaatctctagcttctttccgcctggataccaagtctccttctgtcttgtgatggtcctcctgtttgctgtggacacaggactgtacttttcc

SEQ ID NO: 1762 - DNA, 1452 bp, synthetic construct
  source 1..1452: mol_type = other DNA
atggccttaccagtgaccgccttgctcctgccgctggccttgctgctccacgccgccaggccgcagtctgtggtcacacagcctccatccgtgtctgctgcccctggacagaaagtgaccatctcctgtagcggcagcagcagcaacatcggcaacaactacgtgtcctggtatcagcagctccccggcacagctcccaaactgctgatctacgacaacaacaagcggcccagcggcatccccgatagattttctggcagcaagagcggcaccagcgccacactgggaattaccggacttcagacaggcgacgaggccgactactactgtggcacatgggatggcagcctgtacaccatgcttttcggcggaggcaccaagctgacagtgcttggcggaggcggaagtggaggcggaggatctggcggcggaggctctgaagtgcaactggtggaatctggcggcggactggttaagcctggcggatctctgagactgtcttgtgccgccagcggcttcaccttcagcaatgcctggatgagctgggttcgacaggcccctggaaaaggactggaatgggtcggattcatccggtccaaagcctacggcggcaccacagaatatgccgcctctgtgaagggcagattcaccatcagccgggacgacagcaagtctatcgcctacctccagatgaacaacctgaaaaccgaggacaccgccgtgtactactgcgccagagatggcctgtacagcagctcttggtacgacagcgattactggggccagggcacactggtcacagtgtcatctacgcgtggaatgaggactgaggatcttcccaaagctgtcgtctttctcgaaccccaatggtatcgggtgctcgaaaaagactctgtgacactgaaatgccaaggggcctactctcccgaggacaactccacacagtggtttcataatgagtccctcatcagctctcaggccagctcttatttcattgatgccgctacagtggacgactccggcgagtatcggtgtcagaccaatctgtctacactgtctgaccccgtgcagcttgaggtccacattggatggttgctcttgcaagccccacgctgggttttcaaagaggaagatccaatccatctgcggtgccacagctggaaaaacaccgctctccacaaagtcacatacctgcaaaatggcaaaggacgcaaatacttccatcacaattccgatttttacattccgaaggctaccctgaaagacagcggcagctatttctgccggggactcgtcggctccaagaatgtgtcctccgaaaccgtgaatatcacgattacccaaggactggctgtgcctacaatctctagcttctttccgcctggataccaagtctccttctgtcttgtgatggtcctcctgtttgctgtggacacaggactgtacttttcc

SEQ ID NO: 1763 - DNA, 1467 bp, synthetic construct
  source 1..1467: mol_type = other DNA
atggccttaccagtgaccgccttgctcctgccgctggccttgctgctccacgccgccaggccgcagtctgtgctgacacagcctcctagtgtgtctggcgctcctggacagagagtgaccatctcttgtaccggcagcagcagcaatatcggagccggctatgacgtgcactggtatcagcagctccctggcacagcccctaaactgctgatcttcggcaacagcaacagacccagcggcgtgcccgatagattcagcggctttaagagcggcacaagcgccagcctggctatcactggactgcaagccgaggacgaggccgactacttctgccagagctacgatagcagcctgagcggcagcggagtgtttggcacaggcaccaaagtgacagtgcttggcggcggaggcggaagtggaggcggaggatctggcggcggaggctctcaaatgcaactggttcaaagcggcggtggcctggtgcaacctggaagaagtctgagactgagctgtgccgccagcggcttcaccttcgatgattacgccatgcactgggtccgacaggcccctggaaaaggactggaatgggtgtccggcatctcctggaatagcggctctatcggctacgccgacagcgtgaagggcagattcaccatcagccgggacaacgccaagaacagcctgtacctccagatgaactccctgagagccgaggatacagccctgtactactgcgccaaggacatccacagcggcagctactacggcctgctgtactacgctatggacgtgtggggccagggcacaaccgtgacagtttcttctacgcgtggaatgaggactgaggatcttcccaaagctgtcgtctttctcgaaccccaatggtatcgggtgctcgaaaaagactctgtgacactgaaatgccaaggggcctactctcccgaggacaactccacacagtggtttcataatgagtccctcatcagctctcaggccagctcttatttcattgatgccgctacagtggacgactccggcgagtatcggtgtcagaccaatctgtctacactgtctgaccccgtgcagcttgaggtccacattggatggttgctcttgcaagccccacgctgggttttcaaagaggaagatccaatccatctgcggtgccacagctggaaaaacaccgctctccacaaagtcacatacctgcaaaatggcaaaggacgcaaatacttccatcacaattccgatttttacattccgaaggctaccctgaaagacagcggcagctatttctgccggggactcgtcggctccaagaatgtgtcctccgaaaccgtgaatatcacgattacccaaggactggctgtgcctacaatctctagcttctttccgcctggataccaagtctccttctgtcttgtgatggtcctcctgtttgctgtggacacaggactgtacttttcc

SEQ ID NO: 1764 - DNA, 1467 bp, synthetic construct
  source 1..1467: mol_type = other DNA
atggccttaccagtgaccgccttgctcctgccgctggccttgctgctccacgccgccaggccgctgcctgttctgacacagcctccatctgcctctggcacacctggacagagagtgaccatcagctgtagcggcagaagcagcaacatcggcagcaacagcgtgaactggtacagacagcttcctggcgctgcccctaagctgctgatctacagcaacaaccagcggcctcctggcgtgccagtcagattttctggcagcaagagcggcacaagcgccagcctggctatttctggactccagtctgaggacgaggccacctactactgtgccacctgggacgacaacctgaacgtgcactacgtgttcggcaccggcaccaaagtgacagtgcttggaagtagaggcggaggcggaagtggaggcggaggatctggcggcggaggctctcttgaaatggctcaggtgcagctggtgcagagcggagccgaagtgaagaaacctggcagcagcgtgaaggtgtcctgcaaagcttctggcggcaccttcagcagctacgccatctcttgggttcgacaggcccctggacaaggactggaatggatgggcagaatcatccccatcctgggaatcgccaactacgcccagaaattccagggcagagtgacaatcaccgccgacaagagcaccagcaccgcctacatggaactgagcagcctgagaagcgaggacaccgccgtgtactattgtgcaagaggcggctactacagccacgacatgtggagcgaagattggggccagggcacactggtcacagtgtcatctacgcgtggaatgaggactgaggatcttcccaaagctgtcgtctttctcgaaccccaatggtatcgggtgctcgaaaaagactctgtgacactgaaatgccaaggggcctactctcccgaggacaactccacacagtggtttcataatgagtccctcatcagctctcaggccagctcttatttcattgatgccgctacagtggacgactccggcgagtatcggtgtcagaccaatctgtctacactgtctgaccccgtgcagcttgaggtccacattggatggttgctcttgcaagccccacgctgggttttcaaagaggaagatccaatccatctgcggtgccacagctggaaaaacaccgctctccacaaagtcacatacctgcaaaatggcaaaggacgcaaatacttccatcacaattccgatttttacattccgaaggctaccctgaaagacagcggcagctatttctgccggggactcgtcggctccaagaatgtgtcctccgaaaccgtgaatatcacgattacccaaggactggctgtgcctacaatctctagcttctttccgcctggataccaagtctccttctgtcttgtgatggtcctcctgtttgctgtggacacaggactgtacttttcc

SEQ ID NO: 1765 - DNA, 1434 bp, synthetic construct
  source 1..1434: mol_type = other DNA
atggccttaccagtgaccgccttgctcctgccgctggccttgctgctccacgccgccaggccggacatcgtgctgacacagagccctgcttctctggccgtgtctctgggagagagagccaccatcaactgtagagccagcgagagcgtgtccgtgattggagcccacctgatccactggtatcagcagaagcctggacagcctcctaagctgctgatctacctggcctccaacctggaaacaggcgtgccagccagattttctggcagcggctctggcaccgatttcaccctgacaatcagcagcctccaggccgaagatgccgccatctactactgcctccagagccggatcttccccagaacctttggacagggcaccaagctggaaatcaaaggcggaggcggaagtggaggcggaggatctggcggcggaggctctcaagttcagctggtgcagtctggctccgagctgaagaaacctggcgagtccgtgaagatcagctgcaaggccagcggctacaccttcaccgactacagcatcaactgggtcaagcaggcccctggacagggactgaaatggatgggctggatcaacaccgagacaagagagcccgcctacgcctacgacttcagaggcagattcgtgttctccctggacaccagcgccagcacagcctatctccagatcagctctctgaaggccgaggataccgccgtgtacttctgcgccctggactacagctacgctatggactattggggccagggcaccctggtcacagtctcttctacgcgtggaatgaggactgaggatcttcccaaagctgtcgtctttctcgaaccccaatggtatcgggtgctcgaaaaagactctgtgacactgaaatgccaaggggcctactctcccgaggacaactccacacagtggtttcataatgagtccctcatcagctctcaggccagctcttatttcattgatgccgctacagtggacgactccggcgagtatcggtgtcagaccaatctgtctacactgtctgaccccgtgcagcttgaggtccacattggatggttgctcttgcaagccccacgctgggttttcaaagaggaagatccaatccatctgcggtgccacagctggaaaaacaccgctctccacaaagtcacatacctgcaaaatggcaaaggacgcaaatacttccatcacaattccgatttttacattccgaaggctaccctgaaagacagcggcagctatttctgccggggactcgtcggctccaagaatgtgtcctccgaaaccgtgaatatcacgattacccaaggactggctgtgcctacaatctctagcttctttccgcctggataccaagtctccttctgtcttgtgatggtcctcctgtttgctgtggacacaggactgtacttttcc

SEQ ID NO: 1766 - DNA, 1437 bp, synthetic construct
  source 1..1437: mol_type = other DNA
atggccttaccagtgaccgccttgctcctgccgctggccttgctgctccacgccgccaggccggacatcgtgctgacacagtctcccgccacactgtcactgagccctggcgatagagccacactgagctgtagagccagcgagagcgtgacaatcctgggcagccacctgatctactggtatcagcagaagcccggacaggcccctagactgctgattcagctcgccagcaatgtgcagacaggcatccctgccagattttccggcagcggcagcagaaccgatttcaccctgaccataagcagcctggaacctgaggacttcgccgtgtactactgcctccagagccggacaatccccagaacctttggacagggcaccaagctggaaatcaagagaggcggaggcggaagtggaggcggaggatctggcggcggaggctctcaagttcaactggtgcagagcggctccgagctgaagaaacctggcgagtccgtgaagattagctgcaaggccagcggctacaccttcacacactacagcatgaactgggtccgacaggctccaggccaaggactggaatggatgggcagaatcaacaccgagacaggcgagcccctgtacgccgacgatttcaagggcagattcgtgttcagcctggacaccagcgccagcacagcctatctccagatcagctctctgaaggccgaggacaccgccgtgtattattgcagcaacgactacctgtactccctggactattggggccagggcacactggtcacagtgtctagtacgcgtggaatgaggactgaggatcttcccaaagctgtcgtctttctcgaaccccaatggtatcgggtgctcgaaaaagactctgtgacactgaaatgccaaggggcctactctcccgaggacaactccacacagtggtttcataatgagtccctcatcagctctcaggccagctcttatttcattgatgccgctacagtggacgactccggcgagtatcggtgtcagaccaatctgtctacactgtctgaccccgtgcagcttgaggtccacattggatggttgctcttgcaagccccacgctgggttttcaaagaggaagatccaatccatctgcggtgccacagctggaaaaacaccgctctccacaaagtcacatacctgcaaaatggcaaaggacgcaaatacttccatcacaattccgatttttacattccgaaggctaccctgaaagacagcggcagctatttctgccggggactcgtcggctccaagaatgtgtcctccgaaaccgtgaatatcacgattacccaaggactggctgtgcctacaatctctagcttctttccgcctggataccaagtctccttctgtcttgtgatggtcctcctgtttgctgtggacacaggactgtacttttcc

SEQ ID NO: 1767 - DNA, 1449 bp, synthetic construct
  source 1..1449: mol_type = other DNA
atggccttaccagtgaccgccttgctcctgccgctggccttgctgctccacgccgccaggccggacttcgtgatgacacagagccctgatagcctggccgtgtctctcggcgagcgagtgaccatgagctgcaagtctagccagagcctgctgaacagcggcaaccagaagaactacctgacctggtatcagcagaagcccggccagcctcctaagctgctgatctactgggccagcaccagagaaagcggcgtgcccgatagattttctggctctggcagcggcaccgacttcaccctgacaatttctagcctgcaagccgaggacgtggccgtgtactactgccagaacgactacagctacccctacaccttcggccagggcaccaagctggaaatcaaaggcggaggcggaagtggaggcggaggatctggcggcggaggctctgaagtgcaactggttcagagcggagccgagctgaagaaacctggggccagcgtgaaggtgtcctgtaaagccagcggctacacctttaccgactactacatgaaatgggtccgacaggccccaggccagggactcgaatggatcggcgatattatccccagcaacggggccaccttctacaaccagaaattcaagggccgcgtgaccatcaccgtggacaagagcacaagcaccgcctacatggaactgagcagcctgagaagcgaggacaccgccgtgtattattgcgccagaagccatctgctgcgggccagttggttcgcctattggggacagggaaccctggtcaccgttagctctacgcgtggaatgaggactgaggatcttcccaaagctgtcgtctttctcgaaccccaatggtatcgggtgctcgaaaaagactctgtgacactgaaatgccaaggggcctactctcccgaggacaactccacacagtggtttcataatgagtccctcatcagctctcaggccagctcttatttcattgatgccgctacagtggacgactccggcgagtatcggtgtcagaccaatctgtctacactgtctgaccccgtgcagcttgaggtccacattggatggttgctcttgcaagccccacgctgggttttcaaagaggaagatccaatccatctgcggtgccacagctggaaaaacaccgctctccacaaagtcacatacctgcaaaatggcaaaggacgcaaatacttccatcacaattccgatttttacattccgaaggctaccctgaaagacagcggcagctatttctgccggggactcgtcggctccaagaatgtgtcctccgaaaccgtgaatatcacgattacccaaggactggctgtgcctacaatctctagcttctttccgcctggataccaagtctccttctgtcttgtgatggtcctcctgtttgctgtggacacaggactgtacttttcc

SEQ ID NO: 1768 - DNA, 1449 bp, synthetic construct
  source 1..1449: mol_type = other DNA
atggccttaccagtgaccgccttgctcctgccgctggccttgctgctccacgccgccaggccggacttcgtgatgacacagagccctgatagcctggccgtgtctctcggcgagcgagtgaccatgagctgcaagtctagccagagcctgctgaacagcggcaaccagaagaactacctgacctggtatcagcagaagcccggccagcctcctaagctgctgatctactgggccagcaccagagaaagcggcgtgcccgatagattttctggctctggcagcggcaccgacttcaccctgacaatttctagcctgcaagccgaggacgtggccgtgtactactgccagaacgactacagctacccctacaccttcggccagggcaccaagctggaaatcaaaggcggaggcggaagtggaggcggaggatctggcggcggaggctctcaagtgcaactggttcagagcggagccgagctgaagaaacctggggccagcgtgaaggtgtcctgtaaagccagcggctacacctttaccgactactacatgaaatgggtccgacaggccccaggccagggactcgaatggatcggcgatattatccccagcaacggggccaccttctacaaccagaaattcaagggccgcgtgaccatcaccgtggacaagagcacaagcaccgcctacatggaactgagcagcctgagaagcgaggacaccgccgtgtattattgcgccagaagccatctgctgcgggccagttggttcgcctattggggacagggaaccctggtcaccgttagctctacgcgtggaatgaggactgaggatcttcccaaagctgtcgtctttctcgaaccccaatggtatcgggtgctcgaaaaagactctgtgacactgaaatgccaaggggcctactctcccgaggacaactccacacagtggtttcataatgagtccctcatcagctctcaggccagctcttatttcattgatgccgctacagtggacgactccggcgagtatcggtgtcagaccaatctgtctacactgtctgaccccgtgcagcttgaggtccacattggatggttgctcttgcaagccccacgctgggttttcaaagaggaagatccaatccatctgcggtgccacagctggaaaaacaccgctctccacaaagtcacatacctgcaaaatggcaaaggacgcaaatacttccatcacaattccgatttttacattccgaaggctaccctgaaagacagcggcagctatttctgccggggactcgtcggctccaagaatgtgtcctccgaaaccgtgaatatcacgattacccaaggactggctgtgcctacaatctctagcttctttccgcctggataccaagtctccttctgtcttgtgatggtcctcctgtttgctgtggacacaggactgtacttttcc

SEQ ID NO: 1769 - DNA, 1419 bp, synthetic construct
  source 1..1419: mol_type = other DNA
atggccttaccagtgaccgccttgctcctgccgctggccttgctgctccacgccgccaggccggacgtgcagatcacacagagccctagctacctggctgcctctcctggcgagacaatcaccatcaactgtcgggccagcaagagcatcagcaaggacctggcctggtatcaagagaagcccggcaagaccaacaagctgctgatctacagcggcagcacactccagtctggcatccccagcagattttccggctctggcagcggcaccgatttcaccctgaccataagcagcctggaacctgaggacttcgccatgtactactgccagcagcacaacaagtacccctacacctttggcggaggcaccaagctggaaatcaagagaggcggaggcggaagtggaggcggaggatctggcggcggaggctctcaagttcaactgcaacagcctggggccgagcttgttagacctggcgcttctgtgaagctgagctgcaaggccagcggctacaccttcaccagctactggatgaactgggtcaagcagcggcctgaccagggcctcgaatggatcggcagaatcgacccctacgacagcgagacacactacaaccagaagttcaaggacaaggccatcctgaccgtggacaagagcagctccaccgcctacatgcaactgagcagcctgacctctgaggatagcgccgtgtactattgcgccagaggcaactgggacgactattggggccagggcacaaccctgacagtgtctagtacgcgtggaatgaggactgaggatcttcccaaagctgtcgtctttctcgaaccccaatggtatcgggtgctcgaaaaagactctgtgacactgaaatgccaaggggcctactctcccgaggacaactccacacagtggtttcataatgagtccctcatcagctctcaggccagctcttatttcattgatgccgctacagtggacgactccggcgagtatcggtgtcagaccaatctgtctacactgtctgaccccgtgcagcttgaggtccacattggatggttgctcttgcaagccccacgctgggttttcaaagaggaagatccaatccatctgcggtgccacagctggaaaaacaccgctctccacaaagtcacatacctgcaaaatggcaaaggacgcaaatacttccatcacaattccgatttttacattccgaaggctaccctgaaagacagcggcagctatttctgccggggactcgtcggctccaagaatgtgtcctccgaaaccgtgaatatcacgattacccaaggactggctgtgcctacaatctctagcttctttccgcctggataccaagtctccttctgtcttgtgatggtcctcctgtttgctgtggacacaggactgtacttttcc

SEQ ID NO: 1770 - DNA, 1425 bp, synthetic construct
  source 1..1425: mol_type = other DNA
atggccttaccagtgaccgccttgctcctgccgctggccttgctgctccacgccgccaggccggagatcgtgctgacacagagccctaccagcatgacagcctctccaggcgagcaagtgaccatcacctgtagagccagcagcagcatcaactacatgcactggtatcagcagaagcctggcgcaagccccagaccttggatctacgagacaagcaagctggcctccggcgtgcccgatagattttctggatctgccagcggcaccagctacagcctgaccatcaacaacatggaagccgaggacgccgccacctactactgccagcagtggaattacccctcctggacctttggcggaggcaccaagctggaacttaaaggcggaggcggaagtggaggcggaggatctggcggcggaggctctgaagtgcagctcgttgagtctggtggcggactggttcagcctggaagaagcctgaagctgagctgtgccgccagcggcttcaccttcagcgactacaatatggcctgggtccgacaggcccctaagaaaggactggaatgggtcgccaccatcctgtacgatggcggcagaacctactaccggggcagcgtgaagggcagattcaccatcagcagagacaacgccaagagcaccctgtacctgcggatggactctctgagaagcgaggataccgccacatattactgtgccacacacagccggggcaccgactactttgattattggggccagggcgtgatggttaccgtgtctagtacgcgtggaatgaggactgaggatcttcccaaagctgtcgtctttctcgaaccccaatggtatcgggtgctcgaaaaagactctgtgacactgaaatgccaaggggcctactctcccgaggacaactccacacagtggtttcataatgagtccctcatcagctctcaggccagctcttatttcattgatgccgctacagtggacgactccggcgagtatcggtgtcagaccaatctgtctacactgtctgaccccgtgcagcttgaggtccacattggatggttgctcttgcaagccccacgctgggttttcaaagaggaagatccaatccatctgcggtgccacagctggaaaaacaccgctctccacaaagtcacatacctgcaaaatggcaaaggacgcaaatacttccatcacaattccgatttttacattccgaaggctaccctgaaagacagcggcagctatttctgccggggactcgtcggctccaagaatgtgtcctccgaaaccgtgaatatcacgattacccaaggactggctgtgcctacaatctctagcttctttccgcctggataccaagtctccttctgtcttgtgatggtcctcctgtttgctgtggacacaggactgtacttttcc

SEQ ID NO: 1771 - DNA, 1452 bp, synthetic construct
  source 1..1452: mol_type = other DNA
atggccttaccagtgaccgccttgctcctgccgctggccttgctgctccacgccgccaggccggacatcgtgatgacacagagcccttctagcctggccgtgtctgagggcgagacagtgaccatcaactgcaagagcagccagagcttcctgtctagcggcgacggcaagaattacgtggcctggtatcagtacaagcccggacagagccccaagctgctgatctactgggccagcacaagacagagcggcgtgcccgatagattcatcggctctggcagcggcaccgacttcaccctgacaatctctacagtgcaggccgaggacctggctatctactactgccagcagtattacgacacccctctgacctttggctccggcaccaagctggaaatcaaaggcggaggcggaagtggaggcggaggatctggcggcggaggctctgaagtgaagctgcaagagtctggccccagcctggtgcagagtagccaaacactgagcctgacctgtaccgtgtccggctttagcctgaccagctaccacatccactgggtccgacagacccctggcaaaggactggaatggatgggcgtgatgtggagcgacggcgacaccagctataacagcgccctgaagtcccggctgagcatcagcagagatacaagccagagccaggtgttcctgaagatgaacagcctccagaccgaggacaccgccacctactattgtgccagaggctactacagcagctacctgtacctttggttcgcctattggggccagggcaccctggttacagtcagctctacgcgtggaatgaggactgaggatcttcccaaagctgtcgtctttctcgaaccccaatggtatcgggtgctcgaaaaagactctgtgacactgaaatgccaaggggcctactctcccgaggacaactccacacagtggtttcataatgagtccctcatcagctctcaggccagctcttatttcattgatgccgctacagtggacgactccggcgagtatcggtgtcagaccaatctgtctacactgtctgaccccgtgcagcttgaggtccacattggatggttgctcttgcaagccccacgctgggttttcaaagaggaagatccaatccatctgcggtgccacagctggaaaaacaccgctctccacaaagtcacatacctgcaaaatggcaaaggacgcaaatacttccatcacaattccgatttttacattccgaaggctaccctgaaagacagcggcagctatttctgccggggactcgtcggctccaagaatgtgtcctccgaaaccgtgaatatcacgattacccaaggactggctgtgcctacaatctctagcttctttccgcctggataccaagtctccttctgtcttgtgatggtcctcctgtttgctgtggacacaggactgtacttttcc

SEQ ID NO: 1772 - DNA, 1464 bp, synthetic construct
  source 1..1464: mol_type = other DNA
atggccttaccagtgaccgccttgctcctgccgctggccttgctgctccacgccgccaggccggacgtgctgatgacccagacacctgtgtctctgccagtgtctctcggaggccaggtgtccatctcctgtagaagcagccagagcctggtgcactccgacggcgatacctacctgcactggtatctccagaagcctggacagagccctcagctcctgatctaccgggtgtccaacagattcagcggcgtgcccgatagattttccggcagcggctctggcaccgacttcaccctgaagatcagcagagtggaacccgaggacctgggcctgtactactgtctccagaccacacacttcccaccttggacctttggcggaggcaccaagctggaaatgaaaggcggaggcggaagtggaggcggaggatctggcggcggaggctctcaggttcagctccagcagtctggacccgagcttagaaggccaggatctagcgtcagactgagctgcaaggccagcggctaccggatcaaggacttcctgatccactggattaagaacagacccgagcacggcctggaatggatcggatggattgaccctgaggacggcgagactaagtacgcccagaagttccagaccaaggccacactgaccgccgacacctctagcaacaccgcctacatgcaactgagcagcctgaccagcgaggacaccgccacctacttttgtgctagatggggcgacgtgtactacggcctgatgagaggccatgtgatggatgcctggggccagggaacaagcgtgacagtctcttctacgcgtggaatgaggactgaggatcttcccaaagctgtcgtctttctcgaaccccaatggtatcgggtgctcgaaaaagactctgtgacactgaaatgccaaggggcctactctcccgaggacaactccacacagtggtttcataatgagtccctcatcagctctcaggccagctcttatttcattgatgccgctacagtggacgactccggcgagtatcggtgtcagaccaatctgtctacactgtctgaccccgtgcagcttgaggtccacattggatggttgctcttgcaagccccacgctgggttttcaaagaggaagatccaatccatctgcggtgccacagctggaaaaacaccgctctccacaaagtcacatacctgcaaaatggcaaaggacgcaaatacttccatcacaattccgatttttacattccgaaggctaccctgaaagacagcggcagctatttctgccggggactcgtcggctccaagaatgtgtcctccgaaaccgtgaatatcacgattacccaaggactggctgtgcctacaatctctagcttctttccgcctggataccaagtctccttctgtcttgtgatggtcctcctgtttgctgtggacacaggactgtacttttcc

SEQ ID NO: 1773 - DNA, 1452 bp, synthetic construct
  source 1..1452: mol_type = other DNA
atggccttaccagtgaccgccttgctcctgccgctggccttgctgctccacgccgccaggccggacatcgtgatgacccaggccgctcccagcatccctgtgacacctggcgagagcgtgtccatctcctgccggtctagcaagagcctgctgaacagcaacggcaatacctacctgtactggttcctccagcggccaggccagtctccccaactgctgatctaccggatgagcaacctggcctccggcgtgcccgatagattttctggcagcggctccggcaccgccttcaccctgagaatcagcagagtggaagccgaggacgtgggcgtgtactactgtatgcagcacctggaataccccttcaccttcggagccggcaccaagctggaactgaagagaggcggaggcggaagtggaggcggaggatctggcggcggaggctctgaagtgcaactccagcagagcggccctgagctgattaagcctggggccagcgtgaagatgagctgcaaggccagcggctacaccttcaccagctacgtgatgcactgggtcaagcagaagcccggccagggcctggaatggatcggctacatcaacccctacaacgatggcaccaagtacaacgagaagttcaagggcaaggccaccctgaccagcgacaagagcagcagcaccgcctacatggaactgagcagcctgacaagcgaggacagcgccgtgtactattgcgccagaggcacctactactacggcagccgggtgttcgactattggggccagggcaccacactgaccgtgtcctctacgcgtggaatgaggactgaggatcttcccaaagctgtcgtctttctcgaaccccaatggtatcgggtgctcgaaaaagactctgtgacactgaaatgccaaggggcctactctcccgaggacaactccacacagtggtttcataatgagtccctcatcagctctcaggccagctcttatttcattgatgccgctacagtggacgactccggcgagtatcggtgtcagaccaatctgtctacactgtctgaccccgtgcagcttgaggtccacattggatggttgctcttgcaagccccacgctgggttttcaaagaggaagatccaatccatctgcggtgccacagctggaaaaacaccgctctccacaaagtcacatacctgcaaaatggcaaaggacgcaaatacttccatcacaattccgatttttacattccgaaggctaccctgaaagacagcggcagctatttctgccggggactcgtcggctccaagaatgtgtcctccgaaaccgtgaatatcacgattacccaaggactggctgtgcctacaatctctagcttctttccgcctggataccaagtctccttctgtcttgtgatggtcctcctgtttgctgtggacacaggactgtacttttcc

SEQ ID NO: 1774 - DNA, 1452 bp, synthetic construct; identical to SEQ ID NO: 1773
  source 1..1452: mol_type = other DNA

SEQ ID NO: 1775 - DNA, 1506 bp, synthetic construct
  source 1..1506: mol_type = other DNA
atggccttaccagtgaccgccttgctcctgccgctggccttgctgctccacgccgccaggccgatcaacatctacaacgccgagcctgccaatcctagcgagaagaacagccccgaattcgacatcgtgatgacacagagccccgccacactgtcactgtctccaggcgaaagagccacactgagctgtcggagcagcaagagcctccagaacgtgaacggcaacacctacctgtactggttccagcagaagcccggccagtctcctcagctcctgatctacagaatgagcaacctgaacagcggcgtgcccgacagattttctggcagcggaagcggcaccgagttcaccctgaccataagcagcctggaacctgaggacttcgccgtgtactactgtatgcagcacctggaataccccatcaccttcggagccggcaccaagctggaaatcaaaggcggaggcggaagtggaggcggaggatctggcggcggaggctctgaagtgcaactggttgaatctggcggcggactggttaagcctggcggatctctgaagctgagctgtgccgccagcggctacacctttaccagctacgtgatgcactgggtccgacaggcccctggcaaaggacttgagtggatcggctacatcaacccctacaacgatggcaccaagtacaacgagaagttccagggcagagtgaccatcagctccgacaagagcatcagcaccgcctacatggaactgagcagcctgagaagcgaggataccgccatgtactattgcgccagaggcacctactactacggcaccagagtgttcgactactggggccagggaaccctggtcacagtctcttctacgcgtggaatgaggactgaggatcttcccaaagctgtcgtctttctcgaaccccaatggtatcgggtgctcgaaaaagactctgtgacactgaaatgccaaggggcctactctcccgaggacaactccacacagtggtttcataatgagtccctcatcagctctcaggccagctcttatttcattgatgccgctacagtggacgactccggcgagtatcggtgtcagaccaatctgtctacactgtctgaccccgtgcagcttgaggtccacattggatggttgctcttgcaagccccacgctgggttttcaaagaggaagatccaatccatctgcggtgccacagctggaaaaacaccgctctccacaaagtcacatacctgcaaaatggcaaaggacgcaaatacttccatcacaattccgatttttacattccgaaggctaccctgaaagacagcggcagctatttctgccggggactcgtcggctccaagaatgtgtcctccgaaaccgtgaatatcacgattacccaaggactggctgtgcctacaatctctagcttctttccgcctggataccaagtctccttctgtcttgtgatggtcctcctgtttgctgtggacacaggactgtacttttcc

SEQ ID NO: 1776 - DNA, 1437 bp, synthetic construct
  source 1..1437: mol_type = other DNA
atggccttaccagtgaccgccttgctcctgccgctggccttgctgctccacgccgccaggccggacatccagatgacacagagccctagcagcctgtctgccagcgtgggagacagagtgaccatcacatgcaaggccagcgaccacatcaacaactggctggcctggtatcagcagaagcctggacaggcccctaagctgctgatctacggcgctaccacactggaaacaggcgtgcccagcagattttctggcagcggctctggcaccgactacaccctgacaatatccagcctccagcctgaggacttcgccacctactactgtcagcagagctggaacaccccttggacattcggccagggcaccaagctggaaatcaagagaggcggaggcggaagtggaggcggaggatctggcggcggaggctctcaagttcagcttcaacagcctggcgctgagctggtcaaacctggcgcttctgtgaagatgagctgcaaagccagcggctacgccttcagcagctactggatcaactggatgaagcagaaacccggccagggactcgaatggatcggccaaatctatcccggcgacggcgacaccaactacaacggcaagttcaagggcagagccacactgaccgccgatacctctagcagcacagcctacatgcagctgagcagcctgaccagcgaagatagcgccgtgtacttctgtgcccggtccatcacaacagtcgtgggctgcgctatggactattggggccagggaacaagcgtgaccgtgtctagtacgcgtggaatgaggactgaggatcttcccaaagctgtcgtctttctcgaaccccaatggtatcgggtgctcgaaaaagactctgtgacactgaaatgccaaggggcctactctcccgaggacaactccacacagtggtttcataatgagtccctcatcagctctcaggccagctcttatttcattgatgccgctacagtggacgactccggcgagtatcggtgtcagaccaatctgtctacactgtctgaccccgtgcagcttgaggtccacattggatggttgctcttgcaagccccacgctgggttttcaaagaggaagatccaatccatctgcggtgccacagctggaaaaacaccgctctccacaaagtcacatacctgcaaaatggcaaaggacgcaaatacttccatcacaattccgatttttacattccgaaggctaccctgaaagacagcggcagctatttctgccggggactcgtcggctccaagaatgtgtcctccgaaaccgtgaatatcacgattacccaaggactggctgtgcctacaatctctagcttctttccgcctggataccaagtctccttctgtcttgtgatggtcctcctgtttgctgtggacacaggactgtacttttcc

SEQ ID NO: 1777 - DNA, 1443 bp, synthetic construct
  source 1..1443: mol_type = other DNA
atggccttaccagtgaccgccttgctcctgccgctggccttgctgctccacgccgccaggccgcagatcgtgctgtctcagtctcctgccatcctgagcgcttccccaggcgagaaagtgaccatgacctgtagagccagcagcagcgtgtcctacatgcactggtatcagcagaagcccggcagcagccctaagccttggatctacgccaccagcaatctggcctctggcgtgccagccagattttctggctctggcagcggcaccagctacagcttcacaatcagcagagtggaagccgaggacgccgccacctactattgtcagcagtggaccttcaatcctcctaccttcggcggaggcacccggctggaaatcaaaagaacagtggctgctggcggaggcggaagtggaggcggaggatctggcggcggaggctctcaggcttatctgcaacagagcggagccgaactcgtcagacctggcgcttctgtgaagatgagctgcaaggccagcggctacaccttcaccagctataatatgcactgggtcaagcagacccctcggcagggactcgaatggatcggcggaatctatcccggcaacggcgacacctcctacaaccagaagttcaagggcaaagccacactgaccgtgggcaagagcagcagcaccgcctatatgcagctcagcagcctgaccagcgaggacagcgccgtgtacttctgcgccagatacgactacaactacgctatggactactggggccagggcaccagcgtgacagttagctctgccagcacgcgtggaatgaggactgaggatcttcccaaagctgtcgtctttctcgaaccccaatggtatcgggtgctcgaaaaagactctgtgacactgaaatgccaaggggcctactctcccgaggacaactccacacagtggtttcataatgagtccctcatcagctctcaggccagctcttatttcattgatgccgctacagtggacgactccggcgagtatcggtgtcagaccaatctgtctacactgtctgaccccgtgcagcttgaggtccacattggatggttgctcttgcaagccccacgctgggttttcaaagaggaagatccaatccatctgcggtgccacagctggaaaaacaccgctctccacaaagtcacatacctgcaaaatggcaaaggacgcaaatacttccatcacaattccgatttttacattccgaaggctaccctgaaagacagcggcagctatttctgccggggactcgtcggctccaagaatgtgtcctccgaaaccgtgaatatcacgattacccaaggactggctgtgcctacaatctctagcttctttccgcctggataccaagtctccttctgtcttgtgatggtcctcctgtttgctgtggacacaggactgtacttttcc

SEQ ID NO: 1778 - DNA, 1440 bp, synthetic construct
  source 1..1440: mol_type = other DNA
atggccttaccagtgaccgccttgctcctgccgctggccttgctgctccacgccgccaggccggacgagatcgtgctgacacagagccctgccaccctgtctctgagccctggcgaaagagccaccctgagctgtagagccagccagagcgtgtccagctacctggcctggtatcagcagaagcccggccaggctccccggctgctgatctacgatgccagcaatagagccaccggcatccccgccagattttccggctctggcagcggcaccgacttcaccctgaccatcagctccctggaacccgaggacttcgccgtgtactactgccagcagcggagcaactggcccatcacattcggccagggcacccggctggaaatcaaaggcggaggcggaagtggaggcggaggatctggcggcggaggctctgaggtgcagcttgttgagtctggcggaggactggtgcagcccgatagaagcctgagactgtcttgtgccgccagcggcttcaccttccacgattatgccatgcactgggtccgacaggcccctggcaaaggacttgaatgggtgtccaccatctcttggaacagcggcacaatcggctacgccgactctgtgaagggcagattcaccatcagccgggacaacgccaagaacagcctgtacctccagatgaactccctgagagccgaggacacagccctgtactactgcgccaaggacatccagtacggcaactactactacggcatggacgtgtggggccagggcacaacagtgacagtctcttctacgcgtggaatgaggactgaggatcttcccaaagctgtcgtctttctcgaaccccaatggtatcgggtgctcgaaaaagactctgtgacactgaaatgccaaggggcctactctcccgaggacaactccacacagtggtttcataatgagtccctcatcagctctcaggccagctcttatttcattgatgccgctacagtggacgactccggcgagtatcggtgtcagaccaatctgtctacactgtctgaccccgtgcagcttgaggtccacattggatggttgctcttgcaagccccacgctgggttttcaaagaggaagatccaatccatctgcggtgccacagctggaaaaacaccgctctccacaaagtcacatacctgcaaaatggcaaaggacgcaaatacttccatcacaattccgatttttacattccgaaggctaccctgaaagacagcggcagctatttctgccggggactcgtcggctccaagaatgtgtcctccgaaaccgtgaatatcacgattacccaaggactggctgtgcctacaatctctagcttctttccgcctggataccaagtctccttctgtcttgtgatggtcctcctgtttgctgtggacacaggactgtacttttcc

SEQ ID NO: 1779 - DNA, 1422 bp, synthetic construct
  source 1..1422: mol_type = other DNA
atggccttaccagtgaccgccttgctcctgccgctggccttgctgctccacgccgccaggccggacatccagatgacacagagccctagcagcctgtctgccagcgtgggagatagagtgaccatcaactgcaaggccagccaggacatcaacagctacctgagctggttccagcagaagcctggcaaggcccctaagacactgatctaccgggccaacagactggtggatggcgtgccaagcagattttctggcagcggcagcggccaggattacaccctgacaatatccagcctccagcctgaggacttcgccacctactactgcctccagtacgacgagttccctctgacctttggcggaggcaccaaggtggaaatcaaaggcggaggcggaagtggaggcggaggatctggcggcggaggctctcaggtgcaactggtgcagtctggggccgaagtgaagaaacctggggcctctgtgaaggtgtcctgcaaagccagcggctacacctttaccaactacgacatcaactgggtccgacaggctccaggccaaggactggaatggatcggctggatctatcctggcgacggcagcaccaagtacaacgagaagttcaaggccaaggccacactgaccgccgataccagcacaagcaccgcctacatggaactgcggagcctgagaagcgacgacaccgccgtgtactattgtgcctccggctacgaggacgctatggactattggggccagggcaccaccgtgacagtgtctagtacgcgtggaatgaggactgaggatcttcccaaagctgtcgtctttctcgaaccccaatggtatcgggtgctcgaaaaagactctgtgacactgaaatgccaaggggcctactctcccgaggacaactccacacagtggtttcataatgagtccctcatcagctctcaggccagctcttatttcattgatgccgctacagtggacgactccggcgagtatcggtgtcagaccaatctgtctacactgtctgaccccgtgcagcttgaggtccacattggatggttgctcttgcaagccccacgctgggttttcaaagaggaagatccaatccatctgcggtgccacagctggaaaaacaccgctctccacaaagtcacatacctgcaaaatggcaaaggacgcaaatacttccatcacaattccgatttttacattccgaaggctaccctgaaagacagcggcagctatttctgccggggactcgtcggctccaagaatgtgtcctccgaaaccgtgaatatcacgattacccaaggactggctgtgcctacaatctctagcttctttccgcctggataccaagtctccttctgtcttgtgatggtcctcctgtttgctgtggacacaggactgtacttttcc

SEQ ID NO: 1780 - DNA, 1428 bp, synthetic construct
  source 1..1428: mol_type = other DNA
atggccttaccagtgaccgccttgctcctgccgctggccttgctgctccacgccgccaggccggacatcgtgatgacccagacacctctgagcctgagcgtgacacctggacagcctgccagcattagctgcaagagcagccagtctctgctggacggcgacggcaagacctacctgaattggctgctccagaagcctggacagagccctcagcggctgatctacctggtgtccaagctggatagcggcgtgcccgatagattttctggcagcggctctggcaccgacttcaccctgaagatcagcagagtggaagccgaggacgtgggcgtgtactactgttggcagggcacacacttccccagaacattcggccagggcacaaagctggaaatcaaaggcggaggcggaagtggaggcggaggatctggcggcggaggctctcaagtgcaactggttcagagcggagccgaagtgaagaaacctggggcctctgtgaaggtgtcctgcaaggccagcggctacaccttcaaggacacctacatccactgggtccgacaggcccctggacaaggacttgagtggatgggcagaatcgaccccgccaacggcaacaccaaatacgaccccaagttccagggcagagtgaccatgaccagagacaccagcatcagcaccgcctacatggaactgagccggctgagatccgatgacaccgccgtgtactattgcgctagaagaggcggagtggattggggccagggaacactggttaccgtgtctagtacgcgtggaatgaggactgaggatcttcccaaagctgtcgtctttctcgaaccccaatggtatcgggtgctcgaaaaagactctgtgacactgaaatgccaaggggcctactctcccgaggacaactccacacagtggtttcataatgagtccctcatcagctctcaggccagctcttatttcattgatgccgctacagtggacgactccggcgagtatcggtgtcagaccaatctgtctacactgtctgaccccgtgcagcttgaggtccacattggatggttgctcttgcaagccccacgctgggttttcaaagaggaagatccaatccatctgcggtgccacagctggaaaaacaccgctctccacaaagtcacatacctgcaaaatggcaaaggacgcaaatacttccatcacaattccgatttttacattccgaaggctaccctgaaagacagcggcagctatttctgccggggactcgtcggctccaagaatgtgtcctccgaaaccgtgaatatcacgattacccaaggactggctgtgcctacaatctctagcttctttccgcctggataccaagtctccttctgtcttgtgatggtcctcctgtttgctgtggacacaggactgtacttttcc

SEQ ID NO: 1781 - DNA, 1431 bp, synthetic construct
  source 1..1431: mol_type = other DNA
atggccttaccagtgaccgccttgctcctgccgctggccttgctgctccacgccgccaggccggacatccagatgacacagagccctagcagcctgtctgccagcgtgggagacagagtgaccatcacatgcaaggccagccaggatgtgtctacagccgtggcctggttccagcagaagcctggaaaagcccctaagctgctgatctacagccccagctacagatacaccggcgtgcccagcagattttctggcagcggctctggcaccgacttcaccctgacaatatccagcctccagcctgaggacttcacctactactgccagcagctctacagcaccccttacacattcggccagggcaccaaggtggaaatcaaaggcggaggcggaagtggaggcggaggatctggcggcggaggctctgaagtgcaactggttcagagcggagccgaagtgaagaaacctggggcctctgtgaaggtgtcctgcaaagccagcggctacacctttaccgactactacctggacgtggtcgtgcggcaagctcctggacaaggactggaatggatcggcagagtgaacccctacaacggcggcaccatctacaaccagaaattcaagggaagagtgaccctgaccagagacaccagcacctccacagcctacctggaactgagcagcctgagaagcgaagataccgccgtgtactactgcgccagggaccactacagatatgaccctctgctggactactggggccagggaaccctggttacagtgtctagtacgcgtggaatgaggactgaggatcttcccaaagctgtcgtctttctcgaaccccaatggtatcgggtgctcgaaaaagactctgtgacactgaaatgccaaggggcctactctcccgaggacaactccacacagtggtttcataatgagtccctcatcagctctcaggccagctcttatttcattgatgccgctacagtggacgactccggcgagtatcggtgtcagaccaatctgtctacactgtctgaccccgtgcagcttgaggtccacattggatggttgctcttgcaagccccacgctgggttttcaaagaggaagatccaatccatctgcggtgccacagctggaaaaacaccgctctccacaaagtcacatacctgcaaaatggcaaaggacgcaaatacttccatcacaattccgatttttacattccgaaggctaccctgaaagacagcggcagctatttctgccggggactcgtcggctccaagaatgtgtcctccgaaaccgtgaatatcacgattacccaaggactggctgtgcctacaatctctagcttctttccgcctggataccaagtctccttctgtcttgtgatggtcctcctgtttgctgtggacacaggactgtacttttcc

SEQ ID NO: 1782 - DNA, 1449 bp, synthetic construct
  source 1..1449: mol_type = other DNA
atggccttaccagtgaccgccttgctcctgccgctggccttgctgctccacgccgccaggccggacatccagatgacacagagccctagcagcctgtctgccagcgtgggagacagagtgaccatcacctgtagagccagccagagcgtgtccaccagcagctacaactacatgcactggtatcagcagaagcccggcaagcctcctaagctgctgattaagtacgccagcaacctggaaagcggcgtgcccagcagattttctggcagcggctctggcaccgacttcaccctgacaatatccagcctccagcctgaggacttcgccacctactactgtcagcactcctgggagatccctctgacattcggccagggcaccaaggtggaaatcaaaggcggaggcggaagtggaggcggaggatctggcggcggaggctctgaagtgcaactggttcagagcggagccgaagtgaagaaacctggggcctctgtgaaggtgtcctgcaaggccagcggctacagcttcaccgactattatatgcactgggtccgacaggctccaggccagggacttgagtggatcggcagaatcaacccctacaacggcgctgccttctacagccagaacttcaaggatagagtgaccctgaccgtggacaccagcaccagcacagcctacctggaactgagcagcctgagaagcgaggacaccgccgtgtactactgcgccattgagagaggcgctgacctggaaggctacgctatggattattggggccagggaaccctggtcaccgtgtcatctacgcgtggaatgaggactgaggatcttcccaaagctgtcgtctttctcgaaccccaatggtatcgggtgctcgaaaaagactctgtgacactgaaatgccaaggggcctactctcccgaggacaactccacacagtggtttcataatgagtccctcatcagctctcaggccagctcttatttcattgatgccgctacagtggacgactccggcgagtatcggtgtcagaccaatctgtctacactgtctgaccccgtgcagcttgaggtccacattggatggttgctcttgcaagccccacgctgggttttcaaagaggaagatccaatccatctgcggtgccacagctggaaaaacaccgctctccacaaagtcacatacctgcaaaatggcaaaggacgcaaatacttccatcacaattccgatttttacattccgaaggctaccctgaaagacagcggcagctatttctgccggggactcgtcggctccaagaatgtgtcctccgaaaccgtgaatatcacgattacccaaggactggctgtgcctacaatctctagcttctttccgcctggataccaagtctccttctgtcttgtgatggtcctcctgtttgctgtggacacaggactgtacttttcc

SEQ ID NO: 1783 - DNA, 1443 bp, synthetic construct
  source 1..1443: mol_type = other DNA
atggccttaccagtgaccgccttgctcctgccgctggccttgctgctccacgccgccaggccggagatcgtgctgacacagtctccagccacactgagcgcttctccaggcgagagagtgaccctgacctgtagagccagcagcaacgtgatctccagctacgtgcactggtatcagcagaagcctggcagcagccccagactgtttctgtacagcaccagcaatctggcctccggcgtgccaagcagattttctggctctggcagcggcaccgacttcacctttaccatctctagcctggaagccgaggacgccgccacctactactgtcagcagtacagcggctaccctctgaccttcggccagggcacaagactggaaatcaaaggcggaggcggaagtggaggcggaggatctggcggcggaggctctcaagttcagctgcaagagtctggccctggcctggtcaagcctagcgaaacactgagcctgacctgcgccgtgtctggctactctatcaccagcgcctactattggaactggatcagacagcctcctggcaaaggactggaatggatcggctacatcagctacgacggcagaaacaactacaaccccagcctgaagaaccggatcaccatcaatcccgacaccagcaagaaccagttcagcctccagctgaacagcgtgacccctgaggataccgccgtgtactactgtgccagagaaggcgactacgacgtgggcaactactacgctatggactactggggccagggaaccctggtcacagtctcttctacgcgtggaatgaggactgaggatcttcccaaagctgtcgtctttctcgaaccccaatggtatcgggtgctcgaaaaagactctgtgacactgaaatgccaaggggcctactctcccgaggacaactccacacagtggtttcataatgagtccctcatcagctctcaggccagctcttatttcattgatgccgctacagtggacgactccggcgagtatcggtgtcagaccaatctgtctacactgtctgaccccgtgcagcttgaggtccacattggatggttgctcttgcaagccccacgctgggttttcaaagaggaagatccaatccatctgcggtgccacagctggaaaaacaccgctctccacaaagtcacatacctgcaaaatggcaaaggacgcaaatacttccatcacaattccgatttttacattccgaaggctaccctgaaagacagcggcagctatttctgccggggactcgtcggctccaagaatgtgtcctccgaaaccgtgaatatcacgattacccaaggactggctgtgcctacaatctctagcttctttccgcctggataccaagtctccttctgtcttgtgatggtcctcctgtttgctgtggacacaggactgtacttttcc

SEQ ID NO: 1784 - DNA, 1443 bp, synthetic construct
  source 1..1443: mol_type = other DNA
atggccttaccagtgaccgccttgctcctgccgctggccttgctgctccacgccgccaggccggagatcgtgctgacacagtctcccgccacactgtcactgtctccaggcgaaagagccacactgagctgtagagccagcagcaacgtgatctccagctacgtgcactggtatcagcagaagcctggacaggcccctcggctgctgatctacagcacaagcaatctggcctctggcatccccgccagattttctggctctggaagcggcaccgacttcaccctgaccataagcagcctggaacctgaggacttcgccgtgtactactgccagcagtatagcggctaccctctgaccttcggccagggcacaagactggaaatcaaaggcggaggcggaagtggaggcggaggatctggcggcggaggctctgaagtgcaactggtggaaagtggcggcggactggtgcaacctggaagaagcctgagactgtcctgtgccgccagcggctactctatcacaagcgcctactactggaactgggtccgacaggctcctggcaaaggactggaatgggtgtcctacatcagctacgacggcagaaacaactacaaccccagcctgaagaaccgcttcaccatcagccgggacaacgccaagaagtccctgtacctccagatgaacagcctgagagccgaggacacagccctgtactattgcgccaaagagggcgactacgacgtcggcaactactacgctatggactactggggccagggaaccaccgtgactgtctcttctacgcgtggaatgaggactgaggatcttcccaaagctgtcgtctttctcgaaccccaatggtatcgggtgctcgaaaaagactctgtgacactgaaatgccaaggggcctactctcccgaggacaactccacacagtggtttcataatgagtccctcatcagctctcaggccagctcttatttcattgatgccgctacagtggacgactccggcgagtatcggtgtcagaccaatctgtctacactgtctgaccccgtgcagcttgaggtccacattggatggttgctcttgcaagccccacgctgggttttcaaagaggaagatccaatccatctgcggtgccacagctggaaaaacaccgctctccacaaagtcacatacctgcaaaatggcaaaggacgcaaatacttccatcacaattccgatttttacattccgaaggctaccctgaaagacagcggcagctatttctgccggggactcgtcggctccaagaatgtgtcctccgaaaccgtgaatatcacgattacccaaggactggctgtgcctacaatctctagcttctttccgcctggataccaagtctccttctgtcttgtgatggtcctcctgtttgctgtggacacaggactgtacttttcc

SEQ ID NO: 1785 - DNA, 1470 bp, synthetic construct
  source 1..1470: mol_type = other DNA
atggccttaccagtgaccgccttgctcctgccgctggccttgctgctccacgccgccaggccggacgtggtcatgacacagaccccactgagcctgcctgtgtctctgggagatcaggccagcatctcctgtagaagcagccagagcctggtgcacagcaacggcaacacctacctgcggtggtatctccagaagcctggacagagccccaaggtgctgatctacaaggtgtccaacagagtgtccggcgtgcccgatagattttctggcagcggctctggcaccgacttcaccctgaagatcaatagagtggaagccgaggacctgggcgtgtacttctgtagccagagcacccatgtgccttggacctttggcggaggcaccaagctggaaatcaagagcagcgccgacgacgccaagaaggacgccgccaaaaaggatgatgccaagaaagacgatgctaaaaaagacggcggcgtgaagctggacgagacaggcggaggacttgttcaacctggcggagccatgaagctgagctgtgtgaccagcggctttaccttcggccactactggatgaactgggtccgacagtcccctgagaaaggactggaatgggtcgcccagttcagaaacaagccctacaactacgaaacctactacagcgacagcgtgaagggcagattcaccatcagccgggacgacagcaagtccagcgtgtacctccagatgaacaacctgcgcgtggaagataccggcatctactactgtaccggggccagctacggcatggaatatctcggccagggcaccagcgtgaccgtgtctacaacgcgtggaatgaggactgaggatcttcccaaagctgtcgtctttctcgaaccccaatggtatcgggtgctcgaaaaagactctgtgacactgaaatgccaaggggcctactctcccgaggacaactccacacagtggtttcataatgagtccctcatcagctctcaggccagctcttatttcattgatgccgctacagtggacgactccggcgagtatcggtgtcagaccaatctgtctacactgtctgaccccgtgcagcttgaggtccacattggatggttgctcttgcaagccccacgctgggttttcaaagaggaagatccaatccatctgcggtgccacagctggaaaaacaccgctctccacaaagtcacatacctgcaaaatggcaaaggacgcaaatacttccatcacaattccgatttttacattccgaaggctaccctgaaagacagcggcagctatttctgccggggactcgtcggctccaagaatgtgtcctccgaaaccgtgaatatcacgattacccaaggactggctgtgcctacaatctctagcttctttccgcctggataccaagtctccttctgtcttgtgatggtcctcctgtttgctgtggacacaggactgtacttttcc

SEQ ID NO: 1786 - DNA, 1458 bp, synthetic construct
  source 1..1458: mol_type = other DNA
atggccttaccagtgaccgccttgctcctgccgctggccttgctgctccacgccgccaggccgcaggtgcaactggtggaatctggcggcaatctggttcagcctggcggctctctgagactgtcttgtgccgccagcggcttcaccttcggcagcttttctatgagctgggtccgacaagctcctggcggaggacttgaatgggtggcaggactgtctgccagaagcagcctgacacactacgccgactctgtgaagggcagattcaccatcagccgggacaacgccaagaacagcgtgtacctccagatgaacagcctgagagtggaagataccgccgtgtactactgcgccagaagaagctacgacagcagcggctactggggccacttctacagctacatggatgtgtggggccagggcaccctggttacagtttctggcggaggcggaagtggaggcggaggatctggcggcggaggctcttctgtgctgacccagcctagctccgtgtctgctgctcctggacagaaagtgaccatctcctgtagcggcagcaccagcaacatcggcaacaactacgtgtcctggtatcagcagcaccccggcaaggcccctaagctgatgatctacgacgtgtccaagaggcccagcggcgtgccagatagattttccggcagcaagagcggcaacagcgccagcctggatattagcggactccagtctgaggacgaggccgactactattgcgccgcctgggatgatagcctgagcgagtttctgtttggcaccggcaccaagctgacagtgcttggaacgcgtggaatgaggactgaggatcttcccaaagctgtcgtctttctcgaaccccaatggtatcgggtgctcgaaaaagactctgtgacactgaaatgccaaggggcctactctcccgaggacaactccacacagtggtttcataatgagtccctcatcagctctcaggccagctcttatttcattgatgccgctacagtggacgactccggcgagtatcggtgtcagaccaatctgtctacactgtctgaccccgtgcagcttgaggtccacattggatggttgctcttgcaagccccacgctgggttttcaaagaggaagatccaatccatctgcggtgccacagctggaaaaacaccgctctccacaaagtcacatacctgcaaaatggcaaaggacgcaaatacttccatcacaattccgatttttacattccgaaggctaccctgaaagacagcggcagctatttctgccggggactcgtcggctccaagaatgtgtcctccgaaaccgtgaatatcacgattacccaaggactggctgtgcctacaatctctagcttctttccgcctggataccaagtctccttctgtcttgtgatggtcctcctgtttgctgtggacacaggactgtacttttcc

SEQ ID NO: 1787 - DNA, 1431 bp, synthetic construct
  source 1..1431: mol_type = other DNA
atggccttaccagtgaccgccttgctcctgccgctggccttgctgctccacgccgccaggccgcagtctgtggtcacacagcctccatctgtgtctggcgctccaggccagagagtgaccatctcttgtaccggcagcagcagcaatatcggagccggctatgacgtgcactggtatcagcagctccctggcacagcccctaaactgctgatctacggcaacagcaacagacccagcggcgtgcccgatagattttccggctctaagagcggcacaagcgccagcctggctattactggactccaggccgaggacgaggccgactactactgtcagagctacgacagcagcctgagcggcagctatgtgtttggcaccggcaccaagctgacagtgcttggaggcggaggcggaagtggaggcggaggatctggcggcggaggctctgaagttcaactggtggaaaccggcggcaacctggttcaacctggcgcttctctgagactgagctgtgccgccagcggctttagctttagcggaacagccatgcactgggtccgacaggcacctggcaaaggactggaatgggtgtccaccatcagcagcacaggcagaagcacctactaccgggacagcgtgaagggcagattcaccatctccagagacaacagcaagaacaccctgtacctccagatgaacagcctgagaggcgaggacaccgccgtgtactattgtgccagagtgtccttcgactactggggccagggaaccctggtcacagtctcttctacgcgtggaatgaggactgaggatcttcccaaagctgtcgtctttctcgaaccccaatggtatcgggtgctcgaaaaagactctgtgacactgaaatgccaaggggcctactctcccgaggacaactccacacagtggtttcataatgagtccctcatcagctctcaggccagctcttatttcattgatgccgctacagtggacgactccggcgagtatcggtgtcagaccaatctgtctacactgtctgaccccgtgcagcttgaggtccacattggatggttgctcttgcaagccccacgctgggttttcaaagaggaagatccaatccatctgcggtgccacagctggaaaaacaccgctctccacaaagtcacatacctgcaaaatggcaaaggacgcaaatacttccatcacaattccgatttttacattccgaaggctaccctgaaagacagcggcagctatttctgccggggactcgtcggctccaagaatgtgtcctccgaaaccgtgaatatcacgattacccaaggactggctgtgcctacaatctctagcttctttccgcctggataccaagtctccttctgtcttgtgatggtcctcctgtttgctgtggacacaggactgtacttttcc

SEQ ID NO: 1788 - DNA, 1437 bp, synthetic construct
  source 1..1437: mol_type = other DNA
atggccttaccagtgaccgccttgctcctgccgctggccttgctgctccacgccgccaggccgcagtctgtggttacacagcctgcctccgtgtctggctctcctggccagagcatcaccatcagctgtaccggcaccagctctgatgtcggcggctacaattacgtgtcctggtatcagcagcaccccggcaaggcccctaagctgatgatctacgacgtgtccaagaggcccagcggcgtgtccaatagattcagcggcagcaagagcggcaacaccgccagcctgacaatttctggactgcaagccgaggacgaggccgactactactgtagcagctacaccagcagcagcacactggtgtttggcggaggcaccaagctgacagttcttggaggcggaggcggaagtggaggcggaggatctggcggcggaggctctgaagttcagctggttgaaagcggcggagcctttgttcagcctggcggatctctgagactgagctgtgccgccagcggcttcacattttccagctacgccatgacctgggtccgacaggctcctggcaaaggactggaatgggtgtccaccatctccggcagaggcagaagcaccttctacgccgatagcgtgaagggcagattcacaatcagccgggacaacagcaagaacaccctgtacctccagatgaacagcctgagagccgaggataccgccgtgtactactgtgcccggtactatcacgctggcgcctttgatctttggggccagggaacactggtcaccgtgtcatctacgcgtggaatgaggactgaggatcttcccaaagctgtcgtctttctcgaaccccaatggtatcgggtgctcgaaaaagactctgtgacactgaaatgccaaggggcctactctcccgaggacaactccacacagtggtttcataatgagtccctcatcagctctcaggccagctcttatttcattgatgccgctacagtggacgactccggcgagtatcggtgtcagaccaatctgtctacactgtctgaccccgtgcagcttgaggtccacattggatggttgctcttgcaagccccacgctgggttttcaaagaggaagatccaatccatctgcggtgccacagctggaaaaacaccgctctccacaaagtcacatacctgcaaaatggcaaaggacgcaaatacttccatcacaattccgatttttacattccgaaggctaccctgaaagacagcggcagctatttctgccggggactcgtcggctccaagaatgtgtcctccgaaaccgtgaatatcacgattacccaaggactggctgtgcctacaatctctagcttctttccgcctggataccaagtctccttctgtcttgtgatggtcctcctgtttgctgtggacacaggactgtacttttcc

SEQ ID NO: 1789 - DNA, 1443 bp, synthetic construct
  source 1..1443: mol_type = other DNA
atggccttaccagtgaccgccttgctcctgccgctggccttgctgctccacgccgccaggccggacgtggtcatgacacagagcccttctagcctgtctgccagcgtgggcgacagagtgacaatcacctgtcagagcagcctggacatcagccactacctgaactggtatcagcagaagcccggcaaggcccctaagctgctgatctacgacgccagcaatctggaaaccggcgtgcccagcagattttctggcagcggaagcggcacccacttcaccttcacaatatccagcctccagcctgaggacttcgccacctactactgccagcagtacgacaacctgcctctgacctttggcggaggcaccaagctggaaatcaagagaggcggaggcggaagtggaggcggaggatctggcggcggaggctctcaagttcaactggttcaatcaggcggaggcgtggtgcaacctggtggctctctgagagtgtcttgtgctgcctctggcgtgaccctgagcgactatggaatgcactgggtccgacaggcccctggcaaaggacttgagtgggtcgccttcatcagaaacgacggcagcgacaagtattacgccgacagcgtgaagggcagattcaccatcagccgggacaacagcgagaaaaccgtgtctctccagatgtctagcctgagagccgaggacaccgccgtgtactactgtgccaagaatggcgagagcggccctctggactactggtatctggatctgtggggcagaggcaccctggtcacagtctcttctacgcgtggaatgaggactgaggatcttcccaaagctgtcgtctttctcgaaccccaatggtatcgggtgctcgaaaaagactctgtgacactgaaatgccaaggggcctactctcccgaggacaactccacacagtggtttcataatgagtccctcatcagctctcaggccagctcttatttcattgatgccgctacagtggacgactccggcgagtatcggtgtcagaccaatctgtctacactgtctgaccccgtgcagcttgaggtccacattggatggttgctcttgcaagccccacgctgggttttcaaagaggaagatccaatccatctgcggtgccacagctggaaaaacaccgctctccacaaagtcacatacctgcaaaatggcaaaggacgcaaatacttccatcacaattccgatttttacattccgaaggctaccctgaaagacagcggcagctatttctgccggggactcgtcggctccaagaatgtgtcctccgaaaccgtgaatatcacgattacccaaggactggctgtgcctacaatctctagcttctttccgcctggataccaagtctccttctgtcttgtgatggtcctcctgtttgctgtggacacaggactgtacttttcc

SEQ ID NO: 1790 - DNA, 1464 bp, synthetic construct
  source 1..1464: mol_type = other DNA
atggccttaccagtgaccgccttgctcctgccgctggccttgctgctccacgccgccaggccggacgtgatgctgacccagacaccactgagcctgcctgtgtctctgggcgatcaggccagcatctcctgtagaagcagccagagcatcctgcacagcaccggcgatacctacctggaatggtatctccagaagcctggacagagccccaagctgctgattaacaaggtgtccaaccggctgagcggcgtgcccgatagattttctggcagcggctctggcaccgacttcaccctgaagatcagcagagtggaagccgaggacctgggcgtgtactactgcttccaaggcagccatgttccttggacctttggcggaggcaccaagctggaaatcaagagagctgacgccgctcctaccgtgtccatctttcctggaggcggtggaagtggcggcggtggttcaggcggcggaggatctcaagtgaagctccagcagagcggccctagccttgtgaaacctggcgcttccgtgaagatgagctgcaaggccagcggctacaccttcaccgatttctacatgaaatgggtcaagcagagccacggcaagtctctggaatggatcggcgacatcaaccccaacatcggagacaccttctacaaccagaagttcaagggcaaagccacactgaccgtggacaagagcagcagcaccgcctacatgcagctcaacagcctgaccagcgaggacagcgccgtgtacttttgttccgtgggctacttcgacgtgtggggagccggaacaaccgtgacagtctcttctacgcgtggaatgaggactgaggatcttcccaaagctgtcgtctttctcgaaccccaatggtatcgggtgctcgaaaaagactctgtgacactgaaatgccaaggggcctactctcccgaggacaactccacacagtggtttcataatgagtccctcatcagctctcaggccagctcttatttcattgatgccgctacagtggacgactccggcgagtatcggtgtcagaccaatctgtctacactgtctgaccccgtgcagcttgaggtccacattggatggttgctcttgcaagccccacgctgggttttcaaagaggaagatccaatccatctgcggtgccacagctggaaaaacaccgctctccacaaagtcacatacctgcaaaatggcaaaggacgcaaatacttccatcacaattccgatttttacattccgaaggctaccctgaaagacagcggcagctatttctgccggggactcgtcggctccaagaatgtgtcctccgaaaccgtgaatatcacgattacccaaggactggctgtgcctacaatctctagcttctttccgcctggataccaagtctccttctgtcttgtgatggtcctcctgtttgctgtggacacaggactgtacttttcc

SEQ ID NO: 1791 - DNA, 1464 bp, synthetic construct
  source 1..1464: mol_type = other DNA
atggccttaccagtgaccgccttgctcctgccgctggccttgctgctccacgccgccaggccgctgcctgttctgacacagcctccatccgtgtctgtggcccctggaaagaccgccagaatcacatgcggcggcaacaacatcggcagcaagagcgtgcactggtatcagcagaagcctggacaggctcctgtgctggtggtgtacgacgacagcgatagacctagcggcatccccgagagattcagcggcagcaattccggcaataccgccacactgaccatcagcagagtggaagctggcgacgaggccgactactactgccaagtgtgggacagcagcagcgactacgtggtgtttggcggcggaacaaagctgacagtgcttggcggaggcggaagtggaggcggaggatctggcggcggaggctctgaagttcaactggtgcagagcggagccgaagtgaagaagccaggcgagagcctgaagattagctgcaaaggcagcggctacagcttcaccagctactggatcggctgggtccgacagatgcctggcaaaggactggaatggatgggcatcatctaccccggcgacagcgacaccagatacagccctagctttcagggccaagtgaccatctccgccgacaagagcatcagcacagcctacctccagtggtcctctctgaaggccagcgataccgccatgtactactgcgccagacaagtctggggatggcaaggcggcatgtaccccaggtctaactggtggtacaacctggactcttggggccagggcacactggtcacagtctcttctacgcgtggaatgaggactgaggatcttcccaaagctgtcgtctttctcgaaccccaatggtatcgggtgctcgaaaaagactctgtgacactgaaatgccaaggggcctactctcccgaggacaactccacacagtggtttcataatgagtccctcatcagctctcaggccagctcttatttcattgatgccgctacagtggacgactccggcgagtatcggtgtcagaccaatctgtctacactgtctgaccccgtgcagcttgaggtccacattggatggttgctcttgcaagccccacgctgggttttcaaagaggaagatccaatccatctgcggtgccacagctggaaaaacaccgctctccacaaagtcacatacctgcaaaatggcaaaggacgcaaatacttccatcacaattccgatttttacattccgaaggctaccctgaaagacagcggcagctatttctgccggggactcgtcggctccaagaatgtgtcctccgaaaccgtgaatatcacgattacccaaggactggctgtgcctacaatctctagcttctttccgcctggataccaagtctccttctgtcttgtgatggtcctcctgtttgctgtggacacaggactgtacttttcc

SEQ ID NO: 1792 - DNA, 1443 bp, synthetic construct
  source 1..1443: mol_type = other DNA
atggccttaccagtgaccgccttgctcctgccgctggccttgctgctccacgccgccaggccggagctggtcatgacacagagccctgcttctctggccgtgtcactgggacagagagccaccatctcttgcagagccagcgagagcgtggacagctacggcaagagcttcatgcactggtatcagctcaagcccggccagcctcctaagctgctgatctacagagcctccaacctggaaagcggcgtgccagccagattttctggcagcggcagcagaaccgacttcaccctgaccattgatcccgtggaagccgatgatgccgccacctactactgccagcagaacaacgaggacccctggacatttggcggaggcaccaagctggaaatcaaaggcggaggcggaagtggaggcggaggatctggcggcggaggctctgaagtgcagctcgaacagtctggccccgagcttgtgaaacctggcgcttccgtgaagatgagctgcaaggccagcggctacaccttcaccaactactacatgaaatgggtcaagcagagccacggcaagtccctggaatggatcggcgatctgaaccccaacaacggcgacaccttctacaaccagaagttcaagggcaaagccacactgaccgtggacaagagcagcaacaccgcctacatgcagctcaactccctgaccagcgaggacagcgccgtgtactactgtgccagaaccggcagatacgaagagaacgctatggactactggggccagggcacaagcgtgacagtctcttctacgcgtggaatgaggactgaggatcttcccaaagctgtcgtctttctcgaaccccaatggtatcgggtgctcgaaaaagactctgtgacactgaaatgccaaggggcctactctcccgaggacaactccacacagtggtttcataatgagtccctcatcagctctcaggccagctcttatttcattgatgccgctacagtggacgactccggcgagtatcggtgtcagaccaatctgtctacactgtctgaccccgtgcagcttgaggtccacattggatggttgctcttgcaagccccacgctgggttttcaaagaggaagatccaatccatctgcggtgccacagctggaaaaacaccgctctccacaaagtcacatacctgcaaaatggcaaaggacgcaaatacttccatcacaattccgatttttacattccgaaggctaccctgaaagacagcggcagctatttctgccggggactcgtcggctccaagaatgtgtcctccgaaaccgtgaatatcacgattacccaaggactggctgtgcctacaatctctagcttctttccgcctggataccaagtctccttctgtcttgtgatggtcctcctgtttgctgtggacacaggactgtacttttcc

SEQ ID NO: 1793 - DNA, 1437 bp, synthetic construct; identical to SEQ ID NO: 1766
  source 1..1437: mol_type = other DNA

SEQ ID NO: 1794 - DNA, 1437 bp, synthetic construct; identical to SEQ ID NO: 1675
  source 1..1437: mol_type = other DNA

SEQ ID NO: 1795 - DNA, 1425 bp, synthetic construct
  source 1..1425: mol_type = other DNA
atggccttaccagtgaccgccttgctcctgccgctggccttgctgctccacgccgccaggccggacgtggtcatgacacagagcccttctagcctgtctgccagcgtgggcgacagagtgaccatcacctgtatggcctccgaggacatctacatccggctggcctggtatcagcagaagcctggaaacgcccctaagctgctgatctacgccgccacctctctggaaacaggcgtgccaagcagattttccggcagcggctctggcaccgatttcaccctgacaatatccagcctccagcctgaggacttcgccacctactactgccagcagtattggagcagcccctggacatttggcggaggcaccaaggtggaaatcaaaggcggaggcggaagtggaggcggaggatctggcggcggaggctctcaggttcagctgcaagagtctggccccggactggtcaagcctagccaaacactgagcctgacctgtaccgtgtccggctacagcatcaccagcgactacacctggaactggatcagacagcctcctggcaacggactggaatggatcggctacatcacctacagcggcagcaccagctacaaccccagcctgaaaagccgggtgctgatctccgtggacaccagcaagaatcaggtgtccctgaagctgagcagcgtgacagccgctgataccgccgtgtactactgtgccagactggggagaagatacacaatggactactggggccagggcaccaccgtgacagtttcttctacgcgtggaatgaggactgaggatcttcccaaagctgtcgtctttctcgaaccccaatggtatcgggtgctcgaaaaagactctgtgacactgaaatgccaaggggcctactctcccgaggacaactccacacagtggtttcataatgagtccctcatcagctctcaggccagctcttatttcattgatgccgctacagtggacgactccggcgagtatcggtgtcagaccaatctgtctacactgtctgaccccgtgcagcttgaggtccacattggatggttgctcttgcaagccccacgctgggttttcaaagaggaagatccaatccatctgcggtgccacagctggaaaaacaccgctctccacaaagtcacatacctgcaaaatggcaaaggacgcaaatacttccatcacaattccgatttttacattccgaaggctaccctgaaagacagcggcagctatttctgccggggactcgtcggctccaagaatgtgtcctccgaaaccgtgaatatcacgattacccaaggactggctgtgcctacaatctctagcttctttccgcctggataccaagtctccttctgtcttgtgatggtcctcctgtttgctgtggacacaggactgtacttttcc

SEQ ID NO: 1796 - DNA, 1440 bp, synthetic construct
  source 1..1440: mol_type = other DNA
atggccttaccagtgaccgccttgctcctgccgctggccttgctgctccacgccgccaggccggaggtgcaactggttgagtctggcggaggactggtgcagcctggaagaagcctgagactgtcttgtgccgccagcggcttcaccttcgacgattatgccatgcactgggtccgacaggcccctggcaaaggacttgaatgggtgtccggcatctcctggaacagcggctctatcggctacgccgattccgtgaagggcagattcaccatcagccgggacaacgccaagaacagcctgtacctccagatgaactccctgagagccgaggacacagccctgtactactgcgccaaagacaaaggcggaggctactacgacttttggagcggcagcgattattggggccagggcacactggtcacagtgtctagcggcggaggcggaagtggaggcggaggatctggcggcggaggctcttcttctgagctgacacaggaccctgccgtgtctgttgctctgggccagacagtgcggattacctgtcagggcgatagcctgagaagctactacgcctcctggtatcagcagaagccaggccaggctcctgtgctggtcatctacggcaagaacaacagacccagcggcatccccgatagattcagcggaagcagctctggcaataccgccagcctgacaattactggcgctcaggccgaggacgaggccgactactactgcaacagcagagatagcagcggctgggttttcggcggaggcacaaaactgacagtgctgacgcgtggaatgaggactgaggatcttcccaaagctgtcgtctttctcgaaccccaatggtatcgggtgctcgaaaaagactctgtgacactgaaatgccaaggggcctactctcccgaggacaactccacacagtggtttcataatgagtccctcatcagctctcaggccagctcttatttcattgatgccgctacagtggacgactccggcgagtatcggtgtcagaccaatctgtctacactgtctgaccccgtgcagcttgaggtccacattggatggttgctcttgcaagccccacgctgggttttcaaagaggaagatccaatccatctgcggtgccacagctggaaaaacaccgctctccacaaagtcacatacctgcaaaatggcaaaggacgcaaatacttccatcacaattccgatttttacattccgaaggctaccctgaaagacagcggcagctatttctgccggggactcgtcggctccaagaatgtgtcctccgaaaccgtgaatatcacgattacccaaggactggctgtgcctacaatctctagcttctttccgcctggataccaagtctccttctgtcttgtgatggtcctcctgtttgctgtggacacaggactgtacttttcc

SEQ ID NO: 1797 - DNA, 1467 bp, synthetic construct
  source 1..1467: mol_type = other DNA
atggccttaccagtgaccgccttgctcctgccgctggccttgctgctccacgccgccaggccggaagtgcagctccagcagtctggacctggcctggttaagcctagccagacactgagcctgacctgtgccatcagcggcgatagcgtgctgagcaacagcgacacctggaactggatcagacagagccctagcagaggactggaatggctgggcagaacctaccacagaagcacttggtacgacgactacgccagctctgtgcggggcagagtgtccatcaatgtggacaccagcaagaaccagtacagcctgcaactgaacgccgtgacacctgaggataccggcgtgtactactgcgccagagacagactccaggacggcaactcttggagcgacgcctttgatgtgtggggccagggcacaatggtcaccgtttctagcggcggaggcggaagtggaggcggaggatctggcggcggaggctctcaatctgctctgacacagcctgccagcgtgtcaggatctcctggacagagcatcaccatctcttgcaccggcaccagctctgatgtcggcggctacaattacgtgtcctggtatcagcagcaccccggcaaggcccctaagctgatgatctacgacgtgtccaacagacccagcggcgtgtccaatagattctccggcagcaagagcggcaacaccgccagcctgacaatttctggactgcaagccgaggacgaggccgactactactgtagcagctacaccagcagcagcacactggtgtacgtgttcggcacaggcaccaaagtgaccgtgcttacgcgtggaatgaggactgaggatcttcccaaagctgtcgtctttctcgaaccccaatggtatcgggtgctcgaaaaagactctgtgacactgaaatgccaaggggcctactctcccgaggacaactccacacagtggtttcataatgagtccctcatcagctctcaggccagctcttatttcattgatgccgctacagtggacgactccggcgagtatcggtgtcagaccaatctgtctacactgtctgaccccgtgcagcttgaggtccacattggatggttgctcttgcaagccccacgctgggttttcaaagaggaagatccaatccatctgcggtgccacagctggaaaaacaccgctctccacaaagtcacatacctgcaaaatggcaaaggacgcaaatacttccatcacaattccgatttttacattccgaaggctaccctgaaagacagcggcagctatttctgccggggactcgtcggctccaagaatgtgtcctccgaaaccgtgaatatcacgattacccaaggactggctgtgcctacaatctctagcttctttccgcctggataccaagtctccttctgtcttgtgatggtcctcctgtttgctgtggacacaggactgtacttttcc

SEQ ID NO: 1798 - DNA, 1461 bp, synthetic construct
  source 1..1461: mol_type = other DNA
atggccttaccagtgaccgccttgctcctgccgctggccttgctgctccacgccgccaggccgcaggtgcaactggttcagtctggggccgaagtgaagaaacctggggcctctgtgaaggtgtcctgcaaggcttccggctacacctttaccagctacgacatcaactgggtccgacaggccacaggccaaggactggaatggatgggctggatgaaccccaacagcggcaataccggctacgcccagaaattccagggcagagtgaccatgaccagaaacaccagcatcagcaccgcctacatggaactgagcagcctgagaagcgaggacaccgccgtgtactattgcgccagaggcgacagcaactactggtcctactacggcatggacgtgtggggccagggaacactggttacagtttctagcggcggaggcggaagtggaggcggaggatctggcggcggaggctctggcggtggtggatctcaatctgtgctgacccagcctagatccgtgtctggctctcctggacagagcgtgaccatctcttgtaccggcaccagctctgatgtcggcggctacaattacgtgtcctggtatcagcagcaccccggcgaagcccctaagctgattatctacgacgccgacaagcggcccagcggcatcagcaatagattcagctctggcaagagcggcaacaccgccagcctgacaatcagcggactccaggtggaagatgaggccgactactactgctgctcctatgccggcggaagcacctgggttttcggaggcggtacaaaagtgaccgtgctgacgcgtggaatgaggactgaggatcttcccaaagctgtcgtctttctcgaaccccaatggtatcgggtgctcgaaaaagactctgtgacactgaaatgccaaggggcctactctcccgaggacaactccacacagtggtttcataatgagtccctcatcagctctcaggccagctcttatttcattgatgccgctacagtggacgactccggcgagtatcggtgtcagaccaatctgtctacactgtctgaccccgtgcagcttgaggtccacattggatggttgctcttgcaagccccacgctgggttttcaaagaggaagatccaatccatctgcggtgccacagctggaaaaacaccgctctccacaaagtcacatacctgcaaaatggcaaaggacgcaaatacttccatcacaattccgatttttacattccgaaggctaccctgaaagacagcggcagctatttctgccggggactcgtcggctccaagaatgtgtcctccgaaaccgtgaatatcacgattacccaaggactggctgtgcctacaatctctagcttctttccgcctggataccaagtctccttctgtcttgtgatggtcctcctgtttgctgtggacacaggactgtacttttcc

SEQ ID NO: 1799 - DNA, 1467 bp, synthetic construct
  source 1..1467: mol_type = other DNA
atggccttaccagtgaccgccttgctcctgccgctggccttgctgctccacgccgccaggccggaagtgcagctccagcagtctggacctggcctggttaagcctagccagacactgagcctgacctgtgccatcagcggcgatagcgtgtcctctaatagcgccgcctggaactggatcagacagagccctagcagaggactggaatggctgggcagaacctactaccgcagcaagtggtacagcgactacgccgtgtccgtgaagtcccggatcaccatcaatcccgacaccagcaagaaccagttcagcctgcaactgaacagcgtgacccctgaggataccgccgtgtactactgcgccagagatccctacgacttttggagcggctaccccgacgcctttgacatctggggacagggcacaatggtcaccgtttctagcggcggaggcggaagtggaggcggaggatctggcggcggaggctctcaatctgctctgacacagcctgccagcgtgtcaggatctcctggacagagcatcaccatctcttgcaccggcaccagctctgatgtcggcggctacaattacgtgtcctggtatcagcagcaccccggcaaggcccctaaagtgattatcagcgaagtgaacaacagacccagcggcgtgtcccacagattcagcggctctaagtctggcaacaccgccagcctgacaatctctggactgcaagccgaggacgaggccgactacttctgtagcagctacaccagcggcagaaccctgtacgtgttcggcacaggcagcaaagtgacagtgctgggaacgcgtggaatgaggactgaggatcttcccaaagctgtcgtctttctcgaaccccaatggtatcgggtgctcgaaaaagactctgtgacactgaaatgccaaggggcctactctcccgaggacaactccacacagtggtttcataatgagtccctcatcagctctcaggccagctcttatttcattgatgccgctacagtggacgactccggcgagtatcggtgtcagaccaatctgtctacactgtctgaccccgtgcagcttgaggtccacattggatggttgctcttgcaagccccacgctgggttttcaaagaggaagatccaatccatctgcggtgccacagctggaaaaacaccgctctccacaaagtcacatacctgcaaaatggcaaaggacgcaaatacttccatcacaattccgatttttacattccgaaggctaccctgaaagacagcggcagctatttctgccggggactcgtcggctccaagaatgtgtcctccgaaaccgtgaatatcacgattacccaaggactggctgtgcctacaatctctagcttctttccgcctggataccaagtctccttctgtcttgtgatggtcctcctgtttgctgtggacacaggactgtacttttcc

SEQ ID NO: 1800 - DNA, 1464 bp, synthetic construct
  source 1..1464: mol_type = other DNA
atggccttaccagtgaccgccttgctcctgccgctggccttgctgctccacgccgccaggccggaagtgcagctccagcagtctggacctggcctggttaagcctagccagacactgagcctgacctgtgccatcagcggcgattccatgctgagcaacagcgacacctggaactggatcagacagagccccagcagaggcctggaatggctgggcagaacataccacagaagcacttggtacgacgactacgccagctctgtgcggggcagagtgtccatcaatgtggacaccagcaagaaccagtacagcctgcaactgaacgccgtgacacctgaggataccggcgtgtactactgtgccagagtgcggctccaggacggcaattcttggagcgacgcctttgatgtgtggggccagggcacaatggtcaccgtttctagcggcggaggcggaagtggaggcggaggatctggcggcggaggctctcaatctgctctgacacagcctgccagcgcctctggatctcctggacagagcgtgaccatctcctgtaccggcacctcttctgatgtcggcggctacaactacgtgtcctggtatcagcagcaccccggcaaggcccctaagctgatgatctacgacgtgtccaacagacccagcggcgtgtccaatagattctccggcagcaagagcggcaacaccgccagcctgacaatttctggactgcaagccgaggacgaggccgactactactgtagcagctacaccagcagcagcacactgtacgtgttcggcacaggcacccagctcacagttcttacgcgtggaatgaggactgaggatcttcccaaagctgtcgtctttctcgaaccccaatggtatcgggtgctcgaaaaagactctgtgacactgaaatgccaaggggcctactctcccgaggacaactccacacagtggtttcataatgagtccctcatcagctctcaggccagctcttatttcattgatgccgctacagtggacgactccggcgagtatcggtgtcagaccaatctgtctacactgtctgaccccgtgcagcttgaggtccacattggatggttgctcttgcaagccccacgctgggttttcaaagaggaagatccaatccatctgcggtgccacagctggaaaaacaccgctctccacaaagtcacatacctgcaaaatggcaaaggacgcaaatacttccatcacaattccgatttttacattccgaaggctaccctgaaagacagcggcagctatttctgccggggactcgtcggctccaagaatgtgtcctccgaaaccgtgaatatcacgattacccaaggactggctgtgcctacaatctctagcttctttccgcctggataccaagtctccttctgtcttgtgatggtcctcctgtttgctgtggacacaggactgtacttttcc

SEQ ID NO: 1801 - DNA, 1437 bp, synthetic construct
  source 1..1437: mol_type = other DNA
atggccttaccagtgaccgccttgctcctgccgctggccttgctgctccacgccgccaggccggagatcgtgctgacacagtctcccgccacactgtcactgtctccaggcgaaagagccacactgagctgtagcgccagcagcagcgtgtcctacatgtactggtatcagcagaagcccggacaggcccctagactgctgatctacagaaccagcaacctggcctctggcatccccgccagattttctggctctggcagcggcaccgatttcaccctgaccataagcagcctggaacctgaggacttcgccgtgtactactgccagcagtaccacagctaccccaccacctttggacagggcaccaaggtggaaatcaagcggacagttggcggaggcggaagtggaggcggaggatctggcggcggaggctctgaagtgcagctggttgaatcaggtggcggcctggttcaacctggcggatctctgagactgtcttgtgccgccagcggcttcagcttcaacacctacgccatgaactgggtccgacaggctcctggcaaaggactggaatgggtgtcccacatcagaagcaagagcaacaacttcgccacctactacgccgacagcgtgaaggacagattcaccatcagccgggacaacgccaagaacagcctgtacctccagatgaactccctgagagccgaggacaccgccgtgtattattgcgccagacaaggcggcgacttccctatggattattggggccagggcaccctggtcaccgtttcttctacgcgtggaatgaggactgaggatcttcccaaagctgtcgtctttctcgaaccccaatggtatcgggtgctcgaaaaagactctgtgacactgaaatgccaaggggcctactctcccgaggacaactccacacagtggtttcataatgagtccctcatcagctctcaggccagctcttatttcattgatgccgctacagtggacgactccggcgagtatcggtgtcagaccaatctgtctacactgtctgaccccgtgcagcttgaggtccacattggatggttgctcttgcaagccccacgctgggttttcaaagaggaagatccaatccatctgcggtgccacagctggaaaaacaccgctctccacaaagtcacatacctgcaaaatggcaaaggacgcaaatacttccatcacaattccgatttttacattccgaaggctaccctgaaagacagcggcagctatttctgccggggactcgtcggctccaagaatgtgtcctccgaaaccgtgaatatcacgattacccaaggactggctgtgcctacaatctctagcttctttccgcctggataccaagtctccttctgtcttgtgatggtcctcctgtttgctgtggacacaggactgtacttttcc

SEQ ID NO: 1802 - DNA, 1425 bp, synthetic construct
  source 1..1425: mol_type = other DNA
atggccttaccagtgaccgccttgctcctgccgctggccttgctgctccacgccgccaggccggacgtggtcatgacacagagcccttctagcctgtctgccagcgtgggcgacagagtgaccatcacctgtaaagccagcgaggacatctacatccggctggcctggtatcagcagaagcctggaaaggcccctaagctgctgatctacgccgccacctctctggaaacaggcgtgccaagcagattttccggcagcggctctggcaccgatttcaccctgacaatatccagcctccagcctgaggacttcgccacctactactgccagcagtattggaccacaccttggacctttggcggaggcaccaaggtggaaatcaaaggcggaggcggaagtggaggcggaggatctggcggcggaggctctcaggtgcagctccaagagtctggccctggactggtcaagcctagccagacactgagcctgacctgtaccgtgtccggctacagcatcaccatcgactacacctggaactggatcagacagcctcctggcaaaggactggaatggatcggctacatcacctacagcggcagcaccgactacaaccccagcctgaaaagccgggtgctgatctccgtggacaccagcaagaatcaggtgtccctgaagctgagcagcgtgacagccgctgataccgccgtgtactactgtgccagactgggcagaagatacgccctggattattggggccagggcaccaccgtgacagtgtcatctacgcgtggaatgaggactgaggatcttcccaaagctgtcgtctttctcgaaccccaatggtatcgggtgctcgaaaaagactctgtgacactgaaatgccaaggggcctactctcccgaggacaactccacacagtggtttcataatgagtccctcatcagctctcaggccagctcttatttcattgatgccgctacagtggacgactccggcgagtatcggtgtcagaccaatctgtctacactgtctgaccccgtgcagcttgaggtccacattggatggttgctcttgcaagccccacgctgggttttcaaagaggaagatccaatccatctgcggtgccacagctggaaaaacaccgctctccacaaagtcacatacctgcaaaatggcaaaggacgcaaatacttccatcacaattccgatttttacattccgaaggctaccctgaaagacagcggcagctatttctgccggggactcgtcggctccaagaatgtgtcctccgaaaccgtgaatatcacgattacccaaggactggctgtgcctacaatctctagcttctttccgcctggataccaagtctccttctgtcttgtgatggtcctcctgtttgctgtggacacaggactgtacttttcc

SEQ ID NO: 1803 - DNA, 1440 bp, synthetic construct
  source 1..1440: mol_type = other DNA
atggccttaccagtgaccgccttgctcctgccgctggccttgctgctccacgccgccaggccggacatccagctgactcagagccctagctttctgagcgccagcgtgggcgacagagtgaccattacatgtagagccagccagggcatcagcaccgacctgaactggtatcagcagaagcctggcaaggcccctaagctgctgatctacgccgccagcaatctggaaagcggcgtgccaagcagattttccggctctggcagcggcaccgagttcaccctgacaatatctagcctccagcctgaggacttcgccacctactactgccagcagagctacaactggccctacacctttggcggaggcaccaaggtggaaatcaagagaggcggaggcggaagtggaggcggaggatctggcggcggaggctctgaagttcagctggttgaatcaggcggaggactcgtgaaacctggcggctctctgagactgtcttgtgccgccagcggcttcaccttcagcaacttcgagatgaactgggtccgacaggccccaggcaaaggactggaatgggtgtccggcatcagctccaatggccggtacatcaactacgccgacagcgtgaagggcagattcaccatcagccgggacaacgccaagaacagcctgtacctccagatgaactccctgagagccgaggacaccgccgtgtactattgtgccagagtggtggacttcgaccaggactacaacggcttcgactattggggccagggcaccctggttaccgttagctctacgcgtggaatgaggactgaggatcttcccaaagctgtcgtctttctcgaaccccaatggtatcgggtgctcgaaaaagactctgtgacactgaaatgccaaggggcctactctcccgaggacaactccacacagtggtttcataatgagtccctcatcagctctcaggccagctcttatttcattgatgccgctacagtggacgactccggcgagtatcggtgtcagaccaatctgtctacactgtctgaccccgtgcagcttgaggtccacattggatggttgctcttgcaagccccacgctgggttttcaaagaggaagatccaatccatctgcggtgccacagctggaaaaacaccgctctccacaaagtcacatacctgcaaaatggcaaaggacgcaaatacttccatcacaattccgatttttacattccgaaggctaccctgaaagacagcggcagctatttctgccggggactcgtcggctccaagaatgtgtcctccgaaaccgtgaatatcacgattacccaaggactggctgtgcctacaatctctagcttctttccgcctggataccaagtctccttctgtcttgtgatggtcctcctgtttgctgtggacacaggactgtacttttcc

SEQ ID NO: 1804 - DNA, 1434 bp, synthetic construct
  source 1..1434: mol_type = other DNA
atggccttaccagtgaccgccttgctcctgccgctggccttgctgctccacgccgccaggccggacatccaactgactcagagccccagctttctgagcgcctctgtgggcgacagagtgaccatcacatgtagtctcagcctgggcatcagcacatggcgggattggtttccgccgaggcttggcaggggccttgagccgctgacctacgccgccagcacactgcaaagcggagtgcctagcagattttccggcagcggctctggcaccgagttcaccctgacaatatccagcctccagcctgaggacttcgccacctactactgccagcagctcaacagctaccctctgacctttggcggaggcaccaaggtggaaatcaagagaggcggaggcggaagtggaggcggaggatctggcggcggaggctctgaagttcaactggttgagtctggtggcggcctggttaagcctggcggatctctgagactgagctgtgccgccagcggcttcacctttagcacatacggcatgagctgggtccgacaggcccctggaaaaggacttgagtgggtcgcctacatcaacaacggctccggctacatctactacgccgacagcgtgaagggcagattcaccatcagccgggacaacgccaagaacagcctgtacctccagatgaactccctgagagccgaggacaccgccgtgtactattgtgccagaggacagtggtggagcggcggagactttgattattggggccagggcaccctggtcaccgtttcttctacgcgtggaatgaggactgaggatcttcccaaagctgtcgtctttctcgaaccccaatggtatcgggtgctcgaaaaagactctgtgacactgaaatgccaaggggcctactctcccgaggacaactccacacagtggtttcataatgagtccctcatcagctctcaggccagctcttatttcattgatgccgctacagtggacgactccggcgagtatcggtgtcagaccaatctgtctacactgtctgaccccgtgcagcttgaggtccacattggatggttgctcttgcaagccccacgctgggttttcaaagaggaagatccaatccatctgcggtgccacagctggaaaaacaccgctctccacaaagtcacatacctgcaaaatggcaaaggacgcaaatacttccatcacaattccgatttttacattccgaaggctaccctgaaagacagcggcagctatttctgccggggactcgtcggctccaagaatgtgtcctccgaaaccgtgaatatcacgattacccaaggactggctgtgcctacaatctctagcttctttccgcctggataccaagtctccttctgtcttgtgatggtcctcctgtttgctgtggacacaggactgtacttttcc

SEQ ID NO: 1805 - DNA, 1440 bp, synthetic construct
  source 1..1440: mol_type = other DNA
atggccttaccagtgaccgccttgctcctgccgctggccttgctgctccacgccgccaggccggacatccagatgacccagaccacaagcagcctgtctgccagcctgggcgacagagtgaccatctcttgtagagccagccaggacatcagcaactacctgaactggtatcagcagaaacccgacggcaccgtgaagctgctgatctactacaccagcatcctgcacagcggcgtgcccagcagattttctggctctggcagcggcaccgactacagcctgaccatcagcaatctggaacaagaggacttcgctacctacttctgccagcaaggcaacaccctgccttggacatttggcggaggcaccaagctggaaatcaaagctggcggaggcggaagtggaggcggaggatctggcggcggaggctctgaagtgcaactggttgaatctggcggcggactggttaagcctggcggatctctgaagctgagctgtgccgcctctggcttcgccttcagcatctacgatatgagctgggtccgacagacccctgagaagagactggaatgggtcgcctacatctctagcggcggagggacctactatcccgacacagtgaagggcagattcaccatctccagagacaacgccaagaacaccctgtacctccagatgagcagcctgaagtccgaggacaccgccatgtactactgcgccagacacagcggctatggcacacattggggagtgctgtttgcctactggggccagggaacactggtcacagtttctgctacgcgtggaatgaggactgaggatcttcccaaagctgtcgtctttctcgaaccccaatggtatcgggtgctcgaaaaagactctgtgacactgaaatgccaaggggcctactctcccgaggacaactccacacagtggtttcataatgagtccctcatcagctctcaggccagctcttatttcattgatgccgctacagtggacgactccggcgagtatcggtgtcagaccaatctgtctacactgtctgaccccgtgcagcttgaggtccacattggatggttgctcttgcaagccccacgctgggttttcaaagaggaagatccaatccatctgcggtgccacagctggaaaaacaccgctctccacaaagtcacatacctgcaaaatggcaaaggacgcaaatacttccatcacaattccgatttttacattccgaaggctaccctgaaagacagcggcagctatttctgccggggactcgtcggctccaagaatgtgtcctccgaaaccgtgaatatcacgattacccaaggactggctgtgcctacaatctctagcttctttccgcctggataccaagtctccttctgtcttgtgatggtcctcctgtttgctgtggacacaggactgtacttttcc

SEQ ID NO: 1806 - DNA, 1470 bp, synthetic construct
  source 1..1470: mol_type = other DNA
atggccttaccagtgaccgccttgctcctgccgctggccttgctgctccacgccgccaggccggacatcgtgatgacacagagccctgatagcctggccgtgtctctgggagagagagccaccatcaactgcaagagcagccagagcctgctgtacagaagcaaccagaagaactacctggcctggtatcagcagaagcccggccagcctcctaagctgctgatctactgggccagcaccagagaaagcggcgtgcccgatagattttctggctctggcagcggcaccgacttcaccctgacaatttctagcctgcaagccgaggacgtggccgtgtactactgccagcagtattacaactaccccagaaccttcggccagggcaccaaggtggaaatcaagagaacagttggcggaggcggaagtggaggcggaggatctggcggcggaggctctgaagttcagctgcttgaatcaggcggcggactggttcaacctggcggatctctgagactgagctgtgccgccagcggctacagcatcacaagcgactatgcctggaactgggtccgacaggcccctggcaaaggactggaatgggtgtcctacatcagcaacagcggcagcaccagctacaaccccagcctgaagtcccggttcaccatcagcagagacaacagcaagaacaccctgtacctccagatgaacagcctgagagctgaggacaccgccgtgtattattgcgccaaagagcggaactacgactacgacgattactactacgctatggactactggggccagggaaccctggtcacagtctcttctacgcgtggaatgaggactgaggatcttcccaaagctgtcgtctttctcgaaccccaatggtatcgggtgctcgaaaaagactctgtgacactgaaatgccaaggggcctactctcccgaggacaactccacacagtggtttcataatgagtccctcatcagctctcaggccagctcttatttcattgatgccgctacagtggacgactccggcgagtatcggtgtcagaccaatctgtctacactgtctgaccccgtgcagcttgaggtccacattggatggttgctcttgcaagccccacgctgggttttcaaagaggaagatccaatccatctgcggtgccacagctggaaaaacaccgctctccacaaagtcacatacctgcaaaatggcaaaggacgcaaatacttccatcacaattccgatttttacattccgaaggctaccctgaaagacagcggcagctatttctgccggggactcgtcggctccaagaatgtgtcctccgaaaccgtgaatatcacgattacccaaggactggctgtgcctacaatctctagcttctttccgcctggataccaagtctccttctgtcttgtgatggtcctcctgtttgctgtggacacaggactgtacttttcc

SEQ ID NO: 1807 - DNA, 1449 bp, synthetic construct
  source 1..1449: mol_type = other DNA
atggccttaccagtgaccgccttgctcctgccgctggccttgctgctccacgccgccaggccggacgtggtcatgacacagagccctctgagcctgcctgtgacacttggacagcctgccagcatcagctgtagaagcagccagagcctgctgcacagcagcggcaatacctacctggaatggtatcagcagaggcccggacagagccccagacctctgatctacaagatcagcacccggttcagcggcgtgcccgatagattttctggctctggcagcggcaccgacttcaccctgaagattagcagagtggaagccgaggacgtgggcgtgtactactgcttccaaggcagccacgtgccatacacctttggcggcggaacaaaggtggaaatcaagagaggcggaggcggaagtggaggcggaggatctggcggcggaggctctcaagttcagctggttcagagcggagccgaagtgaagaaacctggggcctctgtgaaggtgtcctgcaaagcctctggcctgaccatcgaggactactacatgcactgggtccgacaggcccctggacaaggacttgaatggatgggctggatcgaccccgagaacggcgatacagagtacggccctaagttccagggcagagtgaccatgaccagagacaccagcatcaacaccgcctacatggaactgagccggctgagatccgatgacaccgccgtgtactattgcgccgtgcacaatgcccactacggcacttggtttgcctattggggccagggcacactggtcaccgttagctctacgcgtggaatgaggactgaggatcttcccaaagctgtcgtctttctcgaaccccaatggtatcgggtgctcgaaaaagactctgtgacactgaaatgccaaggggcctactctcccgaggacaactccacacagtggtttcataatgagtccctcatcagctctcaggccagctcttatttcattgatgccgctacagtggacgactccggcgagtatcggtgtcagaccaatctgtctacactgtctgaccccgtgcagcttgaggtccacattggatggttgctcttgcaagccccacgctgggttttcaaagaggaagatccaatccatctgcggtgccacagctggaaaaacaccgctctccacaaagtcacatacctgcaaaatggcaaaggacgcaaatacttccatcacaattccgatttttacattccgaaggctaccctgaaagacagcggcagctatttctgccggggactcgtcggctccaagaatgtgtcctccgaaaccgtgaatatcacgattacccaaggactggctgtgcctacaatctctagcttctttccgcctggataccaagtctccttctgtcttgtgatggtcctcctgtttgctgtggacacaggactgtacttttcc

SEQ ID NO: 1808 - DNA, 1425 bp, synthetic construct
  source 1..1425: mol_type = other DNA
atggccttaccagtgaccgccttgctcctgccgctggccttgctgctccacgccgccaggccggacatccagatgacacagagccctagcagcctgtctgccagcgtgggagacagagtgaccatcacctgtagagccagcgagaacatctacagcaacctggcctggtatcagcagaagcctggcaaggcccctaagctgctgatctacgccgccaccaatctggctgatggcgtgccaagcagattttccggctctggcagcggcaccgatttcaccctgacaatatccagcctccagcctgaggacttcgccacctactactgccagcacttttggggcacccctacattcggccagggcaccaaggtggaaatcaagagaacagttggcggaggcggaagtggaggcggaggatctggcggcggaggctctgaagtgcagctggttgaatcaggtggcggcctggttcaacctggcggatctctgagactgagctgtgccgcctctggcttcagcctgacaaattacggcgtgcactgggtccgacaggcccctggaaaaggactggaatgggtgtccgtgatttggagcggcggcagcaccgattacaacgccgccttcatcagccggttcaccatcagcgccgacaccagcaagaataccgcctacctccagatgaactccctgagagccgaggacaccgccgtgtactattgcgccagagaactgatccacgctatggacaactggggccagggaaccctggtcacagtctcttctacgcgtggaatgaggactgaggatcttcccaaagctgtcgtctttctcgaaccccaatggtatcgggtgctcgaaaaagactctgtgacactgaaatgccaaggggcctactctcccgaggacaactccacacagtggtttcataatgagtccctcatcagctctcaggccagctcttatttcattgatgccgctacagtggacgactccggcgagtatcggtgtcagaccaatctgtctacactgtctgaccccgtgcagcttgaggtccacattggatggttgctcttgcaagccccacgctgggttttcaaagaggaagatccaatccatctgcggtgccacagctggaaaaacaccgctctccacaaagtcacatacctgcaaaatggcaaaggacgcaaatacttccatcacaattccgatttttacattccgaaggctaccctgaaagacagcggcagctatttctgccggggactcgtcggctccaagaatgtgtcctccgaaaccgtgaatatcacgattacccaaggactggctgtgcctacaatctctagcttctttccgcctggataccaagtctccttctgtcttgtgatggtcctcctgtttgctgtggacacaggactgtacttttcc

SEQ ID NO: 1809 - DNA, 1446 bp, synthetic construct
  source 1..1446: mol_type = other DNA
atggccttaccagtgaccgccttgctcctgccgctggccttgctgctccacgccgccaggccggacttcgtgatgacacagagccctctgagcctgcctgtgacacctggcgaacctgccagcatcagctgtagaagcagccagagcatcgtgcacagcaacggcaacacctacctggaatggtatctccagaagcctggacagagcccacagctgctgatctacaaggtgtccaacagattcagcggcgtgcccgacagattttctggcagcggctctggcaccgacttcaccctgaagattagcagagtggaagccgaggacgtgggcgtgtactactgcttccaaggctctcacgtgcccctgacctttggacagggcaccaagctggaaatcaagagaggcggaggcggaagtggaggcggaggatctggcggcggaggctctgaagtgcagctggttgaaagcggagccgaagtgaagaaacctggggcctctgtgaaggtgtcctgcaaggccagcggctacacctttaccagctactggattcactgggtccgacaggcccctggacaaggacttgagtggatgggcgagaacgacccctccaacggcaggaccaactacaacgagaagttcaagaaccgcgtgaccctgaccgtggacaccagcatctctaccgcctacatggaactgagccggctgagatccgatgacaccgccgtgtactattgcgccagaggacccaactacttttacagcatggactactggggccagggcacaatggtcaccgttagctctacgcgtggaatgaggactgaggatcttcccaaagctgtcgtctttctcgaaccccaatggtatcgggtgctcgaaaaagactctgtgacactgaaatgccaaggggcctactctcccgaggacaactccacacagtggtttcataatgagtccctcatcagctctcaggccagctcttatttcattgatgccgctacagtggacgactccggcgagtatcggtgtcagaccaatctgtctacactgtctgaccccgtgcagcttgaggtccacattggatggttgctcttgcaagccccacgctgggttttcaaagaggaagatccaatccatctgcggtgccacagctggaaaaacaccgctctccacaaagtcacatacctgcaaaatggcaaaggacgcaaatacttccatcacaattccgatttttacattccgaaggctaccctgaaagacagcggcagctatttctgccggggactcgtcggctccaagaatgtgtcctccgaaaccgtgaatatcacgattacccaaggactggctgtgcctacaatctctagcttctttccgcctggataccaagtctccttctgtcttgtgatggtcctcctgtttgctgtggacacaggactgtacttttcc

SEQ ID NO: 1810 - DNA, 1425 bp, synthetic construct
  source 1..1425: mol_type = other DNA
atggccttaccagtgaccgccttgctcctgccgctggccttgctgctccacgccgccaggccggacatccagctgactcagagccctagctttctgagcgccagcgtgggcgacagagtgaccatcacatgtagcgccagatccagcatcagcttcatgtactggtatcagcagaagcccggcaaggcccctaagctgctgatctacgacaccagcaatctggcctctggcgtgcccagcagattttctggaagcggcagcggcaccgagttcaccctgacaatctctagcctggaagccgaggatgccgccacctactattgccagcagtggtccagctatcccctgacatttggacagggcaccaagctggaaatcaaaggcggaggcggaagtggaggcggaggatctggcggcggaggctctcaggttcagctggttcagtctggggccgaagtgaagaaacctggggcctctgtgaaggtgtcctgcaaggcttccggctacacctttaccggctcttggatgaactgggtccgacaggctcctggacagggactcgaatggatcggcagaatctatcctggcgacggcgagacaaactacaacggcaagttcaaggaccgcgtgacaatcaccgccgacaagagcacaagcaccgcctacatggaactgagcagcctgcggagcgaagataccgccgtgtactactgcgcccggatctacggcaacaacgtgtacttcgatgtgtggggccagggcacaaccgtgacagtctcttctacgcgtggaatgaggactgaggatcttcccaaagctgtcgtctttctcgaaccccaatggtatcgggtgctcgaaaaagactctgtgacactgaaatgccaaggggcctactctcccgaggacaactccacacagtggtttcataatgagtccctcatcagctctcaggccagctcttatttcattgatgccgctacagtggacgactccggcgagtatcggtgtcagaccaatctgtctacactgtctgaccccgtgcagcttgaggtccacattggatggttgctcttgcaagccccacgctgggttttcaaagaggaagatccaatccatctgcggtgccacagctggaaaaacaccgctctccacaaagtcacatacctgcaaaatggcaaaggacgcaaatacttccatcacaattccgatttttacattccgaaggctaccctgaaagacagcggcagctatttctgccggggactcgtcggctccaagaatgtgtcctccgaaaccgtgaatatcacgattacccaaggactggctgtgcctacaatctctagcttctttccgcctggataccaagtctccttctgtcttgtgatggtcctcctgtttgctgtggacacaggactgtacttttcc

SEQ ID NO: 1811 - DNA, 1449 bp, synthetic construct
  source 1..1449: mol_type = other DNA
atggccttaccagtgaccgccttgctcctgccgctggccttgctgctccacgccgccaggccgcagctggtgctgacacagtctccaagcgcctctgccagcctgggatctagcgtgaagctgacctgtacactgagcagcggccacaagaccgacaccatcgactggtatcagcagcagcctggcaaggcccctagatacctgatgaagctggaaggcagcggcagctacaacaaaggctctggcgtgcccgatagattcagcggcagttcttctggcgctgattggtatctgaccatcagcagcctccagagcgaggacgaggccgattactactgcggcacagactaccccggcaactacctgtttggcggcggaacacagctgacagtgcttggcggcggaggcggaagtggaggcggaggatctggcggcggaggctctcaagaacagctggttgaaagcggcggaggactggttcaacctggcggttctctgagactgagctgtgccgccagcggcttcaccttcagcgactactacatgagctggatcagacaggccccaggcaaaggactggaatgggtcgccacaatctaccccagcagcggcaagacctactacgccgattctgccaagggcagactgaccatctccagcgacaacgccaaggacagcctgtacctccagatgaacagcctgagagccgaggacaccgccgtgtactactgcaccagagatagctacgccgacgacgccgctctgtttgacatttggggccagggcaccaccgtgaccgtttcttctacgcgtggaatgaggactgaggatcttcccaaagctgtcgtctttctcgaaccccaatggtatcgggtgctcgaaaaagactctgtgacactgaaatgccaaggggcctactctcccgaggacaactccacacagtggtttcataatgagtccctcatcagctctcaggccagctcttatttcattgatgccgctacagtggacgactccggcgagtatcggtgtcagaccaatctgtctacactgtctgaccccgtgcagcttgaggtccacattggatggttgctcttgcaagccccacgctgggttttcaaagaggaagatccaatccatctgcggtgccacagctggaaaaacaccgctctccacaaagtcacatacctgcaaaatggcaaaggacgcaaatacttccatcacaattccgatttttacattccgaaggctaccctgaaagacagcggcagctatttctgccggggactcgtcggctccaagaatgtgtcctccgaaaccgtgaatatcacgattacccaaggactggctgtgcctacaatctctagcttctttccgcctggataccaagtctccttctgtcttgtgatggtcctcctgtttgctgtggacacaggactgtacttttcc

SEQ ID NO: 1812 - DNA, 1434 bp, synthetic construct
  source 1..1434: mol_type = other DNA
atggccttaccagtgaccgccttgctcctgccgctggccttgctgctccacgccgccaggccggacatcgtgctgacacagagccctccaagcctggctatgagcctgggaaagagagccaccatcagctgtagagccagcgagagcgtgacaatcctgggctctcacctgatccactggtatcagcagaagcccggccagcctcctacactgctgattcagctggcctccaatgtgcagacaggcgtgccagccagattttctggcagcggcagcagaaccgacttcaccctgaccattgatcccgtggaagaggacgacgtggccgtgtactactgcctccagagcagaacaatccccagaacctttggcggaggcaccaagctggaaatcaaaggcggcggaggaagcggaggcggaggatctggtggtggtggatctcaaatccagctggtgcagtctggccccgagctgaagaaacctggcgagacagtgaagatcagctgcaaggccagcggctacaccttcaccgactacagcatcaactgggtcaagagagcccctggcaagggcctgaaatggatgggctggatcaacaccgaaaccagagagcccgcctacgcctacgacttcagaggcagattcgccttcagcctggaaaccagcgccagcacagcctacctccagatcaacaacctgaagtacgaggacaccgccacctacttttgcgccctggactacagctacgctatggactattggggccagggcaccagcgtgacagtctcttctacgcgtggaatgaggactgaggatcttcccaaagctgtcgtctttctcgaaccccaatggtatcgggtgctcgaaaaagactctgtgacactgaaatgccaaggggcctactctcccgaggacaactccacacagtggtttcataatgagtccctcatcagctctcaggccagctcttatttcattgatgccgctacagtggacgactccggcgagtatcggtgtcagaccaatctgtctacactgtctgaccccgtgcagcttgaggtccacattggatggttgctcttgcaagccccacgctgggttttcaaagaggaagatccaatccatctgcggtgccacagctggaaaaacaccgctctccacaaagtcacatacctgcaaaatggcaaaggacgcaaatacttccatcacaattccgatttttacattccgaaggctaccctgaaagacagcggcagctatttctgccggggactcgtcggctccaagaatgtgtcctccgaaaccgtgaatatcacgattacccaaggactggctgtgcctacaatctctagcttctttccgcctggataccaagtctccttctgtcttgtgatggtcctcctgtttgctgtggacacaggactgtacttttcc

SEQ ID NO: 1813 - DNA, 1446 bp, synthetic construct
  source 1..1446: mol_type = other DNA
atggccttaccagtgaccgccttgctcctgccgctggccttgctgctccacgccgccaggccgcaggtacagctgcaggaatctgggcccggacttgtcaagccaagtcagacactttctcttacatgtaccgtgagcggcggaagtataagcagtggaggcttttactggtcttggatacggcagcacccaggcaaaggcttggagtggattggatacattcatcattcaggatctacacactataatccatcccttaagtcccgggtcaccattagcattgatacgtctaagaatctgttcagtctcaggctgtcctccgtcactgctgccgacacagccgtgtactactgcgcctccttggtttactgcggaggcgactgttatagcggctttgattattgggggcaggggaccctcgtaaccgtgagctctggaggcggaggatcaggtggcggtggatctggcggtggcggatctgatatccagctcactcaaagcccctctagtctctctgcctcagtgggggatcgggtcagttttacttgtcaagcttcacaggatatcaacaacttccttaattggtatcagcagaagccaggaaaagcacccaagctgctcatctatgatgcctcaaatttggagacgggtgttcccagtcgattctctgggtcagggtccgggaccgactttacgtttacgatctcctctctgcagcccgaagacatcgccacatactattgtcaacagtacggcaacttgcctttcacatttgggggcgggactaaggttgaaatcaagaggacgcgtggaatgaggactgaggatcttcccaaagctgtcgtctttctcgaaccccaatggtatcgggtgctcgaaaaagactctgtgacactgaaatgccaaggggcctactctcccgaggacaactccacacagtggtttcataatgagtccctcatcagctctcaggccagctcttatttcattgatgccgctacagtggacgactccggcgagtatcggtgtcagaccaatctgtctacactgtctgaccccgtgcagcttgaggtccacattggatggttgctcttgcaagccccacgctgggttttcaaagaggaagatccaatccatctgcggtgccacagctggaaaaacaccgctctccacaaagtcacatacctgcaaaatggcaaaggacgcaaatacttccatcacaattccgatttttacattccgaaggctaccctgaaagacagcggcagctatttctgccggggactcgtcggctccaagaatgtgtcctccgaaaccgtgaatatcacgattacccaaggactggctgtgcctacaatctctagcttctttccgcctggataccaagtctccttctgtcttgtgatggtcctcctgtttgctgtggacacaggactgtacttttcc

SEQ ID NO: 1814 - DNA, 1440 bp, synthetic construct
  source 1..1440: mol_type = other DNA
atggccttaccagtgaccgccttgctcctgccgctggccttgctgctccacgccgccaggccgcaggtccaactgcaagaaagcggacccggactggtgaagccttctgagacacttagtctgacgtgcacggtcagtggcggctccatctcctcctattattggtcatggatacgacaacccccaggtaagggcctggaatggattggctatatctactattcaggaagcacgaactacaatcccagcctgaagtcccgagtgacaatttcagtagataccagtaaaaaccagttcagtcttaaactgtcaagcgtgacagctgccgacaccgctgtgtattactgcgtctcactggtgtattgtggaggggattgttatagcgggttcgattattggggacagggaaccctggtgactgtatcttccggaggcggaggatcaggtggcggtggatctggcggtggcggatctgatattcaactgacacaatcccccagctcactcagcgccagcgtgggggacagggttagctttacctgtcaagcctctcaggatataaataactttctgaactggtatcaacagaagcctgggaaggcgcccaaactcctgatctatgatgcgtccaacctggaaactggcgtgccttcacgctttagcggctctggcagtggtacagacttcacttttaccatctcttcacttcagccggaggacatcgccacatattactgtcaacagtacggaaacttgccctttacttttggaggcggcaccaaagttgaaatcaaaagaacgcgtggaatgaggactgaggatcttcccaaagctgtcgtctttctcgaaccccaatggtatcgggtgctcgaaaaagactctgtgacactgaaatgccaaggggcctactctcccgaggacaactccacacagtggtttcataatgagtccctcatcagctctcaggccagctcttatttcattgatgccgctacagtggacgactccggcgagtatcggtgtcagaccaatctgtctacactgtctgaccccgtgcagcttgaggtccacattggatggttgctcttgcaagccccacgctgggttttcaaagaggaagatccaatccatctgcggtgccacagctggaaaaacaccgctctccacaaagtcacatacctgcaaaatggcaaaggacgcaaatacttccatcacaattccgatttttacattccgaaggctaccctgaaagacagcggcagctatttctgccggggactcgtcggctccaagaatgtgtcctccgaaaccgtgaatatcacgattacccaaggactggctgtgcctacaatctctagcttctttccgcctggataccaagtctccttctgtcttgtgatggtcctcctgtttgctgtggacacaggactgtacttttcc

SEQ ID NO: 1815 - DNA, 1455 bp, synthetic construct
  source 1..1455: mol_type = other DNA
atggccttaccagtgaccgccttgctcctgccgctggccttgctgctccacgccgccaggccgcaagttactttgaaggagtctggacctgtactggtgaagccaaccgagacactgacactcacgtgtacagtgagtggtttttccttgatcaacgcaaggatgggcgtcagctggatcaggcaaccccctggcaaggctctggaatggctcgctcacatattcagcaatgccgaaaaaagctaccggacaagcctgaaatcccgcctgactatttccaaggacacttctaagtctcaggtggtgctgaccatgaccaacatggacccggtggacaccgccacctattactgcgcaagaatccctgggtatggtgggaatggtgactaccattattatgggatggatgtgtgggggcaaggcacaaccgtaacggtctcaagcggaggcggaggatcaggtggcggtggatctggcggtggcggatctgacattcagatgacccaaagcccgtccagcctgtccgccagcctgggagatagagtgacaatcacgtgtagagcttcccaagggataagaaatgatctcgggtggtatcagcagaagcccggcaaagcccccaaaaggcttatatatgctagtagtacactgcagtctggagttccttcccgattttcaggtagcggctccggtacagagttcaccctcacgataagctcactccagcctgaggatttcgcaacgtactactgcctccagcacaacaattttccctggactttcggccagggcaccaaggtggagatcaagaggacgcgtggaatgaggactgaggatcttcccaaagctgtcgtctttctcgaaccccaatggtatcgggtgctcgaaaaagactctgtgacactgaaatgccaaggggcctactctcccgaggacaactccacacagtggtttcataatgagtccctcatcagctctcaggccagctcttatttcattgatgccgctacagtggacgactccggcgagtatcggtgtcagaccaatctgtctacactgtctgaccccgtgcagcttgaggtccacattggatggttgctcttgcaagccccacgctgggttttcaaagaggaagatccaatccatctgcggtgccacagctggaaaaacaccgctctccacaaagtcacatacctgcaaaatggcaaaggacgcaaatacttccatcacaattccgatttttacattccgaaggctaccctgaaagacagcggcagctatttctgccggggactcgtcggctccaagaatgtgtcctccgaaaccgtgaatatcacgattacccaaggactggctgtgcctacaatctctagcttctttccgcctggataccaagtctccttctgtcttgtgatggtcctcctgtttgctgtggacacaggactgtacttttcc

SEQ ID NO: 1816 - DNA, 1437 bp, synthetic construct
  source 1..1437: mol_type = other DNA
atggccttaccagtgaccgccttgctcctgccgctggccttgctgctccacgccgccaggccgcagatccagttggtggaatcagggggcggtgtggtgcagccgggtaggagcctgagactgtcatgcgtggcgtctggcttcacattcaagaactacggcatgcactgggtgcgacaggcccccggaaagggtttggagtgggtcgccgtgatctggtacgacggatctaatgagtattacggagatcctgtgaagggaaggttcaccatctcccgcgacaatagcaaaaatatgctctacctgcaaatgaactcactcagggcggatgatacggcggtctactattgcgctcgctcagggattgctgtggccggcgcattcgattactggggacagggtaccctggtgacagtatcaagcggaggcggaggatcaggtggcggtggatctggcggtggcggatctgagattgtgttgacacagtctcccgataccctgtcactgtcacccggcgagaaggcaacgctgagttgcagagcaagccagtcagtctcctcttcttttctggcctggtatcagcaaaaaccaggtcaggcaccatctctcctgatttacgttgccagcagacgggcggctggcattcccgacaggttctctggaagcggatctgggaccgattttaccctgacaattagccgcttggagcccgaagactttggtatgttttactgccagcactacggaaggacacctttcacatttggcccgggcacgaaagtcgatataaaacgcacgcgtggaatgaggactgaggatcttcccaaagctgtcgtctttctcgaaccccaatggtatcgggtgctcgaaaaagactctgtgacactgaaatgccaaggggcctactctcccgaggacaactccacacagtggtttcataatgagtccctcatcagctctcaggccagctcttatttcattgatgccgctacagtggacgactccggcgagtatcggtgtcagaccaatctgtctacactgtctgaccccgtgcagcttgaggtccacattggatggttgctcttgcaagccccacgctgggttttcaaagaggaagatccaatccatctgcggtgccacagctggaaaaacaccgctctccacaaagtcacatacctgcaaaatggcaaaggacgcaaatacttccatcacaattccgatttttacattccgaaggctaccctgaaagacagcggcagctatttctgccggggactcgtcggctccaagaatgtgtcctccgaaaccgtgaatatcacgattacccaaggactggctgtgcctacaatctctagcttctttccgcctggataccaagtctccttctgtcttgtgatggtcctcctgtttgctgtggacacaggactgtacttttcc

SEQ ID NO: 1817 - DNA, 1440 bp, synthetic construct
  source 1..1440: mol_type = other DNA
atggccttaccagtgaccgccttgctcctgccgctggccttgctgctccacgccgccaggccggacatccaactgactcagagccccagctttctgagcgcctctgtgggcgacagagtgaccatcacatgtagagccagccagggcatcagcagctacctggcttggtatcagcagaagcctggcaaggcccctaaactgctgatctacgccgccagcacactccagtctggcgtgccaagcagattttctggcagcggctctggcaccgagttcaccctgacaatatccagcctccagcctgaggacttcgccacctactactgccagcaagtgaacagctaccctctgacctttggcggaggcaccaaggtggaaatcaagagaggcggaggcggaagtggaggcggaggatctggcggcggaggctctcaactgcaactgcaagagtctggccctggcctggtcaagcctagcgaaacactgagcctgacctgtaccgtgtctggcggcagcatcagctccagcacatattactggggctggatcagacagcctcctggcaaaggactggaatggatcggctccatctacttcaccggcagcaccgactacaaccccagcctgaagtccagggtgtccatctccgtggacaccagcaagaaccagttctccctgaagctgagcagcgtgacagccgctgataccgccgtgtactactgcgccaaagaggacgatagcagcggctactacagcttcgactattggggccagggcaacctggtcaccgttagctctacgcgtggaatgaggactgaggatcttcccaaagctgtcgtctttctcgaaccccaatggtatcgggtgctcgaaaaagactctgtgacactgaaatgccaaggggcctactctcccgaggacaactccacacagtggtttcataatgagtccctcatcagctctcaggccagctcttatttcattgatgccgctacagtggacgactccggcgagtatcggtgtcagaccaatctgtctacactgtctgaccccgtgcagcttgaggtccacattggatggttgctcttgcaagccccacgctgggttttcaaagaggaagatccaatccatctgcggtgccacagctggaaaaacaccgctctccacaaagtcacatacctgcaaaatggcaaaggacgcaaatacttccatcacaattccgatttttacattccgaaggctaccctgaaagacagcggcagctatttctgccggggactcgtcggctccaagaatgtgtcctccgaaaccgtgaatatcacgattacccaaggactggctgtgcctacaatctctagcttctttccgcctggataccaagtctccttctgtcttgtgatggtcctcctgtttgctgtggacacaggactgtacttttcc

SEQ ID NO: 1818 - DNA, 1449 bp, synthetic construct
  source 1..1449: mol_type = other DNA
atggccttaccagtgaccgccttgctcctgccgctggccttgctgctccacgccgccaggccgcagtctgctctgacccagcctagatccgtgtctggctctcctggacacagcgtgaccatcagctgtaccggcacctcttccgacgtgggcgactacaattacgtgtcctggtatcagcagaggcccggcaaggtgccaaagctgctgatctacgacgtgtccaagaggccaagcggcgtgcccgatagattttccggcagcaagtctggcaacaccgccagcctgacaatctctggactgcaagccgaggacgaggccatctacttttgtgccagctacgccggcaactacaacgtggtgtttggcggaggcaccaagctgacagtgcttggacaaggcggaggcggaagtggaggcggaggatctggcggcggaggctctcaagttcagctggtgcagtctggcagcgagctgaagaaacctggggcctctgtgaaggtgtcctgcaaggcttccggctacaccttcaacacctacgccatgaattgggtccgacaggctccaggccaaggactggaatggatgggctggatcaacaccaacaccggcaatcccacatacgcccagggcttcaccggcagattcgtgttctctctggacacctccgtgtccaccgcctacctccagatcagctctctgaaggccgaggataccgccgtgtactactgcgccagacggtacttcgattggctgctgggagccttcgacatctggggccagggaacaatggtcaccgtgtctagtacgcgtggaatgaggactgaggatcttcccaaagctgtcgtctttctcgaaccccaatggtatcgggtgctcgaaaaagactctgtgacactgaaatgccaaggggcctactctcccgaggacaactccacacagtggtttcataatgagtccctcatcagctctcaggccagctcttatttcattgatgccgctacagtggacgactccggcgagtatcggtgtcagaccaatctgtctacactgtctgaccccgtgcagcttgaggtccacattggatggttgctcttgcaagccccacgctgggttttcaaagaggaagatccaatccatctgcggtgccacagctggaaaaacaccgctctccacaaagtcacatacctgcaaaatggcaaaggacgcaaatacttccatcacaattccgatttttacattccgaaggctaccctgaaagacagcggcagctatttctgccggggactcgtcggctccaagaatgtgtcctccgaaaccgtgaatatcacgattacccaaggactggctgtgcctacaatctctagcttctttccgcctggataccaagtctccttctgtcttgtgatggtcctcctgtttgctgtggacacaggactgtacttttcc

SEQ ID NO: 1819 - DNA, 1425 bp, synthetic construct
  source 1..1425: mol_type = other DNA
atggccttaccagtgaccgccttgctcctgccgctggccttgctgctccacgccgccaggccggacatccagatgacacagagccctagcagcctgtctgccagcgtgggagacagagtgaccatcacatgtagcgccagccagggcatcaacaactacctgaactggtatcagcagaagcccggcaaggcccctaagctgctgatccactacacatctggactgcacgctggcgtgcccagcagattttctggctctggcagcggcaccgactacaccctgacaatatctagcctccagcctgaggacgtggcaacctactactgccagcagtacagcatcctgccttggacctttggcggaggcaccaaggtggaaatcaagagaggcggaggcggaagtggaggcggaggatctggcggcggaggctctcaagttcagcttgttcagagcggagccgaagtgaagaaacccggcagctctgtgaaggtgtcctgcaaggcttccggctacgcctttagcagcagctggatgaactgggtccgacaggctcctggacagggccttgaatggatgggcagaatctatcccggcgacggcaatacccactacgcccagaaattccagggccgcgtgacactgacagccgacaagtctacaagcaccgcctacatggaactgagcagcctgagaagcgaggacaccgccgtgtactattgcggcgaaggctatctggaccctatggactattggggccagggcacactggtcaccgttagctctacgcgtggaatgaggactgaggatcttcccaaagctgtcgtctttctcgaaccccaatggtatcgggtgctcgaaaaagactctgtgacactgaaatgccaaggggcctactctcccgaggacaactccacacagtggtttcataatgagtccctcatcagctctcaggccagctcttatttcattgatgccgctacagtggacgactccggcgagtatcggtgtcagaccaatctgtctacactgtctgaccccgtgcagcttgaggtccacattggatggttgctcttgcaagccccacgctgggttttcaaagaggaagatccaatccatctgcggtgccacagctggaaaaacaccgctctccacaaagtcacatacctgcaaaatggcaaaggacgcaaatacttccatcacaattccgatttttacattccgaaggctaccctgaaagacagcggcagctatttctgccggggactcgtcggctccaagaatgtgtcctccgaaaccgtgaatatcacgattacccaaggactggctgtgcctacaatctctagcttctttccgcctggataccaagtctccttctgtcttgtgatggtcctcctgtttgctgtggacacaggactgtacttttcc

SEQ ID NO: 1820 - DNA, 1434 bp, synthetic construct
  source 1..1434: mol_type = other DNA
atggccttaccagtgaccgccttgctcctgccgctggccttgctgctccacgccgccaggccggaggtgcagctggttgaatctggcggaggactggttcagcctggcggatctctgagactgtcttgtgccgccagcggctacaccttcaccacctattggatgcactgggtccgacaggcccctggcaaaggacttgagtgggtcggatatatcaggcccagcaccggctacacagagtacaaccagaagttcaaggaccgcttcaccatcagcgccgacaccagcaagaataccgcctacctccagatgaacagcctgagagccgaggacaccgccgtgtactactgtgccagatccagatggctgctggactattggggccagggcacactggttacagtttctggcggaggcggaagtggaggcggaggatctggcggcggaggctctgacattcagatgacacagagccctagcagcctgagcgcctctgtgggagacagagtgaccatcacatgcaagagcagccagagcgtgctgtactccagcaatcagaagaactacctggcctggttccagcagaagcctggcaaggctcctaagctgctgatctactgggccagcaccagagaaagcggcgtgccaagcagattttctggcagcggctctggcaccgacttcaccctgacaatatccagcctccagcctgaggacttcgccacctacttttgccaccagtacctgagcagctacacattcggacagggcaccaaggtggaaatcaagcggacgcgtggaatgaggactgaggatcttcccaaagctgtcgtctttctcgaaccccaatggtatcgggtgctcgaaaaagactctgtgacactgaaatgccaaggggcctactctcccgaggacaactccacacagtggtttcataatgagtccctcatcagctctcaggccagctcttatttcattgatgccgctacagtggacgactccggcgagtatcggtgtcagaccaatctgtctacactgtctgaccccgtgcagcttgaggtccacattggatggttgctcttgcaagccccacgctgggttttcaaagaggaagatccaatccatctgcggtgccacagctggaaaaacaccgctctccacaaagtcacatacctgcaaaatggcaaaggacgcaaatacttccatcacaattccgatttttacattccgaaggctaccctgaaagacagcggcagctatttctgccggggactcgtcggctccaagaatgtgtcctccgaaaccgtgaatatcacgattacccaaggactggctgtgcctacaatctctagcttctttccgcctggataccaagtctccttctgtcttgtgatggtcctcctgtttgctgtggacacaggactgtacttttcc

SEQ ID NO: 1821 - DNA, 1425 bp, synthetic construct
  source 1..1425: mol_type = other DNA
atggccttaccagtgaccgccttgctcctgccgctggccttgctgctccacgccgccaggccggacatccagatgacacagagccctagcagcctgtctgccagcgtgggagacagagtgaccatcacctgtagagccagccaggacatcagcaactacctgaactggtatcagcagaagcccggcaaggcccctaagctgctgatctactacaccagcagactgcacagcggcgtgcccagcagattttctggctctggcagcggcaccgacttcaccctgacaatatctagcctccagcctgaggacttcgccacctactattgccagcagggcaacaccctgccttacacatttggacagggcaccaaggtggaaatcaagagaggcggaggcggaagtggaggcggaggatctggcggcggaggctctgaagtgcagctggttgaatcaggtggcggcctggttcaacctggcggatctctgagactgagctgtgccgccagcggcttcaccttcagcgactactttatgagctgggtccgacaggcccctggcaaaggacttgaatgggtcgccaccatcagcaatggcggcacctacacttactaccccgacagcgtgaagggcagattcaccatctccagagacaacagcaagaacaccctgtacctccagatgaactccctgagagccgaggacaccgccgtgtactactgcgccagattcgacggctacatcttcgactattggggccagggcaccctggtcacagtctcttctacgcgtggaatgaggactgaggatcttcccaaagctgtcgtctttctcgaaccccaatggtatcgggtgctcgaaaaagactctgtgacactgaaatgccaaggggcctactctcccgaggacaactccacacagtggtttcataatgagtccctcatcagctctcaggccagctcttatttcattgatgccgctacagtggacgactccggcgagtatcggtgtcagaccaatctgtctacactgtctgaccccgtgcagcttgaggtccacattggatggttgctcttgcaagccccacgctgggttttcaaagaggaagatccaatccatctgcggtgccacagctggaaaaacaccgctctccacaaagtcacatacctgcaaaatggcaaaggacgcaaatacttccatcacaattccgatttttacattccgaaggctaccctgaaagacagcggcagctatttctgccggggactcgtcggctccaagaatgtgtcctccgaaaccgtgaatatcacgattacccaaggactggctgtgcctacaatctctagcttctttccgcctggataccaagtctccttctgtcttgtgatggtcctcctgtttgctgtggacacaggactgtacttttcc

SEQ ID NO: 1822 - DNA, 1446 bp, synthetic construct
  source 1..1446: mol_type = other DNA
atggccttaccagtgaccgccttgctcctgccgctggccttgctgctccacgccgccaggccggacatccagatgacacagagccctagcagcctgtctgccagcgtgggagacagagtgaccatcacctgtaccgccagcagcagagtgtccagcagctacctgcactggttccagcagaagcctggcaaggcccctaagctgctgatctacagcaccagcaatctggcctctggcgtgcccagcagattttctggctctggcagcggcaccgacttcaccctgacaatatctagcctccagcctgaggacttcgccacctactactgccaccagtaccacagaagcccctacacattcggccagggcaccaaggtggaaatcaagagaggcggaggcggaagtggaggcggaggatctggcggcggaggctctgaagttcagctggttgaatctggcggcggactggttcaacctggcggatctctgagactgagctgtgccgcctctggctacgccttcagcaacagctggatcaactgggtccgacaggcccctggcaaaggactggaatgggtcggacaaatctaccccggcgactacgacaccaactacaacggcaagttcaagggcagattcaccatcagccgggacaagagcaagaacaccgcctacctccagatgaactccctgagagccgaggacaccgccgtgtactattgtgctagaggcggctccatctactacggcaacctgggcttcttcgacgtgtggggacagggcacactggtcacagtctcttctacgcgtggaatgaggactgaggatcttcccaaagctgtcgtctttctcgaaccccaatggtatcgggtgctcgaaaaagactctgtgacactgaaatgccaaggggcctactctcccgaggacaactccacacagtggtttcataatgagtccctcatcagctctcaggccagctcttatttcattgatgccgctacagtggacgactccggcgagtatcggtgtcagaccaatctgtctacactgtctgaccccgtgcagcttgaggtccacattggatggttgctcttgcaagccccacgctgggttttcaaagaggaagatccaatccatctgcggtgccacagctggaaaaacaccgctctccacaaagtcacatacctgcaaaatggcaaaggacgcaaatacttccatcacaattccgatttttacattccgaaggctaccctgaaagacagcggcagctatttctgccggggactcgtcggctccaagaatgtgtcctccgaaaccgtgaatatcacgattacccaaggactggctgtgcctacaatctctagcttctttccgcctggataccaagtctccttctgtcttgtgatggtcctcctgtttgctgtggacacaggactgtacttttcc

SEQ ID NO: 1823 - DNA, 1416 bp, synthetic construct
  source 1..1416: mol_type = other DNA
atggccttaccagtgaccgccttgctcctgccgctggccttgctgctccacgccgccaggccggacatccagatgacacagagccctagcagcctgtctgccagcgtgggagacagagtgaccatcacatgtagcgccagcagcagcgtgacctacatgtactggtatcagcagaagcccggcaaggcccctaagctgctgatctacgacaccagcaatctggcctctggcgtgcccagcagattttctggctctggcagcggcaccgactacaccctgacaatatctagcctccagcctgaggacttcgccacctactactgccagcagtggtccaactatcccctgacattcggccagggcaccaaggtggaaatcaaaggcggaggcggaagtggaggcggaggatctggcggcggaggctctcaagttcagctggttcagagcggagccgaagtgaagaaacctggggcctctgtgaaggtgtcctgcaaggccagcggctacagcttcatcgagtacaccatcaactgggtccgacaggcccctggacaaggcctggaatggatcggcaacatcgacccctactacggcacaacctactacaaccagatgttcaccggcagagccacactgaccgtggacacctctatcagcaccgcctacatggaactgagccggctgagatccgatgacaccgccgtgtactattgtgccagaggcagcgcctggtttccctattggggacagggaaccctggtcaccgttagctctacgcgtggaatgaggactgaggatcttcccaaagctgtcgtctttctcgaaccccaatggtatcgggtgctcgaaaaagactctgtgacactgaaatgccaaggggcctactctcccgaggacaactccacacagtggtttcataatgagtccctcatcagctctcaggccagctcttatttcattgatgccgctacagtggacgactccggcgagtatcggtgtcagaccaatctgtctacactgtctgaccccgtgcagcttgaggtccacattggatggttgctcttgcaagccccacgctgggttttcaaagaggaagatccaatccatctgcggtgccacagctggaaaaacaccgctctccacaaagtcacatacctgcaaaatggcaaaggacgcaaatacttccatcacaattccgatttttacattccgaaggctaccctgaaagacagcggcagctatttctgccggggactcgtcggctccaagaatgtgtcctccgaaaccgtgaatatcacgattacccaaggactggctgtgcctacaatctctagcttctttccgcctggataccaagtctccttctgtcttgtgatggtcctcctgtttgctgtggacacaggactgtacttttcc

SEQ ID NO: 1824 - DNA, 1416 bp, synthetic construct
  source 1..1416: mol_type = other DNA
atggccttaccagtgaccgccttgctcctgccgctggccttgctgctccacgccgccaggccggagatcgtgctgacacagagcccttctagcctgtctgccagcgtgggcgacagagtgaccatcacatgtagagccagcgagaacatctacagctacctggcctggtatcagcagaagcctggcaaggcccctaagctgctgatctacaacaccaagacactcggcgagggcgtgcccagcagattttctggttctggcagcggcaccgacttcaccctgaccatatctagcctgcagcctgaggacttcgccacctactactgccagcaccactacggcacccctttcacatttggccctggcaccaaggtggacatcaaaggcggaggcggaagtggaggcggaggatctggcggcggaggctctcaagttcagctggttcagagcggagccgaagtgaagaaacctggggcctctgtgaaggtgtcctgcaaggccagcggctacaccttcagcgactattgggtgcactgggtccgacaggctccaggacaaggactggaatggatgggagccatcgacggcagcgataccttcaacgattacagccagaaattcaaaggccgcgtgaccatgaccagagacaccagcatcagcaccgcctacatggaactgagccggctgagatccgatgacaccgccgtgtactattgtgccagaggcggcctgctgcagtattggggacagggaacactggtcaccgtgtcctctacgcgtggaatgaggactgaggatcttcccaaagctgtcgtctttctcgaaccccaatggtatcgggtgctcgaaaaagactctgtgacactgaaatgccaaggggcctactctcccgaggacaactccacacagtggtttcataatgagtccctcatcagctctcaggccagctcttatttcattgatgccgctacagtggacgactccggcgagtatcggtgtcagaccaatctgtctacactgtctgaccccgtgcagcttgaggtccacattggatggttgctcttgcaagccccacgctgggttttcaaagaggaagatccaatccatctgcggtgccacagctggaaaaacaccgctctccacaaagtcacatacctgcaaaatggcaaaggacgcaaatacttccatcacaattccgatttttacattccgaaggctaccctgaaagacagcggcagctatttctgccggggactcgtcggctccaagaatgtgtcctccgaaaccgtgaatatcacgattacccaaggactggctgtgcctacaatctctagcttctttccgcctggataccaagtctccttctgtcttgtgatggtcctcctgtttgctgtggacacaggactgtacttttcc

SEQ ID NO: 1825 - DNA, 1428 bp, synthetic construct
  source 1..1428: mol_type = other DNA
atggccttaccagtgaccgccttgctcctgccgctggccttgctgctccacgccgccaggccgcaggttcagctccagcagtctggacctgagctggttaagcctggcgcttccgtgaagatcagctgcaaggcttccggctacgccttcagcagcagctggatgaactgggtcaaacagaggcccggcaaaggactggaatggatcggcagaatctaccccggcgacgaggacaccaattacagcggcaagttcaaggacaaggccacactgaccgccgacaagagcagcaccacagcctacatgcagctgagcagcctgaccagcgaggatagcgccgtgtacttctgtgccagaagcctgctgtacggcgactacctggattattggggccagggcacaaccctgacagtgtctagcggcggaggcggaagtggaggcggaggatctggcggcggaggctctcaaattgtgctgacacagagccccgccatcatgagcgcttctccaggcgagaaagtgaccatgacctgtagcgccagcagctccgtgtcttacatgcactggtatcagcagaagtccggcacaagccccaagcggtggatctacgataccagcaaactggcctccggcgtgcccgatagattttctggcagcggcagcggaaccagctacttcctgaccatcaacaacatggaagccgaggacgccgccacctactactgccagcagtggaacatcaaccctctgacctttggagccggcaccaagctggaactgaagagaacgcgtggaatgaggactgaggatcttcccaaagctgtcgtctttctcgaaccccaatggtatcgggtgctcgaaaaagactctgtgacactgaaatgccaaggggcctactctcccgaggacaactccacacagtggtttcataatgagtccctcatcagctctcaggccagctcttatttcattgatgccgctacagtggacgactccggcgagtatcggtgtcagaccaatctgtctacactgtctgaccccgtgcagcttgaggtccacattggatggttgctcttgcaagccccacgctgggttttcaaagaggaagatccaatccatctgcggtgccacagctggaaaaacaccgctctccacaaagtcacatacctgcaaaatggcaaaggacgcaaatacttccatcacaattccgatttttacattccgaaggctaccctgaaagacagcggcagctatttctgccggggactcgtcggctccaagaatgtgtcctccgaaaccgtgaatatcacgattacccaaggactggctgtgcctacaatctctagcttctttccgcctggataccaagtctccttctgtcttgtgatggtcctcctgtttgctgtggacacaggactgtacttttcc

SEQ ID NO: 1826 - DNA, 1437 bp, synthetic construct
  source 1..1437: mol_type = other DNA
atggccttaccagtgaccgccttgctcctgccgctggccttgctgctccacgccgccaggccggacatccagatgacacagagcagcgcctacctgagcgtgtcccttggaggcagagtgaccatcacatgcaaggccagcgaccacatcaacaactggctggcctggtatcagcacaagcccggcaatgcccctagactgctgatctctggcgctaccacactggaaacaggcgtgcccagcagattttctggcagcggctctggcaaggactacaccctgagcatcaccagcctccagaccgaggatgtggctacctactactgccagcagagctggaacaccccttggacatttggcggaggcaccaagctggaaatcaagagaggcggaggcggaagtggaggcggaggatctggcggcggaggctctcaagttcagctgcaacagagcggagccgagcttgtcagacctggcagctctgtgaagattagctgcaaagccagcggctacgccttcagcagctactgggtcaactggatgaagcagcggcctggacagggcctcgaatggatcggccaaatctatcctggcgacggcgacaccaactacaacggcaagtttaagggcagagccaccgtgaccgccgacaagagcagcagcacatcctacatgcagttcagcagcctgaccagcgaggacagcgccgtgtatttctgtgccagatccatcaccaccgtcgtgggctgcgctatggattattggggccagggcacaagcgtgaccgtgtcatctacgcgtggaatgaggactgaggatcttcccaaagctgtcgtctttctcgaaccccaatggtatcgggtgctcgaaaaagactctgtgacactgaaatgccaaggggcctactctcccgaggacaactccacacagtggtttcataatgagtccctcatcagctctcaggccagctcttatttcattgatgccgctacagtggacgactccggcgagtatcggtgtcagaccaatctgtctacactgtctgaccccgtgcagcttgaggtccacattggatggttgctcttgcaagccccacgctgggttttcaaagaggaagatccaatccatctgcggtgccacagctggaaaaacaccgctctccacaaagtcacatacctgcaaaatggcaaaggacgcaaatacttccatcacaattccgatttttacattccgaaggctaccctgaaagacagcggcagctatttctgccggggactcgtcggctccaagaatgtgtcctccgaaaccgtgaatatcacgattacccaaggactggctgtgcctacaatctctagcttctttccgcctggataccaagtctccttctgtcttgtgatggtcctcctgtttgctgtggacacaggactgtacttttcc

SEQ ID NO: 1827 - DNA, 1434 bp, synthetic construct
  source 1..1434: mol_type = other DNA
atggccttaccagtgaccgccttgctcctgccgctggccttgctgctccacgccgccaggccggaggttcagctgcttgagtctggcggaggactggttcaacctggcggaagcctgagactgtcttgtgccgccagcggcttcacctttagcagctacgccatgagctgggtccgacaggctcctggcaaaggactggaatgggtgtccgtgatctctggctctggcggcagacccaattacgccgattctgtgaagggcagattcaccatcagccgggacaacagcaagaacaccctgtacctccagatgaacagcctgcgcgacgaggataccgccgtgtactattgtgccaaggtggactacagcaactacctgttcttcgactactggggccagggcaccctggtcacagtttctagcggcggaggcggaagtggaggcggaggatctggcggcggaggctctgaaatcgtgctgacacagagccccggcacactgtcactttctccaggcgaaggcgctaccctgtcttgtagagctggacagtctgtgcggagcagctacctcggatggtatcagcagaagcctggacaggcccctcggctgttgatctacggtgcttctagcagagccacaggcatccccgatagattttctggcagcggctccggcaccgacttcaccctgacaatcagcagactggaacccgaggacttcgccgtgtattactgccagcagtacggctacagccctcctacatttggcggaggcaccaagctggaaatcaagacgcgtggaatgaggactgaggatcttcccaaagctgtcgtctttctcgaaccccaatggtatcgggtgctcgaaaaagactctgtgacactgaaatgccaaggggcctactctcccgaggacaactccacacagtggtttcataatgagtccctcatcagctctcaggccagctcttatttcattgatgccgctacagtggacgactccggcgagtatcggtgtcagaccaatctgtctacactgtctgaccccgtgcagcttgaggtccacattggatggttgctcttgcaagccccacgctgggttttcaaagaggaagatccaatccatctgcggtgccacagctggaaaaacaccgctctccacaaagtcacatacctgcaaaatggcaaaggacgcaaatacttccatcacaattccgatttttacattccgaaggctaccctgaaagacagcggcagctatttctgccggggactcgtcggctccaagaatgtgtcctccgaaaccgtgaatatcacgattacccaaggactggctgtgcctacaatctctagcttctttccgcctggataccaagtctccttctgtcttgtgatggtcctcctgtttgctgtggacacaggactgtacttttcc

SEQ ID NO: 1828 - DNA, 1443 bp, synthetic construct
  source 1..1443: mol_type = other DNA
atggccttaccagtgaccgccttgctcctgccgctggccttgctgctccacgccgccaggccggacatcgtgctgacacagagccctccaagcctggctatgagcctgggaaagagagccaccatcagctgtagagccagcgagagcgtgacaatcctgggctctcacctgatccactggtatcagcagaagcccggccagcctcctacactgctgattcagctggcctccaatgtgcagacaggcgtgccagccagattttctggcagcggcagcagaaccgacttcaccctgaccattgatcccgtggaagaggacgacgtggccgtgtactactgcctccagagcagaacaatccccagaacctttggcggaggcaccaagctggaaatcaagggcagcacaagcggcagcggaaagcctggatctggcgagggatctaccaagggacagatccagctggtgcagtctggccccgagctgaagaaacctggcgagacagtgaagatcagctgcaaggccagcggctacaccttcaccgactacagcatcaactgggtcaagagagcccctggcaagggcctgaaatggatgggctggatcaacaccgaaaccagagagcccgcctacgcctacgacttcagaggcagattcgccttcagcctggaaaccagcgccagcacagcctacctccagatcaacaacctgaagtacgaggacaccgccacctacttttgcgccctggactacagctacgctatggactattggggccagggcaccagcgtgacagtctcttctacgcgtggaatgaggactgaggatcttcccaaagctgtcgtctttctcgaaccccaatggtatcgggtgctcgaaaaagactctgtgacactgaaatgccaaggggcctactctcccgaggacaactccacacagtggtttcataatgagtccctcatcagctctcaggccagctcttatttcattgatgccgctacagtggacgactccggcgagtatcggtgtcagaccaatctgtctacactgtctgaccccgtgcagcttgaggtccacattggatggttgctcttgcaagccccacgctgggttttcaaagaggaagatccaatccatctgcggtgccacagctggaaaaacaccgctctccacaaagtcacatacctgcaaaatggcaaaggacgcaaatacttccatcacaattccgatttttacattccgaaggctaccctgaaagacagcggcagctatttctgccggggactcgtcggctccaagaatgtgtcctccgaaaccgtgaatatcacgattacccaaggactggctgtgcctacaatctctagcttctttccgcctggataccaagtctccttctgtcttgtgatggtcctcctgtttgctgtggacacaggactgtacttttcc

SEQ ID NO: 1829 - DNA, 1443 bp, synthetic construct
  source 1..1443: mol_type = other DNA
atggccttaccagtgaccgccttgctcctgccgctggccttgctgctccacgccgccaggccggacatccagatgacacagagccctagcagcctgtctgccagcgtgggagacagagtgaccatcacctgtagagccagcagcagcgtgtcctacatgcactggtatcagcagaagcccggcaaggcccctaagctgctgatctacgccaccagcaatctggcctctggcgtgccaagcagattttctggcagcggctctggcaccgacttcaccctgacaatatccagcctccagcctgaggacttcgccacctactactgccagcagtggaccttcaatcctcctaccttcggccagggcaccaagctggaaatcaagagaacagtggctgccggcggaggcggaagtggaggcggaggatctggcggcggaggctctcaagttcagctggttcagtctggggccgaagtgaagaaacctggggcctctgtgaaggtgtcctgcaaggcttccggctacacctttaccagctacaatatgcactgggtccgacaggctcccggccagagacttgaatggatgggcggcatctaccccggcaatggcgacacctcctacaaccagaaattcaagggccgcgtgacaatcaccagagacacctctgccagcaccgcctacatggaactgagcagcctgagaagcgaggacaccgccgtgtactactgcgccagatacgactacaactacgctatggactactggggccagggaaccctggtcacagtgtctagtgcttccacgcgtggaatgaggactgaggatcttcccaaagctgtcgtctttctcgaaccccaatggtatcgggtgctcgaaaaagactctgtgacactgaaatgccaaggggcctactctcccgaggacaactccacacagtggtttcataatgagtccctcatcagctctcaggccagctcttatttcattgatgccgctacagtggacgactccggcgagtatcggtgtcagaccaatctgtctacactgtctgaccccgtgcagcttgaggtccacattggatggttgctcttgcaagccccacgctgggttttcaaagaggaagatccaatccatctgcggtgccacagctggaaaaacaccgctctccacaaagtcacatacctgcaaaatggcaaaggacgcaaatacttccatcacaattccgatttttacattccgaaggctaccctgaaagacagcggcagctatttctgccggggactcgtcggctccaagaatgtgtcctccgaaaccgtgaatatcacgattacccaaggactggctgtgcctacaatctctagcttctttccgcctggataccaagtctccttctgtcttgtgatggtcctcctgtttgctgtggacacaggactgtacttttcc

SEQ ID NO: 1830 - DNA, 1428 bp, synthetic construct
  source 1..1428: mol_type = other DNA
atggccttaccagtgaccgccttgctcctgccgctggccttgctgctccacgccgccaggccggagatcgtgctgacacagagccctggcacactgtcactgtctccaggcgaaagagccacactgagctgtagagccagccagagcgtgtccagctcttacctggcttggtatcagcagaagcccggacaggctcccagactgctgatctacggtgcctctagcagagccacaggcatccccgatagattttctggcagcggctccggcaccgacttcaccctgacaatcagcagactggaacccgaggacttcgccgtgtactactgccagcagtaccaccactctccactgacctttggcggaggcaccaaggtggaaatcaagagaggcggaggcggaagtggaggcggaggatctggcggcggaggctctgaagttcagctggttgaatcaggtggcggcctggttcaacctggcggatctctgagactgtcttgtgccgccagcggcttcactttcagcggcagatccatgaactgggtccgacaggcccctggcaaaggactggaatgggtgtcctacatcagcagcgacagccggaccatctactacgccgatagcgtgaagggcagattcaccatctccagagacaacgccaagaacagcctgtacctccagatgaactccctgagagccgaggacacagccgtgtattattgtgccagaggcggccacggctacttcgatctttggggcagaggcaccctggtcaccgtttcttctacgcgtggaatgaggactgaggatcttcccaaagctgtcgtctttctcgaaccccaatggtatcgggtgctcgaaaaagactctgtgacactgaaatgccaaggggcctactctcccgaggacaactccacacagtggtttcataatgagtccctcatcagctctcaggccagctcttatttcattgatgccgctacagtggacgactccggcgagtatcggtgtcagaccaatctgtctacactgtctgaccccgtgcagcttgaggtccacattggatggttgctcttgcaagccccacgctgggttttcaaagaggaagatccaatccatctgcggtgccacagctggaaaaacaccgctctccacaaagtcacatacctgcaaaatggcaaaggacgcaaatacttccatcacaattccgatttttacattccgaaggctaccctgaaagacagcggcagctatttctgccggggactcgtcggctccaagaatgtgtcctccgaaaccgtgaatatcacgattacccaaggactggctgtgcctacaatctctagcttctttccgcctggataccaagtctccttctgtcttgtgatggtcctcctgtttgctgtggacacaggactgtacttttcc

SEQ ID NO: 1831 - DNA, 1437 bp, synthetic construct
  source 1..1437: mol_type = other DNA
atggccttaccagtgaccgccttgctcctgccgctggccttgctgctccacgccgccaggccggagatcgtgctgacacagagccctggcacactgtcactgtctccaggcgaaagagccacactgagctgtagagccagccagagcgtgtccagcgattacctggcttggtatcagcagaagcccggacaggctcccagactgctgatctatggtgcctctcggagagccacaggcatccccgatagattttctggcagcggctccggcaccgacttcaccctgacaatcagcagactggaacccgaggacttcgccgtgtactactgccagcagtacgtgtcctactggacctttggcggaggcaccaaggtggaaatcaagagaggcggaggcggaagtggaggcggaggatctggcggcggaggctctcaagttcagctggttgaatcaggcggaggcgttgtgcagcctggcagaagtctgagactgtcttgtgccgccagcggcttcaccttcagcagctatggaatgcactgggtccgacaggcccctggcaaaggacttgaatgggtggccggcatttggtgggacggcagcaatgagaagtacgccgacagcgtgaagggcagattcaccatctccagagacaacagcaagaacaccctgtacctccagatgaacagcctgagagccgaggacacagccgtgtattattgcgccaaagaggccccttactacgccaaggactacatggacgtgtggggcaagggcaccacagtgactgtctcttctacgcgtggaatgaggactgaggatcttcccaaagctgtcgtctttctcgaaccccaatggtatcgggtgctcgaaaaagactctgtgacactgaaatgccaaggggcctactctcccgaggacaactccacacagtggtttcataatgagtccctcatcagctctcaggccagctcttatttcattgatgccgctacagtggacgactccggcgagtatcggtgtcagaccaatctgtctacactgtctgaccccgtgcagcttgaggtccacattggatggttgctcttgcaagccccacgctgggttttcaaagaggaagatccaatccatctgcggtgccacagctggaaaaacaccgctctccacaaagtcacatacctgcaaaatggcaaaggacgcaaatacttccatcacaattccgatttttacattccgaaggctaccctgaaagacagcggcagctatttctgccggggactcgtcggctccaagaatgtgtcctccgaaaccgtgaatatcacgattacccaaggactggctgtgcctacaatctctagcttctttccgcctggataccaagtctccttctgtcttgtgatggtcctcctgtttgctgtggacacaggactgtacttttcc

SEQ ID NO: 1832 - DNA, 1437 bp, synthetic construct
  source 1..1437: mol_type = other DNA
atggccttaccagtgaccgccttgctcctgccgctggccttgctgctccacgccgccaggccggacatccagatgacacagagccctagcagcctgtctgccagcgtgggagacagagtgaccatcacctgtagagccagccaggacgtgaacacagccgtggcttggtatcagcagaagcctggcaaggcccctaagctgctgatctacagcgccagctttctgtacagcggcgtgcccagcagattcagcggaagcagaagcggcaccgacttcaccctgacaatatccagcctccagcctgaggacttcgccacctactactgccagcagcactacaccacacctccaacattcggccagggcaccaaggtggaaatcaagagaacaggcggaggcggaagtggaggcggaggatctggcggcggaggctctgaagtgcagctggttgaatcaggtggcggcctggttcaacctggcggatctctgagactgagctgtgccgccagcggcttcaacatcaaggacacctacatccactgggtccgacaggcccctggcaaaggacttgaatgggtcgccagaatctaccccaccaacggctacaccagatacgccgactctgtgaagggcagattcaccatcagcgccgacaccagcaagaacaccgcctacctccagatgaactccctgagagccgaggacaccgccgtgtactactgtagcagatggggcggctggggcttctacgctatggattattggggccagggaaccctggtcaccgtgtcatctacgcgtggaatgaggactgaggatcttcccaaagctgtcgtctttctcgaaccccaatggtatcgggtgctcgaaaaagactctgtgacactgaaatgccaaggggcctactctcccgaggacaactccacacagtggtttcataatgagtccctcatcagctctcaggccagctcttatttcattgatgccgctacagtggacgactccggcgagtatcggtgtcagaccaatctgtctacactgtctgaccccgtgcagcttgaggtccacattggatggttgctcttgcaagccccacgctgggttttcaaagaggaagatccaatccatctgcggtgccacagctggaaaaacaccgctctccacaaagtcacatacctgcaaaatggcaaaggacgcaaatacttccatcacaattccgatttttacattccgaaggctaccctgaaagacagcggcagctatttctgccggggactcgtcggctccaagaatgtgtcctccgaaaccgtgaatatcacgattacccaaggactggctgtgcctacaatctctagcttctttccgcctggataccaagtctccttctgtcttgtgatggtcctcctgtttgctgtggacacaggactgtacttttcc

SEQ ID NO: 1833 - DNA, 1422 bp, synthetic construct
  source 1..1422: mol_type = other DNA
atggccttaccagtgaccgccttgctcctgccgctggccttgctgctccacgccgccaggccgcaggtgcagctggttgaatctggcggcggacttgtgaagcctggcggatctctgagactgagctgtgccgccagcggcttcaccttcagcgactactacatgacctggatcagacaggcccctggcaaaggactggaatggatcagctacatcagcagcagcggcagcaccatctactacgccgatagcgtgaagggcagattcaccatcagccgggacaacgccaagaacagcctgtacctccagatgaactccctgagagccgaggacaccgccgtgtactactgcgccagagacagaaacagccacttcgactattggggccagggcaccctggtcacagtttctagcggcggaggcggaagtggaggcggaggatctggcggcggaggctctgatattcagatgacacagagccccagcagcgtgtccgcctctgtgggagatagagtgaccatcacctgtagagccagccagggcatcacaagatggctggcctggtatcagcagaagccaggcaaggcccctaagctgctgatctacgccgcttctgtgctccagagcggagtgcctagcagattttctggcagcggctccggcaccgatttcaccctgacaatatccagcctccagcctgaggacttcgccacctactactgccagcagagcaacagcttccccagaacattcggacagggcaccaaggtggaaatcaagacgcgtggaatgaggactgaggatcttcccaaagctgtcgtctttctcgaaccccaatggtatcgggtgctcgaaaaagactctgtgacactgaaatgccaaggggcctactctcccgaggacaactccacacagtggtttcataatgagtccctcatcagctctcaggccagctcttatttcattgatgccgctacagtggacgactccggcgagtatcggtgtcagaccaatctgtctacactgtctgaccccgtgcagcttgaggtccacattggatggttgctcttgcaagccccacgctgggttttcaaagaggaagatccaatccatctgcggtgccacagctggaaaaacaccgctctccacaaagtcacatacctgcaaaatggcaaaggacgcaaatacttccatcacaattccgatttttacattccgaaggctaccctgaaagacagcggcagctatttctgccggggactcgtcggctccaagaatgtgtcctccgaaaccgtgaatatcacgattacccaaggactggctgtgcctacaatctctagcttctttccgcctggataccaagtctccttctgtcttgtgatggtcctcctgtttgctgtggacacaggactgtacttttcc

SEQ ID NO: 1834 - DNA, 1422 bp, synthetic construct
  source 1..1422: mol_type = other DNA
atggccttaccagtgaccgccttgctcctgccgctggccttgctgctccacgccgccaggccgcaggtgcagctggttgaatctggcggcggacttgtgaagcctggcggatctctgagactgagctgtgccgccagcggcttcaccttcagcgatcactacatgagctggatcagacaggcccctggcaaaggactggaatggttcagctacatcagcagcagcggcggcatcatctactacgccgatagcgtgaagggcagattcaccatcagccgggacaacgccaagaacagcctgtacctccagatgaactccctgagagccgaggacaccgccgtgtactactgtgccagagatgtgggcagccacttcgactattggggccagggaacactggtcaccgtttctagcggcggaggcggaagtggaggcggaggatctggcggcggaggctctgatattcagatgacacagagccccagcagcgtgtccgcctctgtgggagatagagtgaccatcacctgtcgggccagccaggacattagcagatggctggcttggtatcagcagaagccaggcaaggcccctaagctgctgatttcagccgccagcagactccagagcggagtgcctagcagattttctggctctggcagcggcaccgacttcaccctgacaatatctagcctccagcctgaggacttcgccatctactattgccagcaggccaagagcttccccagaacatttggacagggcaccaaggtggaaatcaagacgcgtggaatgaggactgaggatcttcccaaagctgtcgtctttctcgaaccccaatggtatcgggtgctcgaaaaagactctgtgacactgaaatgccaaggggcctactctcccgaggacaactccacacagtggtttcataatgagtccctcatcagctctcaggccagctcttatttcattgatgccgctacagtggacgactccggcgagtatcggtgtcagaccaatctgtctacactgtctgaccccgtgcagcttgaggtccacattggatggttgctcttgcaagccccacgctgggttttcaaagaggaagatccaatccatctgcggtgccacagctggaaaaacaccgctctccacaaagtcacatacctgcaaaatggcaaaggacgcaaatacttccatcacaattccgatttttacattccgaaggctaccctgaaagacagcggcagctatttctgccggggactcgtcggctccaagaatgtgtcctccgaaaccgtgaatatcacgattacccaaggactggctgtgcctacaatctctagcttctttccgcctggataccaagtctccttctgtcttgtgatggtcctcctgtttgctgtggacacaggactgtacttttcc

SEQ ID NO: 1835 - DNA, 1458 bp, synthetic construct
  source 1..1458: mol_type = other DNA
atggccttaccagtgaccgccttgctcctgccgctggccttgctgctccacgccgccaggccgcaggtgcagctggttgaatctggtggcggagtggtgcagtctggcagaagcctgagactgtcttgtgccgccagcggcttcaccttcagaaactacggaatgcactgggtccgacaggcccctggcaaaggacttgaatgggtcgccgtgatttggtacgacggcagcgacaagtactacgccgattctgtgcggggcagattcaccatcagccgggacaacagcaagaacaccctgtacctccagatgaacagcctgagagccgaggacaccgccgtgtactactgtgccagagatggctacgacatcctgaccggcaatcccagagacttcgactattggggccagggcacactggtcacagtttctagcggcggaggcggaagtggaggcggaggatctggcggcggaggctctgataccgtgatgacccagacacctctgagcagccacgtgacacttggacagcctgccagcatcagctgtagaagcagccagagcctggtgcacagcgacggcaatacctacctgtcttggctccagcagaggccaggacagcctcctagactgctgatctaccggatcagcagacggttcagcggcgtgcccgatagattttctggaagcggagccggcaccgacttcaccctggaaatcagcagagtggaagccgaggatgtgggcgtctactactgtatgcagagcacccacgtgccacggacctttggacagggcaccaaggtggaaatcaagacgcgtggaatgaggactgaggatcttcccaaagctgtcgtctttctcgaaccccaatggtatcgggtgctcgaaaaagactctgtgacactgaaatgccaaggggcctactctcccgaggacaactccacacagtggtttcataatgagtccctcatcagctctcaggccagctcttatttcattgatgccgctacagtggacgactccggcgagtatcggtgtcagaccaatctgtctacactgtctgaccccgtgcagcttgaggtccacattggatggttgctcttgcaagccccacgctgggttttcaaagaggaagatccaatccatctgcggtgccacagctggaaaaacaccgctctccacaaagtcacatacctgcaaaatggcaaaggacgcaaatacttccatcacaattccgatttttacattccgaaggctaccctgaaagacagcggcagctatttctgccggggactcgtcggctccaagaatgtgtcctccgaaaccgtgaatatcacgattacccaaggactggctgtgcctacaatctctagcttctttccgcctggataccaagtctccttctgtcttgtgatggtcctcctgtttgctgtggacacaggactgtacttttcc

SEQ ID NO: 1836 - DNA, 1437 bp, synthetic construct
  source 1..1437: mol_type = other DNA
atggccttaccagtgaccgccttgctcctgccgctggccttgctgctccacgccgccaggccggaggtgcagctggttgaatctggcggaggactggttcagcctggcggatctctgagactgtcttgtgccgccagcggcttcccattcagcagctacgatatgcactgggtccgacaggccacaggcaaaggactggaatgggtgtccgccatcggaacagccggcgctacctattatcccggctctgtgaagggcagattcaccatcagcagagagaacgccaagaacagcctgtacctccagatgaactccctgagagccggcgataccgccgtgtactattgtgccagaggcgactacgtgtggggcacctacagacccctgttcgattattggggccagggcaccctggtcacagtttctagtggcggaggcggaagtggaggcggaggatctggcggcggaggctctgatattcagctgactcagagccccagcttcctgtctgcctctgtgggcgacagagtgaccatcacatgttgggccagccagggcatcaacaactacctggcctggtatcagcagaagcccggcaaggctcctaagctgctgatctacgccgccagcacactgcaaacaggcgtgccaagcagattttccggctctggcagcggcaccgagttcaccctgacaatatctagcctccagcctgaggacttcgccacctactactgccagcagctgaacagctaccctctgacctttggaggcggcaccaaggtggaaatcaagacgcgtggaatgaggactgaggatcttcccaaagctgtcgtctttctcgaaccccaatggtatcgggtgctcgaaaaagactctgtgacactgaaatgccaaggggcctactctcccgaggacaactccacacagtggtttcataatgagtccctcatcagctctcaggccagctcttatttcattgatgccgctacagtggacgactccggcgagtatcggtgtcagaccaatctgtctacactgtctgaccccgtgcagcttgaggtccacattggatggttgctcttgcaagccccacgctgggttttcaaagaggaagatccaatccatctgcggtgccacagctggaaaaacaccgctctccacaaagtcacatacctgcaaaatggcaaaggacgcaaatacttccatcacaattccgatttttacattccgaaggctaccctgaaagacagcggcagctatttctgccggggactcgtcggctccaagaatgtgtcctccgaaaccgtgaatatcacgattacccaaggactggctgtgcctacaatctctagcttctttccgcctggataccaagtctccttctgtcttgtgatggtcctcctgtttgctgtggacacaggactgtacttttcc

SEQ ID NO: 1837 - DNA, 1428 bp, synthetic construct
  source 1..1428: mol_type = other DNA
atggccttaccagtgaccgccttgctcctgccgctggccttgctgctccacgccgccaggccgcaggttcagctgcaagagtctggccctggcctggtcaagcctagcgaaacactgagcctgacctgtaccgtgtctggggccagcatcagcagcttctactggtcctggatcagacagcctcctggcaaaggactggaatggatcggctacatctactacagcggcaccaccaactacaaccccagcctgaagtccagagtgaccatcagcgtggacaccagcaagaaccagttctccctgaagctgagcagcgtgacagccgccgatacagccgtgtactactgtgccagaattgccgtggccggcttcttcttcgactattggggccagggcaccctggtcacagtttctagcggcggaggcggaagtggaggcggaggatctggcggcggaggctctgaaattgtgctgacacagagccccggcacactgtcactttctccaggcgaaagagccacactgagctgtagagccagccagagcgtgaacaagaactacctggcttggtatcagcagaagcccggacaggctcccagactgctgatctacggtgcctctagcagagccacaggcatccccgatagattttctggcagcggctccggcaccgacttcaccctgacaatcagcagactggaacccgaggacttcgccgtgtattattgccagcagtacgacagaagccctctgacctttggaggcggcaccaaggtggaaatcaagacgcgtggaatgaggactgaggatcttcccaaagctgtcgtctttctcgaaccccaatggtatcgggtgctcgaaaaagactctgtgacactgaaatgccaaggggcctactctcccgaggacaactccacacagtggtttcataatgagtccctcatcagctctcaggccagctcttatttcattgatgccgctacagtggacgactccggcgagtatcggtgtcagaccaatctgtctacactgtctgaccccgtgcagcttgaggtccacattggatggttgctcttgcaagccccacgctgggttttcaaagaggaagatccaatccatctgcggtgccacagctggaaaaacaccgctctccacaaagtcacatacctgcaaaatggcaaaggacgcaaatacttccatcacaattccgatttttacattccgaaggctaccctgaaagacagcggcagctatttctgccggggactcgtcggctccaagaatgtgtcctccgaaaccgtgaatatcacgattacccaaggactggctgtgcctacaatctctagcttctttccgcctggataccaagtctccttctgtcttgtgatggtcctcctgtttgctgtggacacaggactgtacttttcc

SEQ ID NO: 1838 - DNA, 1455 bp, synthetic construct
  source 1..1455: mol_type = other DNA
atggccttaccagtgaccgccttgctcctgccgctggccttgctgctccacgccgccaggccgcaggttcagctggttcagtctggggccgaagtgaagaaacctggggcctctgtgaaggtgtcctgcaaggccagcggctacacctttaccaactactacatgcactgggtccgacaggcccctggactgggacttgagtggatgggcatcatcaaccctagcgacggcagcacaagctacgcccagaaattccagggcagagtgaccatgaccagagacaccagcaccaacaccgtgtacatggacctgagcagcctgagaagcgaggacaccgccgtgtactattgtgccagaggcggcaacagcgccttctacagctactacgacatggacgtgtggggccagggcaccacagtgacagtttctagcggcggaggcggaagtggaggcggaggatctggcggcggaggctctgatgtggtcatgacacagacccctctgagcctgcctgtgacacttggacagcctgccagcatcagctgtagatccagccagagcctggtgtacagagatggcaacacctacctgagctggttccagcagaggcctggacagtctcctcggcggctgatctacaaggtgtccaactggcagagcggcgtgcccgatagattttctggcggtggcagcggcaccgacttcaccctgaagatcagcagagtggaagccgaggacgtgggcgtgtactactgtatgcagggcacacactggcctccaacattcggccagggaacaaaggtggaaatcaagacgcgtggaatgaggactgaggatcttcccaaagctgtcgtctttctcgaaccccaatggtatcgggtgctcgaaaaagactctgtgacactgaaatgccaaggggcctactctcccgaggacaactccacacagtggtttcataatgagtccctcatcagctctcaggccagctcttatttcattgatgccgctacagtggacgactccggcgagtatcggtgtcagaccaatctgtctacactgtctgaccccgtgcagcttgaggtccacattggatggttgctcttgcaagccccacgctgggttttcaaagaggaagatccaatccatctgcggtgccacagctggaaaaacaccgctctccacaaagtcacatacctgcaaaatggcaaaggacgcaaatacttccatcacaattccgatttttacattccgaaggctaccctgaaagacagcggcagctatttctgccggggactcgtcggctccaagaatgtgtcctccgaaaccgtgaatatcacgattacccaaggactggctgtgcctacaatctctagcttctttccgcctggataccaagtctccttctgtcttgtgatggtcctcctgtttgctgtggacacaggactgtacttttcc

SEQ ID NO: 1839 - DNA, 1416 bp, synthetic construct
  source 1..1416: mol_type = other DNA
atggccttaccagtgaccgccttgctcctgccgctggccttgctgctccacgccgccaggccgcaggttcagctccagcagtctggacctgagctggttaagcctggcgcttctgtgcggatctcttgcaaggccagcggctacaccttcaccacctactacatccactgggtcaagcagcggcctggacagggactcgaatggatcggctggatctaccccggcaacgtgaacaccaactacaacgagaagttcaagggcaaagccacactgaccgccgacaagagcagcagcacagcctacatgcagctgaccagcctgacctctgaggacagcgccgtgtacttttgtgccagaggcgtgtactacttcgactactggggccagggcaccatcctgacagtttctagcggcggaggcggaagtggaggcggaggatctggcggcggaggctctatcgtgatgacccagactcctaagttcctgctggtgtctgccggcgacagagtgaccatcacctgtaaagccagccagagcgtgaacaacgacgtgtcctggttccagcagaagcccggccaatctcctacactgctgatctactacgccagcaacagatacaccggcgtgcccgatagattcaccggctctggctacggcaccgacttcacctttaccatcagcaccgtgcaggccgaggacctggctgtgtacttctgccagcaagactacagcagcccttacacctttggaggcggcaccaagctggaaatcaagacgcgtggaatgaggactgaggatcttcccaaagctgtcgtctttctcgaaccccaatggtatcgggtgctcgaaaaagactctgtgacactgaaatgccaaggggcctactctcccgaggacaactccacacagtggtttcataatgagtccctcatcagctctcaggccagctcttatttcattgatgccgctacagtggacgactccggcgagtatcggtgtcagaccaatctgtctacactgtctgaccccgtgcagcttgaggtccacattggatggttgctcttgcaagccccacgctgggttttcaaagaggaagatccaatccatctgcggtgccacagctggaaaaacaccgctctccacaaagtcacatacctgcaaaatggcaaaggacgcaaatacttccatcacaattccgatttttacattccgaaggctaccctgaaagacagcggcagctatttctgccggggactcgtcggctccaagaatgtgtcctccgaaaccgtgaatatcacgattacccaaggactggctgtgcctacaatctctagcttctttccgcctggataccaagtctccttctgtcttgtgatggtcctcctgtttgctgtggacacaggactgtacttttcc

SEQ ID NO: 1840 - DNA, 1425 bp, synthetic construct
  source 1..1425: mol_type = other DNA
atggccttaccagtgaccgccttgctcctgccgctggccttgctgctccacgccgccaggccgcaggttcagctgcaagagtctggccctggcctggtcaagcctagccaaacactgagcctgacctgtaccgtgtctggcggcagcatcaacaacaacaattactactggacctggatcagacagcaccccggcaaaggactggaatggatcggctacatctactacagcggcagcaccttctacaaccccagcctgaagtccagagtgaccatcagcgtggacaccagcaagacccagttctccctgaagctgagcagcgtgacagccgccgatacagccgtgtactactgcgccagagaagataccatgaccggcctggatgtgtggggccagggaacaacagtgacagtgtctagcggcggaggcggaagtggaggcggaggatctggcggcggaggctctgacattcagatgacacagagccctagcagcctgagcgcctctgtgggagacagagtgacaattacctgtcgggccagccagtctatcaacaactacctgaactggtatcagcagaagcccggcaaggcccctacactgctgatctatgccgccagctctctccagagcggagtgcctagcagattcagcggaagcagaagcggcaccgacttcaccctgacaatatccagcctccagcctgaggacttcgccgcctacttttgccagcagacctacagcaaccccacctttggccagggcaccaaggtggaagtgaagacgcgtggaatgaggactgaggatcttcccaaagctgtcgtctttctcgaaccccaatggtatcgggtgctcgaaaaagactctgtgacactgaaatgccaaggggcctactctcccgaggacaactccacacagtggtttcataatgagtccctcatcagctctcaggccagctcttatttcattgatgccgctacagtggacgactccggcgagtatcggtgtcagaccaatctgtctacactgtctgaccccgtgcagcttgaggtccacattggatggttgctcttgcaagccccacgctgggttttcaaagaggaagatccaatccatctgcggtgccacagctggaaaaacaccgctctccacaaagtcacatacctgcaaaatggcaaaggacgcaaatacttccatcacaattccgatttttacattccgaaggctaccctgaaagacagcggcagctatttctgccggggactcgtcggctccaagaatgtgtcctccgaaaccgtgaatatcacgattacccaaggactggctgtgcctacaatctctagcttctttccgcctggataccaagtctccttctgtcttgtgatggtcctcctgtttgctgtggacacaggactgtacttttcc

SEQ ID NO: 1841 - DNA, 1440 bp, synthetic construct
  source 1..1440: mol_type = other DNA
atggccttaccagtgaccgccttgctcctgccgctggccttgctgctccacgccgccaggccgagctacgagctgacacagcctccaagcgtgtccgtgtctcctggacagacagccagcatcacctgtagcggcgataagctgggcgataagtacgccagctggtatcagcagaagcccggccagtctcctgtgctggtcatctaccaggacaacagaaggcccagcggcatccccgagagattcagcggcagcaatagcggcaataccgccacactgaccatcagcggcacccaggctatggacgaggccgactactattgccaggcttgggacagcgacacctacgtgttcggcaccggcaccaaagtgacagtgcttggacaaggcggaggcggaagtggaggcggaggatctggcggcggaggctctgaagttcagctggttcagagcggagccgaagtgaagaaacctggggcctctgtgaaggtgtcctgcaaggcttccggcgataccttcaagcggtactacgtgcactgggtccgacaggctccaggacaaggactggaatggatgggcatcatcaaccccagcggcgtgtccacaacatacgcccagaaattccagggcagagtgaccatgaccagagacaccagcacctccaccgtgtacatggaactgagcagcctgagaagcgaggacaccgccgtgtactactgtgctgaagtgcgcggcagcggcttcaactacttcggcatggatgtgtggggccagggcacactggttaccgtttcttctacgcgtggaatgaggactgaggatcttcccaaagctgtcgtctttctcgaaccccaatggtatcgggtgctcgaaaaagactctgtgacactgaaatgccaaggggcctactctcccgaggacaactccacacagtggtttcataatgagtccctcatcagctctcaggccagctcttatttcattgatgccgctacagtggacgactccggcgagtatcggtgtcagaccaatctgtctacactgtctgaccccgtgcagcttgaggtccacattggatggttgctcttgcaagccccacgctgggttttcaaagaggaagatccaatccatctgcggtgccacagctggaaaaacaccgctctccacaaagtcacatacctgcaaaatggcaaaggacgcaaatacttccatcacaattccgatttttacattccgaaggctaccctgaaagacagcggcagctatttctgccggggactcgtcggctccaagaatgtgtcctccgaaaccgtgaatatcacgattacccaaggactggctgtgcctacaatctctagcttctttccgcctggataccaagtctccttctgtcttgtgatggtcctcctgtttgctgtggacacaggactgtacttttcc

SEQ ID NO: 1842 - DNA, 1437 bp, synthetic construct
  source 1..1437: mol_type = other DNA
atggccttaccagtgaccgccttgctcctgccgctggccttgctgctccacgccgccaggccggaggttcagctgcttgagtctggcggaggactggttcaacctggcggaagcctgagactgtcttgtgccgccagcggcttcacctttagcagctacgccatgagctgggtccgacaggctcctggcaaaggactggaagtggtggtgtctgccatttctggcggcggaggcagaacctactacgccgattctgtgaagggcagattcaccatcagccgggacaacagcaagaacaccctgtacctgcagatgaacagcctgagagccgaggacaccgccgtgtactactgtgccagagaagagatggccttccgggcctacagattcgacatctggggccagggaaccctggtcacagtttctagcggcggaggcggaagtggaggcggaggatctggcggcggaggctctgatattcagatgacacagagccccagcagcctgtctgcctctgtgggagacagagtgaccatcacctgtagagccagccagagcatcagcagctacctgaactggtatcagcagaagcccggcaaggcccctaaactgctgatctatgccgcctccagtctgcagagcggagtgcctagcagattttctggctctggcagcggcaccgacttcaccctgacaatatctagcctgcagcctgaggacttcgccacctactactgccagcagagctacatcacccctctgacattcggtggcggcaccaaggtggaaatcaagacgcgtggaatgaggactgaggatcttcccaaagctgtcgtctttctcgaaccccaatggtatcgggtgctcgaaaaagactctgtgacactgaaatgccaaggggcctactctcccgaggacaactccacacagtggtttcataatgagtccctcatcagctctcaggccagctcttatttcattgatgccgctacagtggacgactccggcgagtatcggtgtcagaccaatctgtctacactgtctgaccccgtgcagcttgaggtccacattggatggttgctcttgcaagccccacgctgggttttcaaagaggaagatccaatccatctgcggtgccacagctggaaaaacaccgctctccacaaagtcacatacctgcaaaatggcaaaggacgcaaatacttccatcacaattccgatttttacattccgaaggctaccctgaaagacagcggcagctatttctgccggggactcgtcggctccaagaatgtgtcctccgaaaccgtgaatatcacgattacccaaggactggctgtgcctacaatctctagcttctttccgcctggataccaagtctccttctgtcttgtgatggtcctcctgtttgctgtggacacaggactgtacttttcc

SEQ ID NO: 1843 - DNA, 1461 bp, synthetic construct
  source 1..1461: mol_type = other DNA
atggccttaccagtgaccgccttgctcctgccgctggccttgctgctccacgccgccaggccggacatcgtgctgacacagagccctgcttctctggccgtgtctcttggacagggcgctaccatcagctgtagagccagcaagagcgtgtccaccagcggctacacctacatgcactggtatcagcagaagcccggccagcctcctaagctgctgatctacctggcctccaacctggaaagcggagtgcctgccagattttctggcagcggctctggcaccgacttcaccctgaatatccatcctgtggaagaagaggacgccgccacctactactgtcagcactctggcgaactgccacctagctttggcggaggcaccaagctggaaatcaagagagctggcggaggcggaagtggaggcggaggatctggcggcggaggctctgaagtgcagctggtggaatctggcggcgaccttgtgaaacctggcggctctctgaagctgagctgtgccgtgtccggcttcacctttagcagctacggcatgagctgggtccgacagacccctgacaagagactggaatgggtcgccacagtgtctagcggcggcacctacacatattaccccgacagcgtgaagggcagattcaccatcagccgggacaacgccaagaacaccctgtacctccagatgagcagcctgaagtccgaggacagcgccatgtactactgcgccagacaccggggcaattactacgccacctattattacgctatggactactggggccagggcaccagcgtgacagtttcttctacgcgtggaatgaggactgaggatcttcccaaagctgtcgtctttctcgaaccccaatggtatcgggtgctcgaaaaagactctgtgacactgaaatgccaaggggcctactctcccgaggacaactccacacagtggtttcataatgagtccctcatcagctctcaggccagctcttatttcattgatgccgctacagtggacgactccggcgagtatcggtgtcagaccaatctgtctacactgtctgaccccgtgcagcttgaggtccacattggatggttgctcttgcaagccccacgctgggttttcaaagaggaagatccaatccatctgcggtgccacagctggaaaaacaccgctctccacaaagtcacatacctgcaaaatggcaaaggacgcaaatacttccatcacaattccgatttttacattccgaaggctaccctgaaagacagcggcagctatttctgccggggactcgtcggctccaagaatgtgtcctccgaaaccgtgaatatcacgattacccaaggactggctgtgcctacaatctctagcttctttccgcctggataccaagtctccttctgtcttgtgatggtcctcctgtttgctgtggacacaggactgtacttttcc

SEQ ID NO: 1844 - DNA, 1443 bp, synthetic construct
  source 1..1443: mol_type = other DNA
atggccttaccagtgaccgccttgctcctgccgctggccttgctgctccacgccgccaggccggacatccagatgacacagagccctagcagcctgtctgccagcgtgggagacagagtgaccatcacatgtagcgccagccagggcatcagaaactacctgaactggtatcagcagaaacccggcaaggtgcccaagctgctgatctactacaccagcagactgcacagcggcgtgcccagcagattttctggctctggcagcggcaccgacttcaccctgacaatatctagcctccagcctgaggacgtggcaacctactactgtcagcagtacggcaagctgccctacacattcggccagggcaccaagctggaaatcaagagaacagtggctgccggcggaggcggaagtggaggcggaggatctggcggcggaggctctgaagttcagctggttgaatcaggcggcggactggttcaacctggcggatctctgagactgagctgtgccgccagcggcttcacattttccgacgcctggatggactgggtccgacaggctcctggaaaaggactggaatgggtcggagagatccggtccaaagtgaacaaccacgaaacctactatgccgagagcgtgaagggcagattcaccatcagccgggacgacagcaagaacagcctgtacctccagatgaactccctgaaaaccgaggacaccgccgtgtactactgcgccagaaacgactacttcgactactggggccagggaaccaccgtgacagtgtctagtgcttccacgcgtggaatgaggactgaggatcttcccaaagctgtcgtctttctcgaaccccaatggtatcgggtgctcgaaaaagactctgtgacactgaaatgccaaggggcctactctcccgaggacaactccacacagtggtttcataatgagtccctcatcagctctcaggccagctcttatttcattgatgccgctacagtggacgactccggcgagtatcggtgtcagaccaatctgtctacactgtctgaccccgtgcagcttgaggtccacattggatggttgctcttgcaagccccacgctgggttttcaaagaggaagatccaatccatctgcggtgccacagctggaaaaacaccgctctccacaaagtcacatacctgcaaaatggcaaaggacgcaaatacttccatcacaattccgatttttacattccgaaggctaccctgaaagacagcggcagctatttctgccggggactcgtcggctccaagaatgtgtcctccgaaaccgtgaatatcacgattacccaaggactggctgtgcctacaatctctagcttctttccgcctggataccaagtctccttctgtcttgtgatggtcctcctgtttgctgtggacacaggactgtacttttcc

SEQ ID NO: 1845 - DNA, 1467 bp, synthetic construct
  source 1..1467: mol_type = other DNA
atggccttaccagtgaccgccttgctcctgccgctggccttgctgctccacgccgccaggccggaggttcagctgcaagagtctggggccgaagtgaagaaacctggcagcagcgtgaaggtgtcctgcaaggccagcggcttcaacatcaaggacacctacatgcactgggtccgacaggcccctggacaaggacttgagtggatgggcagaatcgaccccgccaacggcaacagcaaatacgtgcccaagttccagggcagagtgaccatcacagccgacgagagcacaagcaccgcctacatggaactgagcagcctgagaagcgaggacaccgccgtgtactactgtgcccctttcggctactacgtgtccgactacgccatggcctattggggccagggaaccaccgtgacagtgtctagtgcatctggcggaggcggaagtggaggcggaggatctggcggcggaggctctgacatcgtgatgacacagagccccgatagcctggccgtgtctctgggagaaagagccaccatcaactgtagagccggcgagagcgtggacatcttcggcgtgggatttctgcactggtatcagcagaagcccggccagcctcctaagctgctgatctacagagccagcaacctggaaagcggcgtgcccgatagattttctggcagcggctctggcaccgacttcaccctgacaatcagacctctccaggccgaggatgtggccgtgtattattgccagcagaccaacgaggacccctacacatttggacagggcaccaagctggaaatcaagagaacagtggccgccacgcgtggaatgaggactgaggatcttcccaaagctgtcgtctttctcgaaccccaatggtatcgggtgctcgaaaaagactctgtgacactgaaatgccaaggggcctactctcccgaggacaactccacacagtggtttcataatgagtccctcatcagctctcaggccagctcttatttcattgatgccgctacagtggacgactccggcgagtatcggtgtcagaccaatctgtctacactgtctgaccccgtgcagcttgaggtccacattggatggttgctcttgcaagccccacgctgggttttcaaagaggaagatccaatccatctgcggtgccacagctggaaaaacaccgctctccacaaagtcacatacctgcaaaatggcaaaggacgcaaatacttccatcacaattccgatttttacattccgaaggctaccctgaaagacagcggcagctatttctgccggggactcgtcggctccaagaatgtgtcctccgaaaccgtgaatatcacgattacccaaggactggctgtgcctacaatctctagcttctttccgcctggataccaagtctccttctgtcttgtgatggtcctcctgtttgctgtggacacaggactgtacttttcc

SEQ ID NO: 1846 - DNA, 1446 bp, synthetic construct
  source 1..1446: mol_type = other DNA
atggccttaccagtgaccgccttgctcctgccgctggccttgctgctccacgccgccaggccgcaagttcagctggttcagtctggggccgaagtgaagaaacctggcagcagcgtgaaggtgtcctgcaaagcaagcggcggcacctttagcagctacgccatctcttgggtccgacaggcaccaggacaaggactggaatggatgggcctgattatccccagatacggcaaggccagatacgcccagaaattccagggcagagtgaccatcaccgccgacgagtctacaagcaccgcctacatggaactgagcagcctgagaagcgaggacacagccgtgtattattgcgcccggaactggccctactactacatggatttttggggccagggaaccctggtcaccgtgtctagtgcatctggcggaggcggaagtggaggcggaggatctggcggcggaggctctgacatcgtgctgacacagtctcccgccacactgtcactgtctccaggcgaaagagccacactgagctgtagagccagccagaacatcgtgttcaacctggcctggtatcagcagaagcctggacaggctccccggctgctgatctacgatgccagcaatagagccaccggcgtgcccgccagattttctggttctggcagcggcaccgacttcaccctgaccatatctagcctggaacctgaggacttcgccgtgtactactgccagcagaaaaagtccatgcctctgaccttcggccagggcaccaaggtggaaatcaagagaacagtggctgccacgcgtggaatgaggactgaggatcttcccaaagctgtcgtctttctcgaaccccaatggtatcgggtgctcgaaaaagactctgtgacactgaaatgccaaggggcctactctcccgaggacaactccacacagtggtttcataatgagtccctcatcagctctcaggccagctcttatttcattgatgccgctacagtggacgactccggcgagtatcggtgtcagaccaatctgtctacactgtctgaccccgtgcagcttgaggtccacattggatggttgctcttgcaagccccacgctgggttttcaaagaggaagatccaatccatctgcggtgccacagctggaaaaacaccgctctccacaaagtcacatacctgcaaaatggcaaaggacgcaaatacttccatcacaattccgatttttacattccgaaggctaccctgaaagacagcggcagctatttctgccggggactcgtcggctccaagaatgtgtcctccgaaaccgtgaatatcacgattacccaaggactggctgtgcctacaatctctagcttctttccgcctggataccaagtctccttctgtcttgtgatggtcctcctgtttgctgtggacacaggactgtacttttcc

SEQ ID NO: 1847 - DNA, 1455 bp, synthetic construct
  source 1..1455: mol_type = other DNA
atggccttaccagtgaccgccttgctcctgccgctggccttgctgctccacgccgccaggccggaggtgcagctggttgaatctggcggcggacttgtgaagcctggcggatctctgagactgagctgtgccgccagcggcttcacctttagcaatgcctggatgagctgggtccgacaggcccctggaaaaggactggaatgggtcggacggatcaagagcaagaccgaaggcggcaccaccgattatgctgcccctgtgaagggcagattcaccatcagcagggacgacagcaagaacaccctgtacctccagatgaacagcctgaaaaccgaggacaccgccgtgtactactgcaccacaccttacgagtggtcttggtacgactactggggccagggcacactggtcacagtgtcatctgcatctggcggaggcggaagtggaggcggaggatctggcggcggaggctctcagacagtggtcacccaagagcctagcctgacagtgtctcctggcggaaccgtgacactgacatgtggcagttctaccggcgctgtgaccaccagcaattacgccaactgggtgcagcagaagccaggccaagctcctagaggactgatcggcggcacaaacaagagagcccctggcacaccagccagattttctggctctctgctcggcggaaaggccgctcttacactgtctggtgtccagcctgaggacgaggccgagtattattgcgccctgtggtacagcaacctgtgggttttcggcggaggcaccaagctgacagtgctgactgttgctgctacgcgtggaatgaggactgaggatcttcccaaagctgtcgtctttctcgaaccccaatggtatcgggtgctcgaaaaagactctgtgacactgaaatgccaaggggcctactctcccgaggacaactccacacagtggtttcataatgagtccctcatcagctctcaggccagctcttatttcattgatgccgctacagtggacgactccggcgagtatcggtgtcagaccaatctgtctacactgtctgaccccgtgcagcttgaggtccacattggatggttgctcttgcaagccccacgctgggttttcaaagaggaagatccaatccatctgcggtgccacagctggaaaaacaccgctctccacaaagtcacatacctgcaaaatggcaaaggacgcaaatacttccatcacaattccgatttttacattccgaaggctaccctgaaagacagcggcagctatttctgccggggactcgtcggctccaagaatgtgtcctccgaaaccgtgaatatcacgattacccaaggactggctgtgcctacaatctctagcttctttccgcctggataccaagtctccttctgtcttgtgatggtcctcctgtttgctgtggacacaggactgtacttttcc

SEQ ID NO: 1848 - DNA, 1455 bp, synthetic construct
  source 1..1455: mol_type = other DNA
atggccttaccagtgaccgccttgctcctgccgctggccttgctgctccacgccgccaggccgcaggttcagctggttcagtctggggccgaagtgaagaaacctggggcctctgtgaaggtgtcctgcaaggcttccggctacacctttaccagctactacatgcactgggtccgacaggcccctggacaaggacttgagtggatgggcatcatcaaccctagcggcggcagcacaagctacgcccagaaattccagggcagagtgaccatgacacacgacaccagcacctccaccgtgtacatggaactgagcagcctgagaagcgaggacaccgccgtgtactactgcgccagatccttcttcaccggcttccacctggattactggggccagggaacactggtcacagtgtcatctgcatctggcggaggcggaagtggaggcggaggatctggcggcggaggctctgaaattgtgctgacacagagccccggcacactgtcactttctccaggcgaaagagccacactgagctgtagagccagccagagcgtgtccagctcttacctggcttggtatcagcagaagcccggccaggctcctagactgctgatctacggtgccagcagcagagccacaggcatccccgatagattttctggcagcggctccggcaccgacttcaccctgacaatcagcagactggaacccgaggactttgccgtgtattattgccagcagtacaccaacgagcactactacaccttcggccagggcaccaaggtggaaatcaagagaacagtggccgccacgcgtggaatgaggactgaggatcttcccaaagctgtcgtctttctcgaaccccaatggtatcgggtgctcgaaaaagactctgtgacactgaaatgccaaggggcctactctcccgaggacaactccacacagtggtttcataatgagtccctcatcagctctcaggccagctcttatttcattgatgccgctacagtggacgactccggcgagtatcggtgtcagaccaatctgtctacactgtctgaccccgtgcagcttgaggtccacattggatggttgctcttgcaagccccacgctgggttttcaaagaggaagatccaatccatctgcggtgccacagctggaaaaacaccgctctccacaaagtcacatacctgcaaaatggcaaaggacgcaaatacttccatcacaattccgatttttacattccgaaggctaccctgaaagacagcggcagctatttctgccggggactcgtcggctccaagaatgtgtcctccgaaaccgtgaatatcacgattacccaaggactggctgtgcctacaatctctagcttctttccgcctggataccaagtctccttctgtcttgtgatggtcctcctgtttgctgtggacacaggactgtacttttcc

SEQ ID NO: 1849 - DNA, 1473 bp, synthetic construct
  source 1..1473: mol_type = other DNA
atggccttaccagtgaccgccttgctcctgccgctggccttgctgctccacgccgccaggccggagatcgtgctgacacagtctcccgccacactgtcactgtctccaggcgaaagagccacactgagctgtagcgtgtccagcagcatcagcagcagcaacctgcactggtatcagcagaagcctggacaggcccctcggctgctgatctacggcacatctaatctggcctctggcatccccgccagattttctggctctggaagcggcaccgacttcaccctgaccataagcagcctggaacctgaggacttcgccgtgtactactgccagcagtggtccagctatccccacacatttggcggaggcaccaaggtggaaatcaagagaacagtggctgccggcggaggcggaagtggaggcggaggatctggcggcggaggctctcaggttcagctggttcagagcggagccgaagtgaagaaacctggggcctctgtgaaggtgtcctgcaaggcttccggctacacctttaccaactacctgatcgagtgggtccgacaggctccaggacaaggactggaatggatgggcctgattaaccctggcagcggcggcaccaactacaacgagaagttcaagggcagagtgaccatgaccaccgacaccagcacaagcaccgcctacatggaactgcggagcctgagaagcgacgacaccgccgtgtattattgcgccagaagaagccctctcggctcttggatctactacgcctatgacggcgtggcctattggggccagggaacactggttacagtgtcctctgccagcacgcgtggaatgaggactgaggatcttcccaaagctgtcgtctttctcgaaccccaatggtatcgggtgctcgaaaaagactctgtgacactgaaatgccaaggggcctactctcccgaggacaactccacacagtggtttcataatgagtccctcatcagctctcaggccagctcttatttcattgatgccgctacagtggacgactccggcgagtatcggtgtcagaccaatctgtctacactgtctgaccccgtgcagcttgaggtccacattggatggttgctcttgcaagccccacgctgggttttcaaagaggaagatccaatccatctgcggtgccacagctggaaaaacaccgctctccacaaagtcacatacctgcaaaatggcaaaggacgcaaatacttccatcacaattccgatttttacattccgaaggctaccctgaaagacagcggcagctatttctgccggggactcgtcggctccaagaatgtgtcctccgaaaccgtgaatatcacgattacccaaggactggctgtgcctacaatctctagcttctttccgcctggataccaagtctccttctgtcttgtgatggtcctcctgtttgctgtggacacaggactgtacttttcc

SEQ ID NO: 1850 - DNA, 1428 bp, synthetic construct
  source 1..1428: mol_type = other DNA
atggccttaccagtgaccgccttgctcctgccgctggccttgctgctccacgccgccaggccggacatccagatgacacagagccctagcagcctgtctgccagcgtgggagacagagtgaccatcacctgtaaagccggccagaacgtgggcacaagcgtggcatggtatcagcagaagcctggcaaggcccctaagctgctgatctacagcgccagctacagatacagcggcgtgcccagcagattttctggcagcggctctggcaccgacttcaccctgacaatatccagcctccagcctgaggacttcgccacctactactgccagcagtacatcacatacccctacaccttcggccagggcaccaaggtggaaatcaagagaacagtggctgccggcggaggcggaagtggaggcggaggatctggcggcggaggctctgaagttcagctggttgaatcaggcggcggactggttcaacctggcggatctctgagactgagctgtgccgccagcggcttcaccttcagcagatactggatgagctgggtccgacaggcccctggcaaaggacttgaatgggtcgccgagatcaaccccgacagcagcaccatccagtacaccccatctctgaaggcccggttcaccctgtccgtggacagaagcaagaacaccctgtacctccagatgaactccctgagagccgaggacaccgccgtgtactattgtgccagacctgcctattggggccagggaacactggtcacagtgtctagcgcttccacgcgtggaatgaggactgaggatcttcccaaagctgtcgtctttctcgaaccccaatggtatcgggtgctcgaaaaagactctgtgacactgaaatgccaaggggcctactctcccgaggacaactccacacagtggtttcataatgagtccctcatcagctctcaggccagctcttatttcattgatgccgctacagtggacgactccggcgagtatcggtgtcagaccaatctgtctacactgtctgaccccgtgcagcttgaggtccacattggatggttgctcttgcaagccccacgctgggttttcaaagaggaagatccaatccatctgcggtgccacagctggaaaaacaccgctctccacaaagtcacatacctgcaaaatggcaaaggacgcaaatacttccatcacaattccgatttttacattccgaaggctaccctgaaagacagcggcagctatttctgccggggactcgtcggctccaagaatgtgtcctccgaaaccgtgaatatcacgattacccaaggactggctgtgcctacaatctctagcttctttccgcctggataccaagtctccttctgtcttgtgatggtcctcctgtttgctgtggacacaggactgtacttttcc

SEQ ID NO: 1851 - DNA, 1449 bp, synthetic construct
  source 1..1449: mol_type = other DNA
atggccttaccagtgaccgccttgctcctgccgctggccttgctgctccacgccgccaggccggacatccagatgacacagagccctagcagcctgtctgccagcgtgggagacagagtgaccatcacatgtagcgccagccaggacatcggcaactttctgaactggtatcagcagaagcccggcaaggcccctaagctgctgatctactacacctccagcctgtacagcggcgtgcccagcagattttctggcagcggctctggcaccgacttcaccctgacaatatccagcctccagccagaggacttcgccacctactactgccagcagtacagcaagctgcccctgacctttggacagggcaccaagctggaaatcaagagaacagtggctgccggcggaggcggaagtggaggcggaggatctggcggcggaggctctcaagttcagctggttcagtctggggccgaagtgaagaaacctggggcctctgtgaaggtgtcctgcaaggcttccggctacacctttaccggctacaacatccactgggtccgacaggctcccggccaaagacttgaatggatgggcgctatctaccccggcaacggcgataccagctacaagcagaaattccggggcagagtgacaattaccagagacaccagcgccagcaccgcctacatggaactgtctagcctgagaagcgaggacaccgccgtgtactattgcgccagaggcgaaacagccagagccacctttgcctattggggccagggaaccctggtcacagtgtctagtgcttccacgcgtggaatgaggactgaggatcttcccaaagctgtcgtctttctcgaaccccaatggtatcgggtgctcgaaaaagactctgtgacactgaaatgccaaggggcctactctcccgaggacaactccacacagtggtttcataatgagtccctcatcagctctcaggccagctcttatttcattgatgccgctacagtggacgactccggcgagtatcggtgtcagaccaatctgtctacactgtctgaccccgtgcagcttgaggtccacattggatggttgctcttgcaagccccacgctgggttttcaaagaggaagatccaatccatctgcggtgccacagctggaaaaacaccgctctccacaaagtcacatacctgcaaaatggcaaaggacgcaaatacttccatcacaattccgatttttacattccgaaggctaccctgaaagacagcggcagctatttctgccggggactcgtcggctccaagaatgtgtcctccgaaaccgtgaatatcacgattacccaaggactggctgtgcctacaatctctagcttctttccgcctggataccaagtctccttctgtcttgtgatggtcctcctgtttgctgtggacacaggactgtacttttcc

SEQ ID NO: 1852 - DNA, 1041 bp, synthetic construct
  source 1..1041: mol_type = other DNA
atggccttaccagtgaccgccttgctcctgccgctggccttgctgctccacgccgccaggccggatgtgcaagtgacacagagccctagcagcctgtctgcctctgtgggcgacagagtgacaatcacctgtcggagcagccagagcctggctaactcctacggcaataccttcctgagctggtatctgcacaagcccggaaaggctccccagctgctgatctacggcatcagcaacagattcagcggcgtgcccgataggtttagcggctctggaagcggcaccgacttcaccctgacaatatccagcctccagcctgaggactttgccacctactactgtctgcaaggcacccaccagccttacacattcggacagggcaccaaggtggaaatcaagacgcgtggaatgaggactgaggatcttcccaaagctgtcgtctttctcgaaccccaatggtatcgggtgctcgaaaaagactctgtgacactgaaatgccaaggggcctactctcccgaggacaactccacacagtggtttcataatgagtccctcatcagctctcaggccagctcttatttcattgatgccgctacagtggacgactccggcgagtatcggtgtcagaccaatctgtctacactgtctgaccccgtgcagcttgaggtccacattggatggttgctcttgcaagccccacgctgggttttcaaagaggaagatccaatccatctgcggtgccacagctggaaaaacaccgctctccacaaagtcacatacctgcaaaatggcaaaggacgcaaatacttccatcacaattccgatttttacattccgaaggctaccctgaaagacagcggcagctatttctgccggggactcgtcggctccaagaatgtgtcctccgaaaccgtgaatatcacgattacccaaggactggctgtgcctacaatctctagcttctttccgcctggataccaagtctccttctgtcttgtgatggtcctcctgtttgctgtggacacaggactgtacttttcc

SEQ ID NO: 1853 - DNA, 1026 bp, synthetic construct
  source 1..1026: mol_type = other DNA
atggccttaccagtgaccgccttgctcctgccgctggccttgctgctccacgccgccaggccggacatccagatgacacagagccctagcagcctgtctgccagcgtgggagacagagtgaccatcacctgtagagccagccaggacatcagcaactacctgaactggtatcagcagaaacccggcaaggccgtgaagctgctgatctactacaccagcatcctgcacagcggcgtgcccagcagattttctggctctggcagcggcaccgactacaccctgacaatatctagcctccagcctgaggacttcgctacctacttctgccagcaaggcaacaccctgccttggacatttggcggaggcaccaaggtggaaatcaaaacgcgtggaatgaggactgaggatcttcccaaagctgtcgtctttctcgaaccccaatggtatcgggtgctcgaaaaagactctgtgacactgaaatgccaaggggcctactctcccgaggacaactccacacagtggtttcataatgagtccctcatcagctctcaggccagctcttatttcattgatgccgctacagtggacgactccggcgagtatcggtgtcagaccaatctgtctacactgtctgaccccgtgcagcttgaggtccacattggatggttgctcttgcaagccccacgctgggttttcaaagaggaagatccaatccatctgcggtgccacagctggaaaaacaccgctctccacaaagtcacatacctgcaaaatggcaaaggacgcaaatacttccatcacaattccgatttttacattccgaaggctaccctgaaagacagcggcagctatttctgccggggactcgtcggctccaagaatgtgtcctccgaaaccgtgaatatcacgattacccaaggactggctgtgcctacaatctctagcttctttccgcctggataccaagtctccttctgtcttgtgatggtcctcctgtttgctgtggacacaggactgtacttttcc

SEQ ID NO: 1854 - DNA, 1029 bp, synthetic construct
  source 1..1029: mol_type = other DNA
atggccttaccagtgaccgccttgctcctgccgctggccttgctgctccacgccgccaggccggacatcgtgatgacccagagccagcggttcatgaccacaagcgtgggcgatagagtgtccgtgacatgcaaggccagccagagcgtggactctaacgtggcctggtatcagcagaagcccagacagagccccaaggctctgatctttagcgccagcctgagattcagcggagtgcccgctagattcacaggcagcggctctggcaccgatttcaccctgaccatcagcaacctccagagcgaggacctggccgagtatttctgccagcagtacaacaactaccctctgaccttcggagccggcaccaagctggaactgaagagaacgcgtggaatgaggactgaggatcttcccaaagctgtcgtctttctcgaaccccaatggtatcgggtgctcgaaaaagactctgtgacactgaaatgccaaggggcctactctcccgaggacaactccacacagtggtttcataatgagtccctcatcagctctcaggccagctcttatttcattgatgccgctacagtggacgactccggcgagtatcggtgtcagaccaatctgtctacactgtctgaccccgtgcagcttgaggtccacattggatggttgctcttgcaagccccacgctgggttttcaaagaggaagatccaatccatctgcggtgccacagctggaaaaacaccgctctccacaaagtcacatacctgcaaaatggcaaaggacgcaaatacttccatcacaattccgatttttacattccgaaggctaccctgaaagacagcggcagctatttctgccggggactcgtcggctccaagaatgtgtcctccgaaaccgtgaatatcacgattacccaaggactggctgtgcctacaatctctagcttctttccgcctggataccaagtctccttctgtcttgtgatggtcctcctgtttgctgtggacacaggactgtacttttcc

SEQ ID NO: 1855 - DNA, 1029 bp, synthetic construct
  source 1..1029: mol_type = other DNA
atggccttaccagtgaccgccttgctcctgccgctggccttgctgctccacgccgccaggccggacatccagatgacacagagccctagcagcctgtctgccagcgtgggagacagagtgaccatcacctgtagagccagccaggacatcagcaactacctgaactggtatcagcagaagcccggcaaggcccctaagctgctgatctactacaccagcatcctgcacagcggcgtgcccagcagattttctggctctggcagcggcaccgacttcaccctgacaatatctagcctccagcctgaggacttcgccacctactattgccagcagggcaacaccctgccttggacctttggacagggcaccaaggtggaaatcaagagaacgcgtggaatgaggactgaggatcttcccaaagctgtcgtctttctcgaaccccaatggtatcgggtgctcgaaaaagactctgtgacactgaaatgccaaggggcctactctcccgaggacaactccacacagtggtttcataatgagtccctcatcagctctcaggccagctcttatttcattgatgccgctacagtggacgactccggcgagtatcggtgtcagaccaatctgtctacactgtctgaccccgtgcagcttgaggtccacattggatggttgctcttgcaagccccacgctgggttttcaaagaggaagatccaatccatctgcggtgccacagctggaaaaacaccgctctccacaaagtcacatacctgcaaaatggcaaaggacgcaaatacttccatcacaattccgatttttacattccgaaggctaccctgaaagacagcggcagctatttctgccggggactcgtcggctccaagaatgtgtcctccgaaaccgtgaatatcacgattacccaaggactggctgtgcctacaatctctagcttctttccgcctggataccaagtctccttctgtcttgtgatggtcctcctgtttgctgtggacacaggactgtacttttcc

SEQ ID NO: 1856 - DNA, 1029 bp, synthetic construct
  source 1..1029: mol_type = other DNA
atggccttaccagtgaccgccttgctcctgccgctggccttgctgctccacgccgccaggccggacatccagatgacacagagccctagcagcctgtctgccagcgtgggagacagagtgaccatcacatgcaaggccagcgaccacatcaacaactggctggcctggtatcagcagaagcctggcaaggcccctaagctgctgatctacggcgctaccacactggaaacaggcgtgcccagcagattttctggcagcggctctggcaccgacttcaccctgacaatatccagcctccagcctgaggacttcgccacctactactgtcagcagagctggaacaccccttggacattcggccagggcaccaaggtggaaatcaagagaacgcgtggaatgaggactgaggatcttcccaaagctgtcgtctttctcgaaccccaatggtatcgggtgctcgaaaaagactctgtgacactgaaatgccaaggggcctactctcccgaggacaactccacacagtggtttcataatgagtccctcatcagctctcaggccagctcttatttcattgatgccgctacagtggacgactccggcgagtatcggtgtcagaccaatctgtctacactgtctgaccccgtgcagcttgaggtccacattggatggttgctcttgcaagccccacgctgggttttcaaagaggaagatccaatccatctgcggtgccacagctggaaaaacaccgctctccacaaagtcacatacctgcaaaatggcaaaggacgcaaatacttccatcacaattccgatttttacattccgaaggctaccctgaaagacagcggcagctatttctgccggggactcgtcggctccaagaatgtgtcctccgaaaccgtgaatatcacgattacccaaggactggctgtgcctacaatctctagcttctttccgcctggataccaagtctccttctgtcttgtgatggtcctcctgtttgctgtggacacaggactgtacttttcc

SEQ ID NO: 1857 - DNA, 1029 bp, synthetic construct
  source 1..1029: mol_type = other DNA
atggccttaccagtgaccgccttgctcctgccgctggccttgctgctccacgccgccaggccgagctacgtgctgacacagcctccatccgtgtctgtggctccaggacagaccgccagaatcacatgcggcggcaacaacatcggcagcaagagcgtgcactggtatcagcagccacctggacaggctccagtggtggtggtgtacgacgacagcgatagacctagcggcatccccgagagattcagcggcagcaattccggcaataccgccacactgaccatcagcagagtggaagctggcgacgaggccgtgtactactgccaagtgtgggacagcagcagcgatcacgtggtgtttggcggcggaacaaagctgacagtgcttacgcgtggaatgaggactgaggatcttcccaaagctgtcgtctttctcgaaccccaatggtatcgggtgctcgaaaaagactctgtgacactgaaatgccaaggggcctactctcccgaggacaactccacacagtggtttcataatgagtccctcatcagctctcaggccagctcttatttcattgatgccgctacagtggacgactccggcgagtatcggtgtcagaccaatctgtctacactgtctgaccccgtgcagcttgaggtccacattggatggttgctcttgcaagccccacgctgggttttcaaagaggaagatccaatccatctgcggtgccacagctggaaaaacaccgctctccacaaagtcacatacctgcaaaatggcaaaggacgcaaatacttccatcacaattccgatttttacattccgaaggctaccctgaaagacagcggcagctatttctgccggggactcgtcggctccaagaatgtgtcctccgaaaccgtgaatatcacgattacccaaggactggctgtgcctacaatctctagcttctttccgcctggataccaagtctccttctgtcttgtgatggtcctcctgtttgctgtggacacaggactgtacttttcc

SEQ ID NO: 1858 - DNA, 1029 bp, synthetic construct
  source 1..1029: mol_type = other DNA
atggccttaccagtgaccgccttgctcctgccgctggccttgctgctccacgccgccaggccggacatccagatgacacagagccctagcagcctgtctgccagcgtgggagacagagtgaccatcacctgtatggcctccgaggacatctacatccggctggcctggtatcagcagaagcctggaaaggcccctaagctgctgatctacgccgccacctctctggaaacaggcgtgccaagcagattttccggcagcggctctggcaccgatttcaccctgaccataagcagcctgcagcctgaggacttcgccacctactactgccagcagtattggagcagcccctggacctttggacagggcaccaaggtggaaatcaagagaacgcgtggaatgaggactgaggatcttcccaaagctgtcgtctttctcgaaccccaatggtatcgggtgctcgaaaaagactctgtgacactgaaatgccaaggggcctactctcccgaggacaactccacacagtggtttcataatgagtccctcatcagctctcaggccagctcttatttcattgatgccgctacagtggacgactccggcgagtatcggtgtcagaccaatctgtctacactgtctgaccccgtgcagcttgaggtccacattggatggttgctcttgcaagccccacgctgggttttcaaagaggaagatccaatccatctgcggtgccacagctggaaaaacaccgctctccacaaagtcacatacctgcaaaatggcaaaggacgcaaatacttccatcacaattccgatttttacattccgaaggctaccctgaaagacagcggcagctatttctgccggggactcgtcggctccaagaatgtgtcctccgaaaccgtgaatatcacgattacccaaggactggctgtgcctacaatctctagcttctttccgcctggataccaagtctccttctgtcttgtgatggtcctcctgtttgctgtggacacaggactgtacttttcc

SEQ ID NO: 1859 - DNA, 1041 bp, synthetic construct
  source 1..1041: mol_type = other DNA
atggccttaccagtgaccgccttgctcctgccgctggccttgctgctccacgccgccaggccggacatccagatgacacagagccctagcagcgtgtccgcctctgtgggagacagagtgaccatcacctgtagagccagcgagagcgtggacaactacggcatcagcttcatgaactggtatcagcagaagcccggcaaggcccctaagctgctgattagcgccgccagcaatagagccacaggcgtgccaagcagattttccggctctggcagcggcaccgatttcaccctgacaatatccagcctccagcctgaggacttcgccatctactactgccagcagagcaaagaggtgccctggacctttggacagggcaccaaggtggaaatcaagagaacgcgtggaatgaggactgaggatcttcccaaagctgtcgtctttctcgaaccccaatggtatcgggtgctcgaaaaagactctgtgacactgaaatgccaaggggcctactctcccgaggacaactccacacagtggtttcataatgagtccctcatcagctctcaggccagctcttatttcattgatgccgctacagtggacgactccggcgagtatcggtgtcagaccaatctgtctacactgtctgaccccgtgcagcttgaggtccacattggatggttgctcttgcaagccccacgctgggttttcaaagaggaagatccaatccatctgcggtgccacagctggaaaaacaccgctctccacaaagtcacatacctgcaaaatggcaaaggacgcaaatacttccatcacaattccgatttttacattccgaaggctaccctgaaagacagcggcagctatttctgccggggactcgtcggctccaagaatgtgtcctccgaaaccgtgaatatcacgattacccaaggactggctgtgcctacaatctctagcttctttccgcctggataccaagtctccttctgtcttgtgatggtcctcctgtttgctgtggacacaggactgtacttttcc

SEQ ID NO: 1860 - DNA, 1041 bp, synthetic construct
  source 1..1041: mol_type = other DNA
atggccttaccagtgaccgccttgctcctgccgctggccttgctgctccacgccgccaggccggacatccagctgacacagagcccttctagcctgtctgccagcgtgggcgacagagtgaccatcacatgtagagccagcaagagcgtgtccaccagcggctacagctacatgcactggtatcagcagaagcccggcaaggcccctaagctgctgatctacctggtgtccaacctggaaagcggcgtgcccagcagattttctggcagcggctctggcaccgacttcaccctgacaatatccagcctccagcctgaggacttcgccacctactactgccagcagttcagcgagctgccttggacctttggacagggcaccaaggtggaaatcaagagaacgcgtggaatgaggactgaggatcttcccaaagctgtcgtctttctcgaaccccaatggtatcgggtgctcgaaaaagactctgtgacactgaaatgccaaggggcctactctcccgaggacaactccacacagtggtttcataatgagtccctcatcagctctcaggccagctcttatttcattgatgccgctacagtggacgactccggcgagtatcggtgtcagaccaatctgtctacactgtctgaccccgtgcagcttgaggtccacattggatggttgctcttgcaagccccacgctgggttttcaaagaggaagatccaatccatctgcggtgccacagctggaaaaacaccgctctccacaaagtcacatacctgcaaaatggcaaaggacgcaaatacttccatcacaattccgatttttacattccgaaggctaccctgaaagacagcggcagctatttctgccggggactcgtcggctccaagaatgtgtcctccgaaaccgtgaatatcacgattacccaaggactggctgtgcctacaatctctagcttctttccgcctggataccaagtctccttctgtcttgtgatggtcctcctgtttgctgtggacacaggactgtacttttcc

SEQ ID NO: 1861 - DNA, 1032 bp, synthetic construct
  source 1..1032: mol_type = other DNA
atggccttaccagtgaccgccttgctcctgccgctggccttgctgctccacgccgccaggccggacatccagatgacacagagccctagcagcgtgtccgcctctgtgggagacagagtgaccatcacctgtcgggccagccagttcatcagcagcagctacctgagctggtatcagcagaagcctggcaaggcccctaagctgctgatctctggcagctctagcagagccacaggcgtgccaagcagattttctggcagcggctctggcaccgacttcaccctgacaatatccagcctccagcctgaggacttcgccatctactactgccagcagctgtactctagccccatgacattcggccagggcaccaaggtggaaatcaagagaacgcgtggaatgaggactgaggatcttcccaaagctgtcgtctttctcgaaccccaatggtatcgggtgctcgaaaaagactctgtgacactgaaatgccaaggggcctactctcccgaggacaactccacacagtggtttcataatgagtccctcatcagctctcaggccagctcttatttcattgatgccgctacagtggacgactccggcgagtatcggtgtcagaccaatctgtctacactgtctgaccccgtgcagcttgaggtccacattggatggttgctcttgcaagccccacgctgggttttcaaagaggaagatccaatccatctgcggtgccacagctggaaaaacaccgctctccacaaagtcacatacctgcaaaatggcaaaggacgcaaatacttccatcacaattccgatttttacattccgaaggctaccctgaaagacagcggcagctatttctgccggggactcgtcggctccaagaatgtgtcctccgaaaccgtgaatatcacgattacccaaggactggctgtgcctacaatctctagcttctttccgcctggataccaagtctccttctgtcttgtgatggtcctcctgtttgctgtggacacaggactgtacttttcc

SEQ ID NO: 1862 - DNA, 1074 bp, synthetic construct
  source 1..1074: mol_type = other DNA
atggccttaccagtgaccgccttgctcctgccgctggccttgctgctccacgccgccaggccgcaggtccagctcgtcgagtccggcggcggcctcgtccaggccggcgactccgtcaccctctcctgcaccgcctccggccgcaccttctcctcctacgccctcgcctggttccgccagcgccccggcaaggagcgcgagttcgtcgccggcctccgctggggcggccccaccaactacgccgactccgtcaaggaccgcttcaccatctccggcgactccgccaagcacaccatgtacctccagatgaactccctcaagcccgaggacaccgccgtctactactgcggctacaaccccggcggctgggccgtcccctcccagtacgagtacgactcctggggccagggcacccaggtcaccgtctcctccacgcgtggaatgaggactgaggatcttcccaaagctgtcgtctttctcgaaccccaatggtatcgggtgctcgaaaaagactctgtgacactgaaatgccaaggggcctactctcccgaggacaactccacacagtggtttcataatgagtccctcatcagctctcaggccagctcttatttcattgatgccgctacagtggacgactccggcgagtatcggtgtcagaccaatctgtctacactgtctgaccccgtgcagcttgaggtccacattggatggttgctcttgcaagccccacgctgggttttcaaagaggaagatccaatccatctgcggtgccacagctggaaaaacaccgctctccacaaagtcacatacctgcaaaatggcaaaggacgcaaatacttccatcacaattccgatttttacattccgaaggctaccctgaaagacagcggcagctatttctgccggggactcgtcggctccaagaatgtgtcctccgaaaccgtgaatatcacgattacccaaggactggctgtgcctacaatctctagcttctttccgcctggataccaagtctccttctgtcttgtgatggtcctcctgtttgctgtggacacaggactgtacttttcc

SEQ ID NO: 1863 - DNA, 1059 bp, synthetic construct
  source 1..1059: mol_type = other DNA
atggccttaccagtgaccgccttgctcctgccgctggccttgctgctccacgccgccaggccgcaggttcagctgcaagagtctggcggaggacttgctcaagctggcggaagcctgagactgtcttgtgccgcctctggcagaaccttcagcatgggctggtttagacaggcccctggcaaagagagagagttcgtcgccgccatcacatacagcggcggcagcccttactacgcctcttctgtcagaggccggttcaccatcagccgggacaacgccaagaacaccgtgtacctccagatgaacagcctgaagccagaggacaccgccgtgtactactgtgccgccaatccaacctacggcagcgactggaatgccgagaattggggccagggcacccaagtgacagtgtctagtacgcgtggaatgaggactgaggatcttcccaaagctgtcgtctttctcgaaccccaatggtatcgggtgctcgaaaaagactctgtgacactgaaatgccaaggggcctactctcccgaggacaactccacacagtggtttcataatgagtccctcatcagctctcaggccagctcttatttcattgatgccgctacagtggacgactccggcgagtatcggtgtcagaccaatctgtctacactgtctgaccccgtgcagcttgaggtccacattggatggttgctcttgcaagccccacgctgggttttcaaagaggaagatccaatccatctgcggtgccacagctggaaaaacaccgctctccacaaagtcacatacctgcaaaatggcaaaggacgcaaatacttccatcacaattccgatttttacattccgaaggctaccctgaaagacagcggcagctatttctgccggggactcgtcggctccaagaatgtgtcctccgaaaccgtgaatatcacgattacccaaggactggctgtgcctacaatctctagcttctttccgcctggataccaagtctccttctgtcttgtgatggtcctcctgtttgctgtggacacaggactgtacttttcc

SEQ ID NO: 1864 - DNA, 1053 bp, synthetic construct
  source 1..1053: mol_type = other DNA
atggccttaccagtgaccgccttgctcctgccgctggccttgctgctccacgccgccaggccggaagtgcagctggttgaatctggcggaggactggttcagcctggcggatctctgagactgtcttgtgccgccagcggcttcagcttcagcgacttttggatgagctgggtccgacaggcccctggcaaaggacttgaatgggtcgccacaatcagccaggccggcagcgagaaggactacgtggactctgtgaagggcagattcaccatcagccgggacaacgccaagaagtccctgtacctccagatgaacagcctgagagccgaggacaccgccgtgtactattgtgcctctggcgtgtacagcttcgactacagaggccagggcaccctggtcacagtctcttctacgcgtggaatgaggactgaggatcttcccaaagctgtcgtctttctcgaaccccaatggtatcgggtgctcgaaaaagactctgtgacactgaaatgccaaggggcctactctcccgaggacaactccacacagtggtttcataatgagtccctcatcagctctcaggccagctcttatttcattgatgccgctacagtggacgactccggcgagtatcggtgtcagaccaatctgtctacactgtctgaccccgtgcagcttgaggtccacattggatggttgctcttgcaagccccacgctgggttttcaaagaggaagatccaatccatctgcggtgccacagctggaaaaacaccgctctccacaaagtcacatacctgcaaaatggcaaaggacgcaaatacttccatcacaattccgatttttacattccgaaggctaccctgaaagacagcggcagctatttctgccggggactcgtcggctccaagaatgtgtcctccgaaaccgtgaatatcacgattacccaaggactggctgtgcctacaatctctagcttctttccgcctggataccaagtctccttctgtcttgtgatggtcctcctgtttgctgtggacacaggactgtacttttcc

SEQ ID NO: 1865 - DNA, 1053 bp, synthetic construct
  source 1..1053: mol_type = other DNA
atggccttaccagtgaccgccttgctcctgccgctggccttgctgctccacgccgccaggccggaagtgcagctggttgaatctggcggaggactggttcagcctggcggatctctgagactgtcttgtgccgccagcggcttcaccttcagcaactactggatgagctgggtccgacaggcccctggaaagggacaagaatgggtcgccaccatcaaccaggacggcagcgacaaggattacgtggacagcgtgaagggcagattcaccatcagccgggacaacgccaagaagtccctgtacctccagatgaacagcctgagagccgaggacaccgccgtgtactattgtgcctctggcgtgtacagcttcgactacagaggccagggcaccctggtcacagtctcttctacgcgtggaatgaggactgaggatcttcccaaagctgtcgtctttctcgaaccccaatggtatcgggtgctcgaaaaagactctgtgacactgaaatgccaaggggcctactctcccgaggacaactccacacagtggtttcataatgagtccctcatcagctctcaggccagctcttatttcattgatgccgctacagtggacgactccggcgagtatcggtgtcagaccaatctgtctacactgtctgaccccgtgcagcttgaggtccacattggatggttgctcttgcaagccccacgctgggttttcaaagaggaagatccaatccatctgcggtgccacagctggaaaaacaccgctctccacaaagtcacatacctgcaaaatggcaaaggacgcaaatacttccatcacaattccgatttttacattccgaaggctaccctgaaagacagcggcagctatttctgccggggactcgtcggctccaagaatgtgtcctccgaaaccgtgaatatcacgattacccaaggactggctgtgcctacaatctctagcttctttccgcctggataccaagtctccttctgtcttgtgatggtcctcctgtttgctgtggacacaggactgtacttttcc

SEQ ID NO: 1866 - DNA, 1053 bp, synthetic construct
  source 1..1053: mol_type = other DNA
atggccttaccagtgaccgccttgctcctgccgctggccttgctgctccacgccgccaggccggaagtgcagctggttgaatctggcggaggactggttcagcctggcggatctctgagactgtcttgtgccgccagcggcatcgacttcagcagatactggatgagctgggtccgacaggcccctggcaaaggacttgaatgggtcgccacaatcagccaggccggcagcgagaaggactacgtggactctgtgaagggcagattcaccatcagccgggacaacgccaagaagtccctgtacctccagatgaacagcctgagagccgaggacaccgccgtgtactattgtgcctctggcgtgtacagcttcgactacagaggccagggcaccctggtcacagtctcttctacgcgtggaatgaggactgaggatcttcccaaagctgtcgtctttctcgaaccccaatggtatcgggtgctcgaaaaagactctgtgacactgaaatgccaaggggcctactctcccgaggacaactccacacagtggtttcataatgagtccctcatcagctctcaggccagctcttatttcattgatgccgctacagtggacgactccggcgagtatcggtgtcagaccaatctgtctacactgtctgaccccgtgcagcttgaggtccacattggatggttgctcttgcaagccccacgctgggttttcaaagaggaagatccaatccatctgcggtgccacagctggaaaaacaccgctctccacaaagtcacatacctgcaaaatggcaaaggacgcaaatacttccatcacaattccgatttttacattccgaaggctaccctgaaagacagcggcagctatttctgccggggactcgtcggctccaagaatgtgtcctccgaaaccgtgaatatcacgattacccaaggactggctgtgcctacaatctctagcttctttccgcctggataccaagtctccttctgtcttgtgatggtcctcctgtttgctgtggacacaggactgtacttttcc

SEQ ID NO: 1867 - DNA, 1053 bp, synthetic construct
  source 1..1053: mol_type = other DNA
atggccttaccagtgaccgccttgctcctgccgctggccttgctgctccacgccgccaggccggaagtgcagctggttgaatctggcggaggactggttcagcctggcggatctctgagactgtcttgtgccgccagcggcatcgacttcagcagatactggatgagctgggtccgacaggcccctggaaagggacaagaatgggtcgccaccatcaaccaggacggcagcgacaaggattacgtggacagcgtgaagggcagattcaccatcagccgggacaacgccaagaagtccctgtacctccagatgaacagcctgagagccgaggacaccgccgtgtactattgtgcctctggcgtgtacagcttcgactacagaggccagggcaccctggtcacagtctcttctacgcgtggaatgaggactgaggatcttcccaaagctgtcgtctttctcgaaccccaatggtatcgggtgctcgaaaaagactctgtgacactgaaatgccaaggggcctactctcccgaggacaactccacacagtggtttcataatgagtccctcatcagctctcaggccagctcttatttcattgatgccgctacagtggacgactccggcgagtatcggtgtcagaccaatctgtctacactgtctgaccccgtgcagcttgaggtccacattggatggttgctcttgcaagccccacgctgggttttcaaagaggaagatccaatccatctgcggtgccacagctggaaaaacaccgctctccacaaagtcacatacctgcaaaatggcaaaggacgcaaatacttccatcacaattccgatttttacattccgaaggctaccctgaaagacagcggcagctatttctgccggggactcgtcggctccaagaatgtgtcctccgaaaccgtgaatatcacgattacccaaggactggctgtgcctacaatctctagcttctttccgcctggataccaagtctccttctgtcttgtgatggtcctcctgtttgctgtggacacaggactgtacttttcc

SEQ ID NO: 1868 - DNA, 1065 bp, synthetic construct
  source 1..1065: mol_type = other DNA
atggccttaccagtgaccgccttgctcctgccgctggccttgctgctccacgccgccaggccggaggtgcagctggttgaatctggcggaggactggttcagcctggcggatctctgagactgtcctgcacattttccggcggcaccttcagcagctacacaatgggctggttcagacaggcccctggcaaagaacgggaatttgtggccgaagtccgatggggcggagtgaccacatacagcaacagcctgaaggacagattcagcatcagcgaggacagcgtgaagaacgccgtgtacctccagatgaactccctgaagcctgaggacacagccgtgtactattgtgccgctgtgcggcagatgtacatgaccgtggtgcctgattattggggccagggcacactggtcacagtgtctagcacgcgtggaatgaggactgaggatcttcccaaagctgtcgtctttctcgaaccccaatggtatcgggtgctcgaaaaagactctgtgacactgaaatgccaaggggcctactctcccgaggacaactccacacagtggtttcataatgagtccctcatcagctctcaggccagctcttatttcattgatgccgctacagtggacgactccggcgagtatcggtgtcagaccaatctgtctacactgtctgaccccgtgcagcttgaggtccacattggatggttgctcttgcaagccccacgctgggttttcaaagaggaagatccaatccatctgcggtgccacagctggaaaaacaccgctctccacaaagtcacatacctgcaaaatggcaaaggacgcaaatacttccatcacaattccgatttttacattccgaaggctaccctgaaagacagcggcagctatttctgccggggactcgtcggctccaagaatgtgtcctccgaaaccgtgaatatcacgattacccaaggactggctgtgcctacaatctctagcttctttccgcctggataccaagtctccttctgtcttgtgatggtcctcctgtttgctgtggacacaggactgtacttttcc

SEQ ID NO: 1869 - DNA, 1059 bp, synthetic construct
  source 1..1059: mol_type = other DNA
atggccttaccagtgaccgccttgctcctgccgctggccttgctgctccacgccgccaggccggaagtgcagctggttgaatctggcggaggactggttcaggctggcggatctctgagactgtcttgtgccgccagcggcagaacctttagcatgggctggtttagacaggcccctggcaaagagagagagttcgtcgccgccatcacatactctggcggcagcccttactacgccgactctgtgaagggcagattcaccatcagccgggacaacgccaagaacaccgtgtacctccagatgaacagcctgaagcctgaggacaccgccgtgtactactgcgccgccaatccaacatacggcagcgactggaacgccgagaattggggccagggaacccaagtgacagtgtctagcacgcgtggaatgaggactgaggatcttcccaaagctgtcgtctttctcgaaccccaatggtatcgggtgctcgaaaaagactctgtgacactgaaatgccaaggggcctactctcccgaggacaactccacacagtggtttcataatgagtccctcatcagctctcaggccagctcttatttcattgatgccgctacagtggacgactccggcgagtatcggtgtcagaccaatctgtctacactgtctgaccccgtgcagcttgaggtccacattggatggttgctcttgcaagccccacgctgggttttcaaagaggaagatccaatccatctgcggtgccacagctggaaaaacaccgctctccacaaagtcacatacctgcaaaatggcaaaggacgcaaatacttccatcacaattccgatttttacattccgaaggctaccctgaaagacagcggcagctatttctgccggggactcgtcggctccaagaatgtgtcctccgaaaccgtgaatatcacgattacccaaggactggctgtgcctacaatctctagcttctttccgcctggataccaagtctccttctgtcttgtgatggtcctcctgtttgctgtggacacaggactgtacttttcc

SEQ ID NO: 1870 - DNA, 1059 bp, synthetic construct
  source 1..1059: mol_type = other DNA
atggccttaccagtgaccgccttgctcctgccgctggccttgctgctccacgccgccaggccgcagctccagttgcaagagagcggccctggcttggtaaaaccttccgagacccttagcctcacatgcacggttagtgggggcagcatttcctcaggtgattactattggggatggattcggcaacccccgggtaaaggattggagtggattggtcatatttattatagtggagcgacgtactacaacccaagtctcaaatccagggttacaatatccgtcgatacgagcaggaaccaattcagcttgaaactttctagtgtcaccgcagcagacacagccgtctattactgtacgcgggatgactccagtaattggcggtcccgagggcaagggacactggtcacggtctcctcaacgcgtggaatgaggactgaggatcttcccaaagctgtcgtctttctcgaaccccaatggtatcgggtgctcgaaaaagactctgtgacactgaaatgccaaggggcctactctcccgaggacaactccacacagtggtttcataatgagtccctcatcagctctcaggccagctcttatttcattgatgccgctacagtggacgactccggcgagtatcggtgtcagaccaatctgtctacactgtctgaccccgtgcagcttgaggtccacattggatggttgctcttgcaagccccacgctgggttttcaaagaggaagatccaatccatctgcggtgccacagctggaaaaacaccgctctccacaaagtcacatacctgcaaaatggcaaaggacgcaaatacttccatcacaattccgatttttacattccgaaggctaccctgaaagacagcggcagctatttctgccggggactcgtcggctccaagaatgtgtcctccgaaaccgtgaatatcacgattacccaaggactggctgtgcctacaatctctagcttctttccgcctggataccaagtctccttctgtcttgtgatggtcctcctgtttgctgtggacacaggactgtacttttcc

SEQ ID NO: 1871 - DNA, 1059 bp, synthetic construct
  source 1..1059: mol_type = other DNA
atggccttaccagtgaccgccttgctcctgccgctggccttgctgctccacgccgccaggccgcagctccagctgcaagagtctggacctggcctggtcaagcctagcgagacactgagcctgacctgtaccgtgtccggcgatagcatcagcagcggcgattactactggggctggatcagacagcctcctggcaaaggactggaatggatcggccacatctactacagcggcgtgacctactacaaccccagcctgaagtccagagtgaccatcagcgtggacaccagccggaaccagttctccctgaagctgtctagcgtgacagccgccgataccgccgtgtactactgcaccagagaggacagcagcaactggcggagtagaggccagggaacactggtcacagttagctctacgcgtggaatgaggactgaggatcttcccaaagctgtcgtctttctcgaaccccaatggtatcgggtgctcgaaaaagactctgtgacactgaaatgccaaggggcctactctcccgaggacaactccacacagtggtttcataatgagtccctcatcagctctcaggccagctcttatttcattgatgccgctacagtggacgactccggcgagtatcggtgtcagaccaatctgtctacactgtctgaccccgtgcagcttgaggtccacattggatggttgctcttgcaagccccacgctgggttttcaaagaggaagatccaatccatctgcggtgccacagctggaaaaacaccgctctccacaaagtcacatacctgcaaaatggcaaaggacgcaaatacttccatcacaattccgatttttacattccgaaggctaccctgaaagacagcggcagctatttctgccggggactcgtcggctccaagaatgtgtcctccgaaaccgtgaatatcacgattacccaaggactggctgtgcctacaatctctagcttctttccgcctggataccaagtctccttctgtcttgtgatggtcctcctgtttgctgtggacacaggactgtacttttcc

SEQ ID NO: 1872 - DNA, 1059 bp, synthetic construct
  source 1..1059: mol_type = other DNA
atggccttaccagtgaccgccttgctcctgccgctggccttgctgctccacgccgccaggccgcaactgcaactgcaagagtctggccctggcctggtcaagccttctgaaaccctgagcctgacctgtaccgtgtccggcggctctatcagcagcggcgattactactggggctggatcagacagcctccaggcaagggactcgaatggatcggcagcatcagctacagcggctccacctactacaacccaagcctgaagtccagagtgaccatcagcgtggacaccagcagaaaccagttctccctgaagctgagcagcgtgacagccgccgatacagccgtgtattattgcaccagagaggacagcagcaactggcggagtagaggacagggcacactggtcacagtgtcctctacgcgtggaatgaggactgaggatcttcccaaagctgtcgtctttctcgaaccccaatggtatcgggtgctcgaaaaagactctgtgacactgaaatgccaaggggcctactctcccgaggacaactccacacagtggtttcataatgagtccctcatcagctctcaggccagctcttatttcattgatgccgctacagtggacgactccggcgagtatcggtgtcagaccaatctgtctacactgtctgaccccgtgcagcttgaggtccacattggatggttgctcttgcaagccccacgctgggttttcaaagaggaagatccaatccatctgcggtgccacagctggaaaaacaccgctctccacaaagtcacatacctgcaaaatggcaaaggacgcaaatacttccatcacaattccgatttttacattccgaaggctaccctgaaagacagcggcagctatttctgccggggactcgtcggctccaagaatgtgtcctccgaaaccgtgaatatcacgattacccaaggactggctgtgcctacaatctctagcttctttccgcctggataccaagtctccttctgtcttgtgatggtcctcctgtttgctgtggacacaggactgtacttttcc

SEQ ID NO: 1873 - DNA, 1077 bp, synthetic construct
  source 1..1077: mol_type = other DNA
atggccttaccagtgaccgccttgctcctgccgctggccttgctgctccacgccgccaggccgcagctgcaactgcaagagtctggccccggactggtcaagccttctgaaacactggccctgacctgcaatgtgtccggcggctctatcagcagcagctcctattactggggctggatcagacagcctccaggcaagagactggaatggatcggcagcatctactacagcggcagcacatacttcaaccccagcctgaagtccagagtgaccatcagcgtggacacctccaagaaccagttctccctgaagctgagcagcgtgacagccgccgatacagccgtgtattactgtgctggcggcgactactatggccccgttggacaatggcccagcgattacagaggacagggaacccttgtgaccgtgtcctctacgcgtggaatgaggactgaggatcttcccaaagctgtcgtctttctcgaaccccaatggtatcgggtgctcgaaaaagactctgtgacactgaaatgccaaggggcctactctcccgaggacaactccacacagtggtttcataatgagtccctcatcagctctcaggccagctcttatttcattgatgccgctacagtggacgactccggcgagtatcggtgtcagaccaatctgtctacactgtctgaccccgtgcagcttgaggtccacattggatggttgctcttgcaagccccacgctgggttttcaaagaggaagatccaatccatctgcggtgccacagctggaaaaacaccgctctccacaaagtcacatacctgcaaaatggcaaaggacgcaaatacttccatcacaattccgatttttacattccgaaggctaccctgaaagacagcggcagctatttctgccggggactcgtcggctccaagaatgtgtcctccgaaaccgtgaatatcacgattacccaaggactggctgtgcctacaatctctagcttctttccgcctggataccaagtctccttctgtcttgtgatggtcctcctgtttgctgtggacacaggactgtacttttcc

SEQ ID NO: 1874 - DNA, 1095 bp, synthetic construct
  source 1..1095: mol_type = other DNA
atggccttaccagtgaccgccttgctcctgccgctggccttgctgctccacgccgccaggccggaagttcagctgcttgagtctggcggaggactggttcaacctggcggaagcctgagactgtcttgtgccgccagcggcttcatcttcagcagctacgccatgagctgggtccgacaggctcctggaaagggccaagaatgggtttccggcgttagcggcacaggcgtgaacacctactacgccgatagcgtgaagggcagattcaccatcagccgggacaacagcaagaacaccctgtacctccagatgaacagcctgagagccgaggacaccgccgtgtactattgtgcctctggcaaaggctgggacagcggctcttggtacgaggactatagaggccagggcaccctggtcacagtttcttcaacgcgtcctcgactgtgccttctaacgcgtggaatgaggactgaggatcttcccaaagctgtcgtctttctcgaaccccaatggtatcgggtgctcgaaaaagactctgtgacactgaaatgccaaggggcctactctcccgaggacaactccacacagtggtttcataatgagtccctcatcagctctcaggccagctcttatttcattgatgccgctacagtggacgactccggcgagtatcggtgtcagaccaatctgtctacactgtctgaccccgtgcagcttgaggtccacattggatggttgctcttgcaagccccacgctgggttttcaaagaggaagatccaatccatctgcggtgccacagctggaaaaacaccgctctccacaaagtcacatacctgcaaaatggcaaaggacgcaaatacttccatcacaattccgatttttacattccgaaggctaccctgaaagacagcggcagctatttctgccggggactcgtcggctccaagaatgtgtcctccgaaaccgtgaatatcacgattacccaaggactggctgtgcctacaatctctagcttctttccgcctggataccaagtctccttctgtcttgtgatggtcctcctgtttgctgtggacacaggactgtacttttcc

SEQ ID NO: 1875 - DNA, 1077 bp, synthetic construct
  source 1..1077: mol_type = other DNA
atggccttaccagtgaccgccttgctcctgccgctggccttgctgctccacgccgccaggccgcagctccagctgcaagagtctggacctggcctggtcaagcctagcgagacactgagcctgacctgtacagttagcggcggctctgtgtccagcagcagctattactggggctggatcagacagcctcctggcaagagactggaactgatcggcagcatctactacggcggctccacctacttcaaccccagcctgaaaagcagagtgaccatcagcgtggacaccagcaagaaccagttcagcctgaagctgagcagcgtgacagccgccgatacagccgtgtactattgtgccggcggagacacatacggccctgttggacaatggcccagcgactatagaggccagggcacactggtcacagtgtctagcacgcgtggaatgaggactgaggatcttcccaaagctgtcgtctttctcgaaccccaatggtatcgggtgctcgaaaaagactctgtgacactgaaatgccaaggggcctactctcccgaggacaactccacacagtggtttcataatgagtccctcatcagctctcaggccagctcttatttcattgatgccgctacagtggacgactccggcgagtatcggtgtcagaccaatctgtctacactgtctgaccccgtgcagcttgaggtccacattggatggttgctcttgcaagccccacgctgggttttcaaagaggaagatccaatccatctgcggtgccacagctggaaaaacaccgctctccacaaagtcacatacctgcaaaatggcaaaggacgcaaatacttccatcacaattccgatttttacattccgaaggctaccctgaaagacagcggcagctatttctgccggggactcgtcggctccaagaatgtgtcctccgaaaccgtgaatatcacgattacccaaggactggctgtgcctacaatctctagcttctttccgcctggataccaagtctccttctgtcttgtgatggtcctcctgtttgctgtggacacaggactgtacttttcc

SEQ ID NO: 1876 - DNA, 1071 bp, synthetic construct
  source 1..1071: mol_type = other DNA
atggccttaccagtgaccgccttgctcctgccgctggccttgctgctccacgccgccaggccggaagttcagctgcttgaaagcggtggcggcctggttcaacctggcggatctctgagactgagctgtgccgccagcggcttcatcttctccatctacgccatgtcctgggtccgacaggcccctggaaaaggactggaatgggtgtccggcatctctggcagcggcgtgaacacctactacgccgattctgtgaagggccgcttcatcatcagccgggacaacagcagaaacaccgtgtacctccagatgaacagcctgagagccgatgacaccgccgtgtaccactgcgccaatggcaaaggctgggacggcaacacttggtacgaggattacagaggacagggaaccctcgtgaccgtgtctagtacgcgtggaatgaggactgaggatcttcccaaagctgtcgtctttctcgaaccccaatggtatcgggtgctcgaaaaagactctgtgacactgaaatgccaaggggcctactctcccgaggacaactccacacagtggtttcataatgagtccctcatcagctctcaggccagctcttatttcattgatgccgctacagtggacgactccggcgagtatcggtgtcagaccaatctgtctacactgtctgaccccgtgcagcttgaggtccacattggatggttgctcttgcaagccccacgctgggttttcaaagaggaagatccaatccatctgcggtgccacagctggaaaaacaccgctctccacaaagtcacatacctgcaaaatggcaaaggacgcaaatacttccatcacaattccgatttttacattccgaaggctaccctgaaagacagcggcagctatttctgccggggactcgtcggctccaagaatgtgtcctccgaaaccgtgaatatcacgattacccaaggactggctgtgcctacaatctctagcttctttccgcctggataccaagtctccttctgtcttgtgatggtcctcctgtttgctgtggacacaggactgtacttttcc

SEQ ID NO: 1877 - DNA, 1056 bp, synthetic construct
  source 1..1056: mol_type = other DNA
atggccttaccagtgaccgccttgctcctgccgctggccttgctgctccacgccgccaggccggaagtgcaggttttggagtctggcggaggactggttcagcctggcggatctctgagactgtcttgtgccgccagcggcttcaccttcagcaactttgccatgagctgggtccgacaggcccctggcaaaggacttgaatgggtgtccacaatcagcggcagcgccggcacaacagattacgccgattctgtgaagggcagattcaccatcagccgggacaacagcaagaaaaccctgtacctccagatgaacagcctgcgcgtggaagataccgccgtgtactactgtgccgatggcagaggccccttcttcgattatcgcggccagggcacactggtcaccgtttcttctacgcgtggaatgaggactgaggatcttcccaaagctgtcgtctttctcgaaccccaatggtatcgggtgctcgaaaaagactctgtgacactgaaatgccaaggggcctactctcccgaggacaactccacacagtggtttcataatgagtccctcatcagctctcaggccagctcttatttcattgatgccgctacagtggacgactccggcgagtatcggtgtcagaccaatctgtctacactgtctgaccccgtgcagcttgaggtccacattggatggttgctcttgcaagccccacgctgggttttcaaagaggaagatccaatccatctgcggtgccacagctggaaaaacaccgctctccacaaagtcacatacctgcaaaatggcaaaggacgcaaatacttccatcacaattccgatttttacattccgaaggctaccctgaaagacagcggcagctatttctgccggggactcgtcggctccaagaatgtgtcctccgaaaccgtgaatatcacgattacccaaggactggctgtgcctacaatctctagcttctttccgcctggataccaagtctccttctgtcttgtgatggtcctcctgtttgctgtggacacaggactgtacttttcc

SEQ ID NO: 1878 - DNA, 1062 bp, synthetic construct
  source 1..1062: mol_type = other DNA
atggccttaccagtgaccgccttgctcctgccgctggccttgctgctccacgccgccaggccggaggtgcagctggttgaatctggcggaggactggttcagcctggcggatctctgagactgtcttgtgccgccagcggcttcaacatcaaggatacctgtatcggctgggttcgcagagcccctggcaaagaggaagaactggtcgccaaaatctgcaagtacagcggccacaccagatacgccgacagcgtgaagggcagattcaccatcagcgccgacaccagcaagaacaccgcctacctccagatgaacagcctgagagccgaggacaccgccgtgtactattgtgccgctgtgtccgtcagagatgggcactacaattactggggccagggcaccaccgtgaccgtttcttcaacgcgtggaatgaggactgaggatcttcccaaagctgtcgtctttctcgaaccccaatggtatcgggtgctcgaaaaagactctgtgacactgaaatgccaaggggcctactctcccgaggacaactccacacagtggtttcataatgagtccctcatcagctctcaggccagctcttatttcattgatgccgctacagtggacgactccggcgagtatcggtgtcagaccaatctgtctacactgtctgaccccgtgcagcttgaggtccacattggatggttgctcttgcaagccccacgctgggttttcaaagaggaagatccaatccatctgcggtgccacagctggaaaaacaccgctctccacaaagtcacatacctgcaaaatggcaaaggacgcaaatacttccatcacaattccgatttttacattccgaaggctaccctgaaagacagcggcagctatttctgccggggactcgtcggctccaagaatgtgtcctccgaaaccgtgaatatcacgattacccaaggactggctgtgcctacaatctctagcttctttccgcctggataccaagtctccttctgtcttgtgatggtcctcctgtttgctgtggacacaggactgtacttttcc

SEQ ID NO: 1879 - DNA, 1062 bp, synthetic construct
  source 1..1062: mol_type = other DNA
atggccttaccagtgaccgccttgctcctgccgctggccttgctgctccacgccgccaggccggaagtgcaactggtggaaagcggaggcggacttgttcaaccaggcggaagcctgagactgagctgtgccgcttccggctttaatatcaaagacacatgcatcggatgggttcgccgcgctccagggaaagaagaggaactggttgccgacatctgtccctacaagggcagcacaagatatgccgactccgtgaaaggccggtttaccatctctgccgacacctctaagaatacggcctatctgcaaatgaactctctgcgggccgaagatacagccgtgtattactgcgccatcgtgtctgccagagatggctactataactattggggacagggaaccacagtcacagtgtcctctacgcgtggaatgaggactgaggatcttcccaaagctgtcgtctttctcgaaccccaatggtatcgggtgctcgaaaaagactctgtgacactgaaatgccaaggggcctactctcccgaggacaactccacacagtggtttcataatgagtccctcatcagctctcaggccagctcttatttcattgatgccgctacagtggacgactccggcgagtatcggtgtcagaccaatctgtctacactgtctgaccccgtgcagcttgaggtccacattggatggttgctcttgcaagccccacgctgggttttcaaagaggaagatccaatccatctgcggtgccacagctggaaaaacaccgctctccacaaagtcacatacctgcaaaatggcaaaggacgcaaatacttccatcacaattccgatttttacattccgaaggctaccctgaaagacagcggcagctatttctgccggggactcgtcggctccaagaatgtgtcctccgaaaccgtgaatatcacgattacccaaggactggctgtgcctacaatctctagcttctttccgcctggataccaagtctccttctgtcttgtgatggtcctcctgtttgctgtggacacaggactgtacttttcc

SEQ ID NO: 1880 - DNA, 1062 bp, synthetic construct
  source 1..1062: mol_type = other DNA
atggccttaccagtgaccgccttgctcctgccgctggccttgctgctccacgccgccaggccggaagtgcagctgcttgagtctggcggaggactggttcaacctggcggaagcctgagactgtcttgtgccgccagcggcttcacctttagcagctacgccatgagctgggtccgacaggctcctggcaaaggactggaatgggtgtccgccatcacaggctctggcggcagcacatattacgccgactctgtgaagggcagattcaccatcagccgggacaacagcaagaacaccctgtacctccagatgaacagcctgagagccgaggacaccgccgtgtactactgtgccaaggatgaggatggcggctctctgctgggacacagaggacagggaacactggtcaccgtgtctagcacgcgtggaatgaggactgaggatcttcccaaagctgtcgtctttctcgaaccccaatggtatcgggtgctcgaaaaagactctgtgacactgaaatgccaaggggcctactctcccgaggacaactccacacagtggtttcataatgagtccctcatcagctctcaggccagctcttatttcattgatgccgctacagtggacgactccggcgagtatcggtgtcagaccaatctgtctacactgtctgaccccgtgcagcttgaggtccacattggatggttgctcttgcaagccccacgctgggttttcaaagaggaagatccaatccatctgcggtgccacagctggaaaaacaccgctctccacaaagtcacatacctgcaaaatggcaaaggacgcaaatacttccatcacaattccgatttttacattccgaaggctaccctgaaagacagcggcagctatttctgccggggactcgtcggctccaagaatgtgtcctccgaaaccgtgaatatcacgattacccaaggactggctgtgcctacaatctctagcttctttccgcctggataccaagtctccttctgtcttgtgatggtcctcctgtttgctgtggacacaggactgtacttttcc

SEQ ID NO: 1881 - DNA, 1062 bp, synthetic construct
  source 1..1062: mol_type = other DNA
atggccttaccagtgaccgccttgctcctgccgctggccttgctgctccacgccgccaggccggaagtgcagctgcttgagtctggcggcggactgattcaacctggcggaagcctgagactgagctgtgccgcttccggcttcacctttagcagccacgccatgacctgggtccgacaggctcctggaaaaggactggaatgggtgtccgccatcagcagcggcggcagctacacatattacgccgacagcgtgaagggcagattcaccatctccagagacaacagcaagaacaccctgtacctccagatgaacagcctgagagccgaggacaccgccgtgtactactgtgccaaggatgaggatggcggctctctgctgggacacagaggacagggaacactggtcaccgtgtctagcacgcgtggaatgaggactgaggatcttcccaaagctgtcgtctttctcgaaccccaatggtatcgggtgctcgaaaaagactctgtgacactgaaatgccaaggggcctactctcccgaggacaactccacacagtggtttcataatgagtccctcatcagctctcaggccagctcttatttcattgatgccgctacagtggacgactccggcgagtatcggtgtcagaccaatctgtctacactgtctgaccccgtgcagcttgaggtccacattggatggttgctcttgcaagccccacgctgggttttcaaagaggaagatccaatccatctgcggtgccacagctggaaaaacaccgctctccacaaagtcacatacctgcaaaatggcaaaggacgcaaatacttccatcacaattccgatttttacattccgaaggctaccctgaaagacagcggcagctatttctgccggggactcgtcggctccaagaatgtgtcctccgaaaccgtgaatatcacgattacccaaggactggctgtgcctacaatctctagcttctttccgcctggataccaagtctccttctgtcttgtgatggtcctcctgtttgctgtggacacaggactgtacttttcc

SEQ ID NO: 1882 - DNA, 1062 bp, synthetic construct
  source 1..1062: mol_type = other DNA
atggccttaccagtgaccgccttgctcctgccgctggccttgctgctccacgccgccaggccggaagtgcagctggttgaatctggcggaggactggttcagcctggcggatctctgagactgtcttgtgccgccagcggcttcagcttcagcgacttttggatgagctgggtccgacaggcccctggcaaaggacttgaatgggtgtccgccatcagcggcagcggcgattatacacactacgccgacagcgtgaagggcagattcaccatcagccgggacaacagcaagaacaccgtgtacctccagatgaacagcctgagagccgaggacagcgccgtgtactactgtgccaaggatgaggatggcggctctctgctgggacacagaggacagggaacactggtcaccgtgtctagcacgcgtggaatgaggactgaggatcttcccaaagctgtcgtctttctcgaaccccaatggtatcgggtgctcgaaaaagactctgtgacactgaaatgccaaggggcctactctcccgaggacaactccacacagtggtttcataatgagtccctcatcagctctcaggccagctcttatttcattgatgccgctacagtggacgactccggcgagtatcggtgtcagaccaatctgtctacactgtctgaccccgtgcagcttgaggtccacattggatggttgctcttgcaagccccacgctgggttttcaaagaggaagatccaatccatctgcggtgccacagctggaaaaacaccgctctccacaaagtcacatacctgcaaaatggcaaaggacgcaaatacttccatcacaattccgatttttacattccgaaggctaccctgaaagacagcggcagctatttctgccggggactcgtcggctccaagaatgtgtcctccgaaaccgtgaatatcacgattacccaaggactggctgtgcctacaatctctagcttctttccgcctggataccaagtctccttctgtcttgtgatggtcctcctgtttgctgtggacacaggactgtacttttcc

SEQ ID NO: 1883 - DNA, 1068 bp, synthetic construct
  source 1..1068: mol_type = other DNA
atggccttaccagtgaccgccttgctcctgccgctggccttgctgctccacgccgccaggccggaagtgcagctgcttgagtctggcggaggactggttcaacctggcggaagcctgagactgtcttgtgccgcctctggcttcgccttcagcatctacgatatgagctgggtccgacaggcccctggcaaaggacttgaatgggtgtccagcatcagcggcagcggcgactacatctactacgccgatagcgtgaagggcagattcaccatcagccgggacatcagcaagaacaccctgtacctccagatgaacagcctgagagccgaggacaccgccgtgtactactgtgccaaagaaggcaccggcgctaacagcagcctggccgattatagaggccagggcacactggtcaccgtgtctagtacgcgtggaatgaggactgaggatcttcccaaagctgtcgtctttctcgaaccccaatggtatcgggtgctcgaaaaagactctgtgacactgaaatgccaaggggcctactctcccgaggacaactccacacagtggtttcataatgagtccctcatcagctctcaggccagctcttatttcattgatgccgctacagtggacgactccggcgagtatcggtgtcagaccaatctgtctacactgtctgaccccgtgcagcttgaggtccacattggatggttgctcttgcaagccccacgctgggttttcaaagaggaagatccaatccatctgcggtgccacagctggaaaaacaccgctctccacaaagtcacatacctgcaaaatggcaaaggacgcaaatacttccatcacaattccgatttttacattccgaaggctaccctgaaagacagcggcagctatttctgccggggactcgtcggctccaagaatgtgtcctccgaaaccgtgaatatcacgattacccaaggactggctgtgcctacaatctctagcttctttccgcctggataccaagtctccttctgtcttgtgatggtcctcctgtttgctgtggacacaggactgtacttttcc

SEQ ID NO: 1884 - DNA, 1068 bp, synthetic construct
  source 1..1068: mol_type = other DNA
atggccttaccagtgaccgccttgctcctgccgctggccttgctgctccacgccgccaggccggaggttcagctgcttgagtctggcggaggactggttcaacctggcggaagcctgagactgtcttgtgccgccagcggcttcacctttagcagctacgccatgagctgggtccgacaggctcctggcaaaggactggaatgggtgtccagcatcagcggcagcggcgactacatctactacgccgatagcgtgaagggcagattcaccatcagccgggacatcagcaagaacaccctgtacctccagatgaacagcctgagagccgaggacaccgccgtgtactactgtgccaaagaaggcaccggcgctaacagcagcctggccgattatagaggccagggcacactggtcaccgtgtctagtacgcgtggaatgaggactgaggatcttcccaaagctgtcgtctttctcgaaccccaatggtatcgggtgctcgaaaaagactctgtgacactgaaatgccaaggggcctactctcccgaggacaactccacacagtggtttcataatgagtccctcatcagctctcaggccagctcttatttcattgatgccgctacagtggacgactccggcgagtatcggtgtcagaccaatctgtctacactgtctgaccccgtgcagcttgaggtccacattggatggttgctcttgcaagccccacgctgggttttcaaagaggaagatccaatccatctgcggtgccacagctggaaaaacaccgctctccacaaagtcacatacctgcaaaatggcaaaggacgcaaatacttccatcacaattccgatttttacattccgaaggctaccctgaaagacagcggcagctatttctgccggggactcgtcggctccaagaatgtgtcctccgaaaccgtgaatatcacgattacccaaggactggctgtgcctacaatctctagcttctttccgcctggataccaagtctccttctgtcttgtgatggtcctcctgtttgctgtggacacaggactgtacttttcc

SEQ ID NO: 1885 - DNA, 1059 bp, synthetic construct
  source 1..1059: mol_type = other DNA
atggccttaccagtgaccgccttgctcctgccgctggccttgctgctccacgccgccaggccgcaggtgcagctggttgaatctggcggaggactggttcagcctggcggatctctgagactgtcttgtgccgccagcggcttcaccttcaccaatcacgccatgagctgggtccgacaggcccctggaaaaggactggaactggtgtctagcatcagcggcaacggcagaaccacctactacgccgatagcgtgaagggcagattcaccatcagccgggacatcagcaagaacaccctggacctccagatgaacagcctgagagccgaggataccgccgtgtactactgtgccaaggatggcggagagacactggtggatagcagaggccagggcacactggtcacagtgtcatctacgcgtggaatgaggactgaggatcttcccaaagctgtcgtctttctcgaaccccaatggtatcgggtgctcgaaaaagactctgtgacactgaaatgccaaggggcctactctcccgaggacaactccacacagtggtttcataatgagtccctcatcagctctcaggccagctcttatttcattgatgccgctacagtggacgactccggcgagtatcggtgtcagaccaatctgtctacactgtctgaccccgtgcagcttgaggtccacattggatggttgctcttgcaagccccacgctgggttttcaaagaggaagatccaatccatctgcggtgccacagctggaaaaacaccgctctccacaaagtcacatacctgcaaaatggcaaaggacgcaaatacttccatcacaattccgatttttacattccgaaggctaccctgaaagacagcggcagctatttctgccggggactcgtcggctccaagaatgtgtcctccgaaaccgtgaatatcacgattacccaaggactggctgtgcctacaatctctagcttctttccgcctggataccaagtctccttctgtcttgtgatggtcctcctgtttgctgtggacacaggactgtacttttcc

SEQ ID NO: 1886 - DNA, 1062 bp, synthetic construct
  source 1..1062: mol_type = other DNA
atggccttaccagtgaccgccttgctcctgccgctggccttgctgctccacgccgccaggccggaagtgcagctgcttgaaagtggcggcggactgattcagcctggcggatctctgagactgagctgtgccgccagcggcttcaccttttctagccacgccatgacctgggtccgacaggcacctggaaaagggcttgaatgggtgtccgccatcagcggctctggcgattacacacactacgccgacagcgtgaagggcagattcaccatcagcagagacaacagcaagaacaccgtgtacctccagatgaacagcctgagagccgaggacagcgccgtgtattattgcgccaaggatgaggatggcggcagcctgcttggacacagaggacaaggcaccctggtcaccgtttcttccacgcgtggaatgaggactgaggatcttcccaaagctgtcgtctttctcgaaccccaatggtatcgggtgctcgaaaaagactctgtgacactgaaatgccaaggggcctactctcccgaggacaactccacacagtggtttcataatgagtccctcatcagctctcaggccagctcttatttcattgatgccgctacagtggacgactccggcgagtatcggtgtcagaccaatctgtctacactgtctgaccccgtgcagcttgaggtccacattggatggttgctcttgcaagccccacgctgggttttcaaagaggaagatccaatccatctgcggtgccacagctggaaaaacaccgctctccacaaagtcacatacctgcaaaatggcaaaggacgcaaatacttccatcacaattccgatttttacattccgaaggctaccctgaaagacagcggcagctatttctgccggggactcgtcggctccaagaatgtgtcctccgaaaccgtgaatatcacgattacccaaggactggctgtgcctacaatctctagcttctttccgcctggataccaagtctccttctgtcttgtgatggtcctcctgtttgctgtggacacaggactgtacttttcc

SEQ ID NO: 1887 - DNA, 1065 bp, synthetic construct
  source 1..1065: mol_type = other DNA
atggccttaccagtgaccgccttgctcctgccgctggccttgctgctccacgccgccaggccgcaggttcagctgcaagagtctggcggaggactggttcaggctggcgatagcctgagactgtcttgtgccgcttctggcagagccgtgtccagcctgtttatgggctggtttcggagagcccctggcaaagagagagaactggttgccgccatcagccggtacagcctgtacacctactacgccgacagcgtgaagggcagattcaccatcagcgccgacaacgccaagaacgccgtgtacctccagatgaacagcctgaagcctgaggacacagccgtgtactactgcgccagcaaacttgagtacaccagcaacgactacgacagctggggccagggaacccaagtgacagtctcttctacgcgtggaatgaggactgaggatcttcccaaagctgtcgtctttctcgaaccccaatggtatcgggtgctcgaaaaagactctgtgacactgaaatgccaaggggcctactctcccgaggacaactccacacagtggtttcataatgagtccctcatcagctctcaggccagctcttatttcattgatgccgctacagtggacgactccggcgagtatcggtgtcagaccaatctgtctacactgtctgaccccgtgcagcttgaggtccacattggatggttgctcttgcaagccccacgctgggttttcaaagaggaagatccaatccatctgcggtgccacagctggaaaaacaccgctctccacaaagtcacatacctgcaaaatggcaaaggacgcaaatacttccatcacaattccgatttttacattccgaaggctaccctgaaagacagcggcagctatttctgccggggactcgtcggctccaagaatgtgtcctccgaaaccgtgaatatcacgattacccaaggactggctgtgcctacaatctctagcttctttccgcctggataccaagtctccttctgtcttgtgatggtcctcctgtttgctgtggacacaggactgtacttttcc

SEQ ID NO: 1888 - DNA, 1065 bp, synthetic construct
  source 1..1065: mol_type = other DNA
atggccttaccagtgaccgccttgctcctgccgctggccttgctgctccacgccgccaggccggaagttcagctgcaagagtctggcggaggactggttcaacctggcggaagcctgagactgtcttgtgccgcctctggcagaaccttcagcagcctgttcatgggctggttcagacaggcccctggcaaagagagagaactggtcgccgccatcagccggtacagcctgtacacctactacgccgacagcgtgaagggcagattcaccatcagcgccgacaacgccaagaacgccgtgtacctccagatgaacagcctgaagccagaggacacagccgtgtactactgcgccagcaaacttgagtacaccagcaacgactacgacagctggggccagggaacccaagtgacagtctcttctacgcgtggaatgaggactgaggatcttcccaaagctgtcgtctttctcgaaccccaatggtatcgggtgctcgaaaaagactctgtgacactgaaatgccaaggggcctactctcccgaggacaactccacacagtggtttcataatgagtccctcatcagctctcaggccagctcttatttcattgatgccgctacagtggacgactccggcgagtatcggtgtcagaccaatctgtctacactgtctgaccccgtgcagcttgaggtccacattggatggttgctcttgcaagccccacgctgggttttcaaagaggaagatccaatccatctgcggtgccacagctggaaaaacaccgctctccacaaagtcacatacctgcaaaatggcaaaggacgcaaatacttccatcacaattccgatttttacattccgaaggctaccctgaaagacagcggcagctatttctgccggggactcgtcggctccaagaatgtgtcctccgaaaccgtgaatatcacgattacccaaggactggctgtgcctacaatctctagcttctttccgcctggataccaagtctccttctgtcttgtgatggtcctcctgtttgctgtggacacaggactgtacttttcc

SEQ ID NO: 1889 - DNA, 1065 bp, synthetic construct
  source 1..1065: mol_type = other DNA
atggccttaccagtgaccgccttgctcctgccgctggccttgctgctccacgccgccaggccggaagttcagctgcaagagtctggcggaggactggttcaacctggcggaagcctgagactgtcttgtgccgcctctggcagaaccttcagcagcctgtttatgggctgggtccgacaggcccctggcaaaggactggaactggtgtctgccatcagccggtacagcctgtacacctactacgccgacagcgtgaagggcagattcaccatcagcagagacaacgccaagaacaccctgtacctccagatgaacagcctgcggcctgaggataccgccgtgtactactgcgccagcaaacttgagtacaccagcaacgactacgacagctggggccagggaacactggtcacagtctcttctacgcgtggaatgaggactgaggatcttcccaaagctgtcgtctttctcgaaccccaatggtatcgggtgctcgaaaaagactctgtgacactgaaatgccaaggggcctactctcccgaggacaactccacacagtggtttcataatgagtccctcatcagctctcaggccagctcttatttcattgatgccgctacagtggacgactccggcgagtatcggtgtcagaccaatctgtctacactgtctgaccccgtgcagcttgaggtccacattggatggttgctcttgcaagccccacgctgggttttcaaagaggaagatccaatccatctgcggtgccacagctggaaaaacaccgctctccacaaagtcacatacctgcaaaatggcaaaggacgcaaatacttccatcacaattccgatttttacattccgaaggctaccctgaaagacagcggcagctatttctgccggggactcgtcggctccaagaatgtgtcctccgaaaccgtgaatatcacgattacccaaggactggctgtgcctacaatctctagcttctttccgcctggataccaagtctccttctgtcttgtgatggtcctcctgtttgctgtggacacaggactgtacttttcc

SEQ ID NO: 1890 - DNA, 1089 bp, synthetic construct
  source 1..1089: mol_type = other DNA
atggccttaccagtgaccgccttgctcctgccgctggccttgctgctccacgccgccaggccggaagtgcagctggttgaatctggcggaggactggttcagcctggcggatctctgagactgagctgtgaagccagcggcttcgccagcgacgattacatcatcggctggttcagacaggcccctggcaaagagagagagggcgtcagctgcatcagctctaagtacgccaacaccgtgtacaccgacagcgtgaagggcagattcagactgagcagaggcaccgccaagaataccgtgtacctccagatgagcgccctgaagcctgaggataccgccgtgtactactgcgctatggacagccgcagagtgacatgccctgagatcagcaccatgcaccggaacttcgattcttggggccagggcacactggtcacagtgtcatctacgcgtggaatgaggactgaggatcttcccaaagctgtcgtctttctcgaaccccaatggtatcgggtgctcgaaaaagactctgtgacactgaaatgccaaggggcctactctcccgaggacaactccacacagtggtttcataatgagtccctcatcagctctcaggccagctcttatttcattgatgccgctacagtggacgactccggcgagtatcggtgtcagaccaatctgtctacactgtctgaccccgtgcagcttgaggtccacattggatggttgctcttgcaagccccacgctgggttttcaaagaggaagatccaatccatctgcggtgccacagctggaaaaacaccgctctccacaaagtcacatacctgcaaaatggcaaaggacgcaaatacttccatcacaattccgatttttacattccgaaggctaccctgaaagacagcggcagctatttctgccggggactcgtcggctccaagaatgtgtcctccgaaaccgtgaatatcacgattacccaaggactggctgtgcctacaatctctagcttctttccgcctggataccaagtctccttctgtcttgtgatggtcctcctgtttgctgtggacacaggactgtacttttcc

SEQ ID NO: 1891 - DNA, 1089 bp, synthetic construct
  source 1..1089: mol_type = other DNA
atggccttaccagtgaccgccttgctcctgccgctggccttgctgctccacgccgccaggccggaagtgcagctggttgaatctggcggaggactggttcagcctggcggatctctgagactgtcttgtgccgcctctggcttcgccagcgactactatatcatcggctggttcagacaggcccctggcaaagagagagagggcgtcagctgtatcagcagcagatacgccaacaccaactacgccgacagcgtgaagggcagattcaccatcagccgggacaacgccaagaacaccgtgtacctccagatgaacagcctgaagcctgaggacaccgccgtgtactactgtgccgccgacaccagaagatacacctgtcctgacattgccaccatgcaccggaacttcgattcttggggccagggcacactggtcaccgtttcttctacgcgtggaatgaggactgaggatcttcccaaagctgtcgtctttctcgaaccccaatggtatcgggtgctcgaaaaagactctgtgacactgaaatgccaaggggcctactctcccgaggacaactccacacagtggtttcataatgagtccctcatcagctctcaggccagctcttatttcattgatgccgctacagtggacgactccggcgagtatcggtgtcagaccaatctgtctacactgtctgaccccgtgcagcttgaggtccacattggatggttgctcttgcaagccccacgctgggttttcaaagaggaagatccaatccatctgcggtgccacagctggaaaaacaccgctctccacaaagtcacatacctgcaaaatggcaaaggacgcaaatacttccatcacaattccgatttttacattccgaaggctaccctgaaagacagcggcagctatttctgccggggactcgtcggctccaagaatgtgtcctccgaaaccgtgaatatcacgattacccaaggactggctgtgcctacaatctctagcttctttccgcctggataccaagtctccttctgtcttgtgatggtcctcctgtttgctgtggacacaggactgtacttttcc

SEQ ID NO: 1892 - DNA, 1077 bp, synthetic construct
  source 1..1077: mol_type = other DNA
atggccttaccagtgaccgccttgctcctgccgctggccttgctgctccacgccgccaggccggaagtgcaactggtggaatctggaggctctctggtgcagccagggggaagcctgagactgtcttgtgccgcttccggcttcaccttcgacgactacgccatgagctgggtgcgccaggtgccaggcaaaggcctggaatgggtgtccagcatcaactggagcggcacccacaccgattacgccgactccgtgaaaggcagattcacaatcagcagaaacaacgccaacaataccctgtacctgcagatgaactccctgaagtctgaggatacagcagtgtattattgcgccaagaactggcgggacgccggcaccacttggtttgagaaaagcggctctgccggacagggaacccaagtgacagtgtcctccacgcgtggaatgaggactgaggatcttcccaaagctgtcgtctttctcgaaccccaatggtatcgggtgctcgaaaaagactctgtgacactgaaatgccaaggggcctactctcccgaggacaactccacacagtggtttcataatgagtccctcatcagctctcaggccagctcttatttcattgatgccgctacagtggacgactccggcgagtatcggtgtcagaccaatctgtctacactgtctgaccccgtgcagcttgaggtccacattggatggttgctcttgcaagccccacgctgggttttcaaagaggaagatccaatccatctgcggtgccacagctggaaaaacaccgctctccacaaagtcacatacctgcaaaatggcaaaggacgcaaatacttccatcacaattccgatttttacattccgaaggctaccctgaaagacagcggcagctatttctgccggggactcgtcggctccaagaatgtgtcctccgaaaccgtgaatatcacgattacccaaggactggctgtgcctacaatctctagcttctttccgcctggataccaagtctccttctgtcttgtgatggtcctcctgtttgctgtggacacaggactgtacttttcc

SEQ ID NO: 1893 - DNA, 1059 bp, synthetic construct
  source 1..1059: mol_type = other DNA
atggccttaccagtgaccgccttgctcctgccgctggccttgctgctccacgccgccaggccggaggtgcaactggtggaaagcggcggaggcctggtgcaggctggcggatctctgagactgagctgtgccgccagcggcatcaccttcagcatcaacacaatgggctggtacagacaggcccctggcaagcagagggaactggtggccctgatctccagcatcggcgacacctactacgccgacagcgtgaagggccggttcaccatcagccgggacaacgccaagaacaccgtgtacctccagatgaacagcctgaagcccgaggacaccgccgtgtactactgcaagcggttcagaacagccgcccagggcaccgattattggggccagggaacacaagtgaccgtgtcctctacgcgtggaatgaggactgaggatcttcccaaagctgtcgtctttctcgaaccccaatggtatcgggtgctcgaaaaagactctgtgacactgaaatgccaaggggcctactctcccgaggacaactccacacagtggtttcataatgagtccctcatcagctctcaggccagctcttatttcattgatgccgctacagtggacgactccggcgagtatcggtgtcagaccaatctgtctacactgtctgaccccgtgcagcttgaggtccacattggatggttgctcttgcaagccccacgctgggttttcaaagaggaagatccaatccatctgcggtgccacagctggaaaaacaccgctctccacaaagtcacatacctgcaaaatggcaaaggacgcaaatacttccatcacaattccgatttttacattccgaaggctaccctgaaagacagcggcagctatttctgccggggactcgtcggctccaagaatgtgtcctccgaaaccgtgaatatcacgattacccaaggactggctgtgcctacaatctctagcttctttccgcctggataccaagtctccttctgtcttgtgatggtcctcctgtttgctgtggacacaggactgtacttttcc

SEQ ID NO: 1894 - DNA, 1062 bp, synthetic construct
  source 1..1062: mol_type = other DNA
atggccttaccagtgaccgccttgctcctgccgctggccttgctgctccacgccgccaggccggaagtgcaactggtggaatctgggggcggactggtgcagccaggcggaagtctgaggctgtcttgtgccgcctccggcagcatcttcggcttcaacgacatggcctggtatcggcaggctcccggaaaacagcgcgagctggtggctctgattagcagagtgggcgtgaccagcagcgccgactctgtgaagggcagattcacaatctccagagtgaacgccaaggatacagtgtacctccagatgaactctctgaaacctgaggatacagcagtgtactattgctacatggaccagcggctggacggcagcacactggcctactggggacagggaactcaagtgacagtgtctagcacgcgtggaatgaggactgaggatcttcccaaagctgtcgtctttctcgaaccccaatggtatcgggtgctcgaaaaagactctgtgacactgaaatgccaaggggcctactctcccgaggacaactccacacagtggtttcataatgagtccctcatcagctctcaggccagctcttatttcattgatgccgctacagtggacgactccggcgagtatcggtgtcagaccaatctgtctacactgtctgaccccgtgcagcttgaggtccacattggatggttgctcttgcaagccccacgctgggttttcaaagaggaagatccaatccatctgcggtgccacagctggaaaaacaccgctctccacaaagtcacatacctgcaaaatggcaaaggacgcaaatacttccatcacaattccgatttttacattccgaaggctaccctgaaagacagcggcagctatttctgccggggactcgtcggctccaagaatgtgtcctccgaaaccgtgaatatcacgattacccaaggactggctgtgcctacaatctctagcttctttccgcctggataccaagtctccttctgtcttgtgatggtcctcctgtttgctgtggacacaggactgtacttttcc

SEQ ID NO: 1895 - DNA, 1065 bp, synthetic construct
  source 1..1065: mol_type = other DNA
atggccttaccagtgaccgccttgctcctgccgctggccttgctgctccacgccgccaggccggacgtgcaactcgtggaatccggcggaggcctggtgcagcctggcggatctctgagactgagctgtgccgccagcggctctatcggcggactgaatgccatggcctggtacagacaggcccctggcaaagaacgggaactggtggccggcatctttggcgtgggcagcaccagatacgccgacagcgtgaagggccggttcaccatcagccgggacaacagcaagaacaccgtgtacctgcagatgaacagcctgcggcccgaggataccgccgtgtactactgcagaatgtccagcgtgaccagaggctccagcgactactggggccagggaacacttgtgaccgtgtccagtctcgagacgcgtggaatgaggactgaggatcttcccaaagctgtcgtctttctcgaaccccaatggtatcgggtgctcgaaaaagactctgtgacactgaaatgccaaggggcctactctcccgaggacaactccacacagtggtttcataatgagtccctcatcagctctcaggccagctcttatttcattgatgccgctacagtggacgactccggcgagtatcggtgtcagaccaatctgtctacactgtctgaccccgtgcagcttgaggtccacattggatggttgctcttgcaagccccacgctgggttttcaaagaggaagatccaatccatctgcggtgccacagctggaaaaacaccgctctccacaaagtcacatacctgcaaaatggcaaaggacgcaaatacttccatcacaattccgatttttacattccgaaggctaccctgaaagacagcggcagctatttctgccggggactcgtcggctccaagaatgtgtcctccgaaaccgtgaatatcacgattacccaaggactggctgtgcctacaatctctagcttctttccgcctggataccaagtctccttctgtcttgtgatggtcctcctgtttgctgtggacacaggactgtacttttcc

SEQ ID NO: 1896 - DNA, 1080 bp, synthetic construct
  source 1..1080: mol_type = other DNA
atggccttaccagtgaccgccttgctcctgccgctggccttgctgctccacgccgccaggccggaagtgcaactggtggagtccggcggtggactggtacagcctgggggttcactgcgcctgtcctgcgccgccagcggaagaacctattacctcaatgctatgggttggttccgccaggccccaggaaaggagcgcgagttcgtggcggctattgactggtccgaggggaacaaggactatgctgattccgtgaagggcaggtttaccatcagccgggataattcaaaaaatactgtttatttgcagatgaactctcttagaccagaagacactgctgtctattactgcgccgctgacacccctccttggggaccactgatttatatcgaaagctatgattcctgggggcagggcacactcgtcaccgtgagtagcacgcgtggaatgaggactgaggatcttcccaaagctgtcgtctttctcgaaccccaatggtatcgggtgctcgaaaaagactctgtgacactgaaatgccaaggggcctactctcccgaggacaactccacacagtggtttcataatgagtccctcatcagctctcaggccagctcttatttcattgatgccgctacagtggacgactccggcgagtatcggtgtcagaccaatctgtctacactgtctgaccccgtgcagcttgaggtccacattggatggttgctcttgcaagccccacgctgggttttcaaagaggaagatccaatccatctgcggtgccacagctggaaaaacaccgctctccacaaagtcacatacctgcaaaatggcaaaggacgcaaatacttccatcacaattccgatttttacattccgaaggctaccctgaaagacagcggcagctatttctgccggggactcgtcggctccaagaatgtgtcctccgaaaccgtgaatatcacgattacccaaggactggctgtgcctacaatctctagcttctttccgcctggataccaagtctccttctgtcttgtgatggtcctcctgtttgctgtggacacaggactgtacttttcc

SEQ ID NO: 1897 - DNA, 1074 bp, synthetic construct
  source 1..1074: mol_type = other DNA
atggccttaccagtgaccgccttgctcctgccgctggccttgctgctccacgccgccaggccggaggtgcaactggtggaatccgggggaggcagcgtgcaggctgggggatcactgagactgtcttgtgctgcctccggcgacacctacggcagctattggatgggatggtttcggcaggctcccggaaaagaacgggaaggcgtggccgccatcaacagaggcggcggatacaccgtgtacgccgactctgtgaagggcagattcacaatctccagagacacagccaagaatactgtgtacctgcagatgaactccctgcgccccgacgataccgccgactattattgcgccgcttccggcgtgctgggcggcctgcatgaggactggttcaattattggggacagggaacacttgtgacagtgtccagcacgcgtggaatgaggactgaggatcttcccaaagctgtcgtctttctcgaaccccaatggtatcgggtgctcgaaaaagactctgtgacactgaaatgccaaggggcctactctcccgaggacaactccacacagtggtttcataatgagtccctcatcagctctcaggccagctcttatttcattgatgccgctacagtggacgactccggcgagtatcggtgtcagaccaatctgtctacactgtctgaccccgtgcagcttgaggtccacattggatggttgctcttgcaagccccacgctgggttttcaaagaggaagatccaatccatctgcggtgccacagctggaaaaacaccgctctccacaaagtcacatacctgcaaaatggcaaaggacgcaaatacttccatcacaattccgatttttacattccgaaggctaccctgaaagacagcggcagctatttctgccggggactcgtcggctccaagaatgtgtcctccgaaaccgtgaatatcacgattacccaaggactggctgtgcctacaatctctagcttctttccgcctggataccaagtctccttctgtcttgtgatggtcctcctgtttgctgtggacacaggactgtacttttcc

SEQ ID NO: 1898 - DNA, 1071 bp, synthetic construct
  source 1..1071: mol_type = other DNA
atggccttaccagtgaccgccttgctcctgccgctggccttgctgctccacgccgccaggccggttcagctcgtggaaagcggtggcggaagtgtgcaggccggaggcagtttgcgcctgagctgcgctgcttccggcgatacatacgggtcttactggatgggctggtttaggcaggcacctggacaagaaagagaagctgtggccgctattaacaggggaggtggctataccgtttatgctgattccgtgaagggccgattcacaatctcccgggataacgccaaaaacactctgtacctgcagatgaactcccttaggcccgatgacacagccgattactattgtgcggcctccggcgtgctgggtggtctgcatgaggattggttcaactactgggggcaaggcaccctcgtaaccgtgagtagcacgcgtggaatgaggactgaggatcttcccaaagctgtcgtctttctcgaaccccaatggtatcgggtgctcgaaaaagactctgtgacactgaaatgccaaggggcctactctcccgaggacaactccacacagtggtttcataatgagtccctcatcagctctcaggccagctcttatttcattgatgccgctacagtggacgactccggcgagtatcggtgtcagaccaatctgtctacactgtctgaccccgtgcagcttgaggtccacattggatggttgctcttgcaagccccacgctgggttttcaaagaggaagatccaatccatctgcggtgccacagctggaaaaacaccgctctccacaaagtcacatacctgcaaaatggcaaaggacgcaaatacttccatcacaattccgatttttacattccgaaggctaccctgaaagacagcggcagctatttctgccggggactcgtcggctccaagaatgtgtcctccgaaaccgtgaatatcacgattacccaaggactggctgtgcctacaatctctagcttctttccgcctggataccaagtctccttctgtcttgtgatggtcctcctgtttgctgtggacacaggactgtacttttcc

SEQ ID NO: 1899 - DNA, 1077 bp, synthetic construct
  source 1..1077: mol_type = other DNA
atggccttaccagtgaccgccttgctcctgccgctggccttgctgctccacgccgccaggccggaggtgcaactggtggaaagcggcggaggctctgtgcagacaggcggctctctgagactgacctgtgccgccagcggcagaaccagcagatcctatggcatgggctggttcagacaggcccctggcaaagaacgcgagttcgtgtccggcatctcttggagaggcgacagcaccggctacgccgatagcgtgaagggccggttcaccatcagccgggacaacgccaagaacaccgtggacctgcagatgaacagcctgaagcccgaggacaccgccatctactactgtgccgctgccgccggatctgcttggtacggcacactgtacgagtacgactactggggccagggcacccttgtgaccgtgtcatctacgcgtggaatgaggactgaggatcttcccaaagctgtcgtctttctcgaaccccaatggtatcgggtgctcgaaaaagactctgtgacactgaaatgccaaggggcctactctcccgaggacaactccacacagtggtttcataatgagtccctcatcagctctcaggccagctcttatttcattgatgccgctacagtggacgactccggcgagtatcggtgtcagaccaatctgtctacactgtctgaccccgtgcagcttgaggtccacattggatggttgctcttgcaagccccacgctgggttttcaaagaggaagatccaatccatctgcggtgccacagctggaaaaacaccgctctccacaaagtcacatacctgcaaaatggcaaaggacgcaaatacttccatcacaattccgatttttacattccgaaggctaccctgaaagacagcggcagctatttctgccggggactcgtcggctccaagaatgtgtcctccgaaaccgtgaatatcacgattacccaaggactggctgtgcctacaatctctagcttctttccgcctggataccaagtctccttctgtcttgtgatggtcctcctgtttgctgtggacacaggactgtacttttcc

SEQ ID NO: 1900 - DNA, 1077 bp, synthetic construct
  source 1..1077: mol_type = other DNA
atggccttaccagtgaccgccttgctcctgccgctggccttgctgctccacgccgccaggccggaggtgcagctcgtagaatctggaggtggttccgtgcaagccggaggatcattgcgactgacctgcgcagcgagcggatctacttctcgctcttacggtatgggatggttcagacaggctcctgggaaagagcgcgagttcgtttcaggcatctcctggaggggggacagcaccggctacgcagatagcgtgaagggcaggttcacgatcagccgagacaacgccaaaaacaccgtcgatctgcaaatgaatagtctgaagcccgaagatactgcgatctactactgtgccgccgcagcagggtccacctggtacggcacactctacgagtacgactactgggggcagggaaccctggtaaccgtgtcctctacgcgtggaatgaggactgaggatcttcccaaagctgtcgtctttctcgaaccccaatggtatcgggtgctcgaaaaagactctgtgacactgaaatgccaaggggcctactctcccgaggacaactccacacagtggtttcataatgagtccctcatcagctctcaggccagctcttatttcattgatgccgctacagtggacgactccggcgagtatcggtgtcagaccaatctgtctacactgtctgaccccgtgcagcttgaggtccacattggatggttgctcttgcaagccccacgctgggttttcaaagaggaagatccaatccatctgcggtgccacagctggaaaaacaccgctctccacaaagtcacatacctgcaaaatggcaaaggacgcaaatacttccatcacaattccgatttttacattccgaaggctaccctgaaagacagcggcagctatttctgccggggactcgtcggctccaagaatgtgtcctccgaaaccgtgaatatcacgattacccaaggactggctgtgcctacaatctctagcttctttccgcctggataccaagtctccttctgtcttgtgatggtcctcctgtttgctgtggacacaggactgtacttttcc

SEQ ID NO: 1901 - DNA, 1080 bp, synthetic construct
  source 1..1080: mol_type = other DNA
atggccttaccagtgaccgccttgctcctgccgctggccttgctgctccacgccgccaggccggatgttcagttggtggagtctggtggcggtttggtgcagccaggtggctccctgcgactcagttgtgcagcctccgggttcattctggattactacgctattggttggtttcgacaggcccccggaaaggagagagagggcgtgctctgcattgatgccagcgacgacattacctactacgccgattctgtgaagggccgcttcaccatcagtagagacaatagcaagaatacagtctacctgcagatgaactccctgcgcccagaagacactgccgtctactactgtgctacccctatcgggctttcttcctcttgccttctcgaatatgactacgattactgggggcaggggacgctggtcaccgtgtctagcacgcgtggaatgaggactgaggatcttcccaaagctgtcgtctttctcgaaccccaatggtatcgggtgctcgaaaaagactctgtgacactgaaatgccaaggggcctactctcccgaggacaactccacacagtggtttcataatgagtccctcatcagctctcaggccagctcttatttcattgatgccgctacagtggacgactccggcgagtatcggtgtcagaccaatctgtctacactgtctgaccccgtgcagcttgaggtccacattggatggttgctcttgcaagccccacgctgggttttcaaagaggaagatccaatccatctgcggtgccacagctggaaaaacaccgctctccacaaagtcacatacctgcaaaatggcaaaggacgcaaatacttccatcacaattccgatttttacattccgaaggctaccctgaaagacagcggcagctatttctgccggggactcgtcggctccaagaatgtgtcctccgaaaccgtgaatatcacgattacccaaggactggctgtgcctacaatctctagcttctttccgcctggataccaagtctccttctgtcttgtgatggtcctcctgtttgctgtggacacaggactgtacttttcc

SEQ ID NO: 1902 - DNA, 1083 bp, synthetic construct
  source 1..1083: mol_type = other DNA
atggccttaccagtgaccgccttgctcctgccgctggccttgctgctccacgccgccaggccggaggtgcaactggtggaaagcggcggaggactggtgcaggctggcgatagcctgagactgagctgtgccgcctccggcagagccttcagcagatatgccatgggctggttcagacaggcccctggcaaagaacgcgagttcgtggccgccatcggctggggacctagcaagaccaactacgccgacagcgtgaagggccggttcaccatcagccgggacaacgccaagaacaccgtgtacctgcagatgaacaccctgaagcccgaggacaccgccgtgtactcttgcgccgccaagttcgtgaacaccgacagcacctggtcccgcagcgagatgtacacctattggggccagggcaccctcgtgaccgtgtctagtacgcgtggaatgaggactgaggatcttcccaaagctgtcgtctttctcgaaccccaatggtatcgggtgctcgaaaaagactctgtgacactgaaatgccaaggggcctactctcccgaggacaactccacacagtggtttcataatgagtccctcatcagctctcaggccagctcttatttcattgatgccgctacagtggacgactccggcgagtatcggtgtcagaccaatctgtctacactgtctgaccccgtgcagcttgaggtccacattggatggttgctcttgcaagccccacgctgggttttcaaagaggaagatccaatccatctgcggtgccacagctggaaaaacaccgctctccacaaagtcacatacctgcaaaatggcaaaggacgcaaatacttccatcacaattccgatttttacattccgaaggctaccctgaaagacagcggcagctatttctgccggggactcgtcggctccaagaatgtgtcctccgaaaccgtgaatatcacgattacccaaggactggctgtgcctacaatctctagcttctttccgcctggataccaagtctccttctgtcttgtgatggtcctcctgtttgctgtggacacaggactgtacttttcc

SEQ ID NO: 1903 - DNA, 1071 bp, synthetic construct
  source 1..1071: mol_type = other DNA
atggccttaccagtgaccgccttgctcctgccgctggccttgctgctccacgccgccaggccggaggtgcagctggtagaatccggcgggggacttgtacaggctggtggtagtctgagactgagctgtgtggcctccggcatcagcagcagcaagcggaacatgggatggtataggcaagcccctggtaagcagagggaatccgtggctacaatcagcagcggcggcaacaaggactacaccgacgccgtgaaggacaggttcaccatctccagggacaccaccaagaacaccgtgtacctgcagatgaactccctcaagcccgaggacaccgccgtgtactactgcaagatcgaggccggcacaggctgggccaccagaagaggctacacatactgggggcagggaacactggtgaccgtgagctccacgcgtggaatgaggactgaggatcttcccaaagctgtcgtctttctcgaaccccaatggtatcgggtgctcgaaaaagactctgtgacactgaaatgccaaggggcctactctcccgaggacaactccacacagtggtttcataatgagtccctcatcagctctcaggccagctcttatttcattgatgccgctacagtggacgactccggcgagtatcggtgtcagaccaatctgtctacactgtctgaccccgtgcagcttgaggtccacattggatggttgctcttgcaagccccacgctgggttttcaaagaggaagatccaatccatctgcggtgccacagctggaaaaacaccgctctccacaaagtcacatacctgcaaaatggcaaaggacgcaaatacttccatcacaattccgatttttacattccgaaggctaccctgaaagacagcggcagctatttctgccggggactcgtcggctccaagaatgtgtcctccgaaaccgtgaatatcacgattacccaaggactggctgtgcctacaatctctagcttctttccgcctggataccaagtctccttctgtcttgtgatggtcctcctgtttgctgtggacacaggactgtacttttcc

SEQ ID NO: 1904 - DNA, 1041 bp, synthetic construct
  source 1..1041: mol_type = other DNA
atggccttaccagtgaccgccttgctcctgccgctggccttgctgctccacgccgccaggccgcaggtgcaactggtgcagtctggcggagggctggtgcagccagggggatctctgagactgagctgtgccgccagcgacttcgacttcgccgcctacgagatgagctgggtgcgccaggctcctggacagggactggaatgggtggccatcatcagccacgacggcatcgacaagtattacaccgacagcgtgaagggccggttcaccatcagccgggacaacagcaagaacaccctgtacctgcagatgaataccctgcgggccgaggacaccgccacctactattgcctgagactgggagccgtgggccagggcacacttgtgacagtgtctagcacgcgtggaatgaggactgaggatcttcccaaagctgtcgtctttctcgaaccccaatggtatcgggtgctcgaaaaagactctgtgacactgaaatgccaaggggcctactctcccgaggacaactccacacagtggtttcataatgagtccctcatcagctctcaggccagctcttatttcattgatgccgctacagtggacgactccggcgagtatcggtgtcagaccaatctgtctacactgtctgaccccgtgcagcttgaggtccacattggatggttgctcttgcaagccccacgctgggttttcaaagaggaagatccaatccatctgcggtgccacagctggaaaaacaccgctctccacaaagtcacatacctgcaaaatggcaaaggacgcaaatacttccatcacaattccgatttttacattccgaaggctaccctgaaagacagcggcagctatttctgccggggactcgtcggctccaagaatgtgtcctccgaaaccgtgaatatcacgattacccaaggactggctgtgcctacaatctctagcttctttccgcctggataccaagtctccttctgtcttgtgatggtcctcctgtttgctgtggacacaggactgtacttttcc

SEQ ID NO: 1905 - DNA, 1065 bp, synthetic construct
  source 1..1065: mol_type = other DNA
atggccttaccagtgaccgccttgctcctgccgctggccttgctgctccacgccgccaggccgcaggtgcaactggtgcagagcggaggcggactggtgcagcctgggggcagtctgaggctgtcttgtgccgcctccgatttcgccttcgatgattacgagatgtcttgggtgcggcaggccccaggcaaagccctggaatggatcggcgacatcaaccacagcggcaccaccatctacaaccccagcctgaagtccagagtgaccatctccagagacaactccaagaatactctgtacctgcagatgaacacactgagagccgaagatacagccatctactactgcgccagaccccactacggcgactacagcgacgccttcgacatctggggccagggaaccatggtcaccgtgtcctctacgcgtggaatgaggactgaggatcttcccaaagctgtcgtctttctcgaaccccaatggtatcgggtgctcgaaaaagactctgtgacactgaaatgccaaggggcctactctcccgaggacaactccacacagtggtttcataatgagtccctcatcagctctcaggccagctcttatttcattgatgccgctacagtggacgactccggcgagtatcggtgtcagaccaatctgtctacactgtctgaccccgtgcagcttgaggtccacattggatggttgctcttgcaagccccacgctgggttttcaaagaggaagatccaatccatctgcggtgccacagctggaaaaacaccgctctccacaaagtcacatacctgcaaaatggcaaaggacgcaaatacttccatcacaattccgatttttacattccgaaggctaccctgaaagacagcggcagctatttctgccggggactcgtcggctccaagaatgtgtcctccgaaaccgtgaatatcacgattacccaaggactggctgtgcctacaatctctagcttctttccgcctggataccaagtctccttctgtcttgtgatggtcctcctgtttgctgtggacacaggactgtacttttcc

SEQ ID NO: 1906 - DNA, 1050 bp, synthetic construct
  source 1..1050: mol_type = other DNA
atggccttaccagtgaccgccttgctcctgccgctggccttgctgctccacgccgccaggccggaggtgcagctcgtggaatcaggcggaggtcttgtacagccaggaaattctcttcggctgtcttgcgccgcgagcgggttcaccttcagcagcttcggaatgagctgggtaagacaggcaccggggaaaggcctggagtgggtgagctcaatcagtgggagcgggtcagataccctgtacgcggattccgtgaagggcagattcacaatctctcgggacaatgctaagacaacactttaccttcagatgaactctctgcgacccgaggataccgctgtctactactgtacaataggaggttctctgtccagaagttctcaagggacactggtgaccgtctccagcacgcgtggaatgaggactgaggatcttcccaaagctgtcgtctttctcgaaccccaatggtatcgggtgctcgaaaaagactctgtgacactgaaatgccaaggggcctactctcccgaggacaactccacacagtggtttcataatgagtccctcatcagctctcaggccagctcttatttcattgatgccgctacagtggacgactccggcgagtatcggtgtcagaccaatctgtctacactgtctgaccccgtgcagcttgaggtccacattggatggttgctcttgcaagccccacgctgggttttcaaagaggaagatccaatccatctgcggtgccacagctggaaaaacaccgctctccacaaagtcacatacctgcaaaatggcaaaggacgcaaatacttccatcacaattccgatttttacattccgaaggctaccctgaaagacagcggcagctatttctgccggggactcgtcggctccaagaatgtgtcctccgaaaccgtgaatatcacgattacccaaggactggctgtgcctacaatctctagcttctttccgcctggataccaagtctccttctgtcttgtgatggtcctcctgtttgctgtggacacaggactgtacttttcc

SEQ ID NO: 1907 - DNA, 1053 bp, synthetic construct
  source 1..1053: mol_type = other DNA
atggccttaccagtgaccgccttgctcctgccgctggccttgctgctccacgccgccaggccggaagttcaactggtggaatccggtggaggactggtgcaagcgggcggctcactgcgccttagctgtgctgccagcggcagtatcttcagcggcaatgtaatgggttggtacaggcgacaagccccaggcaaggagcgagagtgggtagccgcgattgcaagtgggggcagcatctactacagagattctgtgaaaggccgcttcactattagtcgggacaacgcaaaaaacacggtgtatctccaaatgaacagcttgaagccagaggacactgctgtctactattgtaacagtcatcccccaactctcccctattgggggctgggcactcaggtcaccgtgagttccacgcgtggaatgaggactgaggatcttcccaaagctgtcgtctttctcgaaccccaatggtatcgggtgctcgaaaaagactctgtgacactgaaatgccaaggggcctactctcccgaggacaactccacacagtggtttcataatgagtccctcatcagctctcaggccagctcttatttcattgatgccgctacagtggacgactccggcgagtatcggtgtcagaccaatctgtctacactgtctgaccccgtgcagcttgaggtccacattggatggttgctcttgcaagccccacgctgggttttcaaagaggaagatccaatccatctgcggtgccacagctggaaaaacaccgctctccacaaagtcacatacctgcaaaatggcaaaggacgcaaatacttccatcacaattccgatttttacattccgaaggctaccctgaaagacagcggcagctatttctgccggggactcgtcggctccaagaatgtgtcctccgaaaccgtgaatatcacgattacccaaggactggctgtgcctacaatctctagcttctttccgcctggataccaagtctccttctgtcttgtgatggtcctcctgtttgctgtggacacaggactgtacttttcc

SEQ ID NO: 1908 - DNA, 1083 bp, synthetic construct
  source 1..1083: mol_type = other DNA
atggccttaccagtgaccgccttgctcctgccgctggccttgctgctccacgccgccaggccggaagtgcaactggtggaatctggagggggaagcgtgcaggcaggcggatctctgagactgtcctgcaccacatctggcagagccctgaatatgtacgtgatgggatggtttcggcaggctcccggcaacgagcgggaatttgtggccgctacaagcagcagcggcggcagcacaagctaccccgattctgtgaagggcagattcacaatctcccgcgataatgccaagaatactgtgtacctgcagatgaatagtctgaagcctgaagatacagccgcctacagatgtgccgccagcccctacgtgtccacccccaccatgaacatcctggaagagtacagatactggggcctgggaacacaagtgacagtgtccagcacgcgtggaatgaggactgaggatcttcccaaagctgtcgtctttctcgaaccccaatggtatcgggtgctcgaaaaagactctgtgacactgaaatgccaaggggcctactctcccgaggacaactccacacagtggtttcataatgagtccctcatcagctctcaggccagctcttatttcattgatgccgctacagtggacgactccggcgagtatcggtgtcagaccaatctgtctacactgtctgaccccgtgcagcttgaggtccacattggatggttgctcttgcaagccccacgctgggttttcaaagaggaagatccaatccatctgcggtgccacagctggaaaaacaccgctctccacaaagtcacatacctgcaaaatggcaaaggacgcaaatacttccatcacaattccgatttttacattccgaaggctaccctgaaagacagcggcagctatttctgccggggactcgtcggctccaagaatgtgtcctccgaaaccgtgaatatcacgattacccaaggactggctgtgcctacaatctctagcttctttccgcctggataccaagtctccttctgtcttgtgatggtcctcctgtttgctgtggacacaggactgtacttttcc

SEQ ID NO: 1909 - DNA, 1068 bp, synthetic construct
  source 1..1068: mol_type = other DNA
atggccttaccagtgaccgccttgctcctgccgctggccttgctgctccacgccgccaggccggaggttcagttggtcgaatcaggcgggggcctcgtccaacccggcggaagcctgcggctgtcttgcgcagcaagtggtagtgtgttcaagatcaacgttatggcctggtatcgccaggctccgggaaaagggagagagctggttgcggggatcattagcggtggctccaccagctacgctgacagtgtgaagggaaggttcactatatcacgcgacaacgcaaagaatacattgtacctccagatgaatagcttgcggcccgaagacacggcagtctactattgtgcctttatcacaacagagagcgactatgacctgggccgccggtattgggggcagggaacccttgtgaccgtttcatccacgcgtggaatgaggactgaggatcttcccaaagctgtcgtctttctcgaaccccaatggtatcgggtgctcgaaaaagactctgtgacactgaaatgccaaggggcctactctcccgaggacaactccacacagtggtttcataatgagtccctcatcagctctcaggccagctcttatttcattgatgccgctacagtggacgactccggcgagtatcggtgtcagaccaatctgtctacactgtctgaccccgtgcagcttgaggtccacattggatggttgctcttgcaagccccacgctgggttttcaaagaggaagatccaatccatctgcggtgccacagctggaaaaacaccgctctccacaaagtcacatacctgcaaaatggcaaaggacgcaaatacttccatcacaattccgatttttacattccgaaggctaccctgaaagacagcggcagctatttctgccggggactcgtcggctccaagaatgtgtcctccgaaaccgtgaatatcacgattacccaaggactggctgtgcctacaatctctagcttctttccgcctggataccaagtctccttctgtcttgtgatggtcctcctgtttgctgtggacacaggactgtacttttcc

SEQ ID NO: 1910 - DNA, 1503 bp, synthetic construct
  source 1..1503: mol_type = other DNA
atggccttaccagtgaccgccttgctcctgccgctggccttgctgctccacgccgccaggccggaggtgcaactggtggaaagcggcggaggctctgtgcagacaggcggctctctgagactgacctgtgccgccagcggcagaaccagcagatcctatggcatgggctggttcagacaggcccctggcaaagaacgcgagttcgtgtccggcatctcttggagaggcgacagcaccggctacgccgatagcgtgaagggccggttcaccatcagccgggacaacgccaagaacaccgtggacctgcagatgaacagcctgaagcccgaggacaccgccatctactactgtgccgctgccgccggatctgcttggtacggcacactgtacgagtacgactactggggccagggcacccttgtgaccgtgtcatctctcgagggcggaggcggaagtggaggcggaggatctggcggcggaggctctttcgaagaggtgcaactggtggaatccgggggaggcagcgtgcaggctgggggatcactgagactgtcttgtgctgcctccggcgacacctacggcagctattggatgggatggtttcggcaggctcccggaaaagaacgggaaggcgtggccgccatcaacagaggcggcggatacaccgtgtacgccgactctgtgaagggcagattcacaatctccagagacacagccaagaatactgtgtacctgcagatgaactccctgcgccccgacgataccgccgactattattgcgccgcttccggcgtgctgggcggcctgcatgaggactggttcaattattggggacagggaacacttgtgacagtgtccagcacgcgtggaatgaggactgaggatcttcccaaagctgtcgtctttctcgaaccccaatggtatcgggtgctcgaaaaagactctgtgacactgaaatgccaaggggcctactctcccgaggacaactccacacagtggtttcataatgagtccctcatcagctctcaggccagctcttatttcattgatgccgctacagtggacgactccggcgagtatcggtgtcagaccaatctgtctacactgtctgaccccgtgcagcttgaggtccacattggatggttgctcttgcaagccccacgctgggttttcaaagaggaagatccaatccatctgcggtgccacagctggaaaaacaccgctctccacaaagtcacatacctgcaaaatggcaaaggacgcaaatacttccatcacaattccgatttttacattccgaaggctaccctgaaagacagcggcagctatttctgccggggactcgtcggctccaagaatgtgtcctccgaaaccgtgaatatcacgattacccaaggactggctgtgcctacaatctctagcttctttccgcctggataccaagtctccttctgtcttgtgatggtcctcctgtttgctgtggacacaggactgtacttttcc

SEQ ID NO: 1911 - DNA, 1560 bp, synthetic construct
  source 1..1560: mol_type = other DNA
atggccttaccagtgaccgccttgctcctgccgctggccttgctgctccacgccgccaggccggaggtgcagctcgtagaatctggaggtggttccgtgcaagccggaggatcattgcgactgacctgcgcagcgagcggatctacttctcgctcttacggtatgggatggttcagacaggctcctgggaaagagcgcgagttcgtttcaggcatctcctggaggggggacagcaccggctacgcagatagcgtgaagggcaggttcacgatcagccgagacaacgccaaaaacaccgtcgatctgcaaatgaatagtctgaagcccgaagatactgcgatctactactgtgccgccgcagcagggtccacctggtacggcacactctacgagtacgactactgggggcagggaaccctggtaaccgtgtcctctctcgagggaggaggcggctccgggggaggcggaagtggaggcggaggatctgggtctggaggaagcggatctggaggctcagggtcagggggctcaggcagtggaggctctttcgaagttcagctcgtggaaagcggtggcggaagtgtgcaggccggaggcagtttgcgcctgagctgcgctgcttccggcgatacatacgggtcttactggatgggctggtttaggcaggcacctggacaagaaagagaagctgtggccgctattaacaggggaggtggctataccgtttatgctgattccgtgaagggccgattcacaatctcccgggataacgccaaaaacactctgtacctgcagatgaactcccttaggcccgatgacacagccgattactattgtgcggcctccggcgtgctgggtggtctgcatgaggattggttcaactactgggggcaaggcaccctcgtaaccgtgagtagcacgcgtggaatgaggactgaggatcttcccaaagctgtcgtctttctcgaaccccaatggtatcgggtgctcgaaaaagactctgtgacactgaaatgccaaggggcctactctcccgaggacaactccacacagtggtttcataatgagtccctcatcagctctcaggccagctcttatttcattgatgccgctacagtggacgactccggcgagtatcggtgtcagaccaatctgtctacactgtctgaccccgtgcagcttgaggtccacattggatggttgctcttgcaagccccacgctgggttttcaaagaggaagatccaatccatctgcggtgccacagctggaaaaacaccgctctccacaaagtcacatacctgcaaaatggcaaaggacgcaaatacttccatcacaattccgatttttacattccgaaggctaccctgaaagacagcggcagctatttctgccggggactcgtcggctccaagaatgtgtcctccgaaaccgtgaatatcacgattacccaaggactggctgtgcctacaatctctagcttctttccgcctggataccaagtctccttctgtcttgtgatggtcctcctgtttgctgtggacacaggactgtacttttcc

SEQ ID NO: 1912 - DNA, 1530 bp, synthetic construct
  source 1..1530: mol_type = other DNA
atggccttaccagtgaccgccttgctcctgccgctggccttgctgctccacgccgccaggccggaggtgcaactggtggaaagcggcggaggcctggtgcaggctggcggatctctgagactgagctgtgccgccagcggcatcaccttcagcatcaacacaatgggctggtacagacaggcccctggcaagcagagggaactggtggccctgatctccagcatcggcgacacctactacgccgacagcgtgaagggccggttcaccatcagccgggacaacgccaagaacaccgtgtacctccagatgaacagcctgaagcccgaggacaccgccgtgtactactgcaagcggttcagaacagccgcccagggcaccgattattggggccagggaacacaagtgaccgtgtcctctctcgagggaggaggcggctccgggggaggcggaagtggaggcggaggatctgggtctggaggaagcggatctggaggctcagggtcagggggctcaggcagtggaggctctttcgaagtgcaactggtggaatctgggggcggactggtgcagccaggcggaagtctgaggctgtcttgtgccgcctccggcagcatcttcggcttcaacgacatggcctggtatcggcaggctcccggaaaacagcgcgagctggtggctctgattagcagagtgggcgtgaccagcagcgccgactctgtgaagggcagattcacaatctccagagtgaacgccaaggatacagtgtacctccagatgaactctctgaaacctgaggatacagcagtgtactattgctacatggaccagcggctggacggcagcacactggcctactggggacagggaactcaagtgacagtgtctagcacgcgtggaatgaggactgaggatcttcccaaagctgtcgtctttctcgaaccccaatggtatcgggtgctcgaaaaagactctgtgacactgaaatgccaaggggcctactctcccgaggacaactccacacagtggtttcataatgagtccctcatcagctctcaggccagctcttatttcattgatgccgctacagtggacgactccggcgagtatcggtgtcagaccaatctgtctacactgtctgaccccgtgcagcttgaggtccacattggatggttgctcttgcaagccccacgctgggttttcaaagaggaagatccaatccatctgcggtgccacagctggaaaaacaccgctctccacaaagtcacatacctgcaaaatggcaaaggacgcaaatacttccatcacaattccgatttttacattccgaaggctaccctgaaagacagcggcagctatttctgccggggactcgtcggctccaagaatgtgtcctccgaaaccgtgaatatcacgattacccaaggactggctgtgcctacaatctctagcttctttccgcctggataccaagtctccttctgtcttgtgatggtcctcctgtttgctgtggacacaggactgtacttttcc

SEQ ID NO: 1913 - DNA, 1431 bp, synthetic construct; identical to SEQ ID NO: 1728
  source 1..1431: mol_type = other DNA

SEQ ID NO: 1914 - DNA, 1545 bp, synthetic construct
  source 1..1545: mol_type = other DNA
atggccttaccagtgaccgccttgctcctgccgctggccttgctgctccacgccgccaggccggacgtgcaactcgtggaatccggcggaggcctggtgcagcctggcggatctctgagactgagctgtgccgccagcggctctatcggcggactgaatgccatggcctggtacagacaggcccctggcaaagaacgggaactggtggccggcatctttggcgtgggcagcaccagatacgccgacagcgtgaagggccggttcaccatcagccgggacaacagcaagaacaccgtgtacctgcagatgaacagcctgcggcccgaggataccgccgtgtactactgcagaatgtccagcgtgaccagaggctccagcgactactggggccagggaacacttgtgaccgtgtccagtctcgagggaggaggcggctccgggggaggcggaagtggaggcggaggatctgggtctggaggaagcggatctggaggctcagggtcagggggctcaggcagtggaggctctttcgaagtgcaactggtggaatctggaggctctctggtgcagccagggggaagcctgagactgtcttgtgccgcttccggcttcaccttcgacgactacgccatgagctgggtgcgccaggtgccaggcaaaggcctggaatgggtgtccagcatcaactggagcggcacccacaccgattacgccgactccgtgaaaggcagattcacaatcagcagaaacaacgccaacaataccctgtacctgcagatgaactccctgaagtctgaggatacagcagtgtattattgcgccaagaactggcgggacgccggcaccacttggtttgagaaaagcggctctgccggacagggaacccaagtgacagtgtcctccacgcgtggaatgaggactgaggatcttcccaaagctgtcgtctttctcgaaccccaatggtatcgggtgctcgaaaaagactctgtgacactgaaatgccaaggggcctactctcccgaggacaactccacacagtggtttcataatgagtccctcatcagctctcaggccagctcttatttcattgatgccgctacagtggacgactccggcgagtatcggtgtcagaccaatctgtctacactgtctgaccccgtgcagcttgaggtccacattggatggttgctcttgcaagccccacgctgggttttcaaagaggaagatccaatccatctgcggtgccacagctggaaaaacaccgctctccacaaagtcacatacctgcaaaatggcaaaggacgcaaatacttccatcacaattccgatttttacattccgaaggctaccctgaaagacagcggcagctatttctgccggggactcgtcggctccaagaatgtgtcctccgaaaccgtgaatatcacgattacccaaggactggctgtgcctacaatctctagcttctttccgcctggataccaagtctccttctgtcttgtgatggtcctcctgtttgctgtggacacaggactgtacttttcc

SEQ ID NO: 1915 - DNA, 1569 bp, synthetic construct
  source 1..1569: mol_type = other DNA
atggccttaccagtgaccgccttgctcctgccgctggccttgctgctccacgccgccaggccggatgttcagttggtggagtctggtggcggtttggtgcagccaggtggctccctgcgactcagttgtgcagcctccgggttcattctggattactacgctattggttggtttcgacaggcccccggaaaggagagagagggcgtgctctgcattgatgccagcgacgacattacctactacgccgattctgtgaagggccgcttcaccatcagtagagacaatagcaagaatacagtctacctgcagatgaactccctgcgcccagaagacactgccgtctactactgtgctacccctatcgggctttcttcctcttgccttctcgaatatgactacgattactgggggcaggggacgctggtcaccgtgtctagcctcgagggaggtagcggctccgggggaggcggaagtggaggcggaggatctgggtctggaggaagcggatctggaggctcagggtcagggggctcaggcagtggaggctctttcgaagtgcaactggtggagtccggcggtggactggtacagcctgggggttcactgcgcctgtcctgcgccgccagcggaagaacctattacctcaatgctatgggttggttccgccaggccccaggaaaggagcgcgagttcgtggcggctattgactggtccgaggggaacaaggactatgctgattccgtgaagggcaggtttaccatcagccgggataattcaaaaaatactgtttatttgcagatgaactctcttagaccagaagacactgctgtctattactgcgccgctgacacccctccttggggaccactgatttatatcgaaagctatgattcctgggggcagggcacactcgtcaccgtgagtagcacgcgtggaatgaggactgaggatcttcccaaagctgtcgtctttctcgaaccccaatggtatcgggtgctcgaaaaagactctgtgacactgaaatgccaaggggcctactctcccgaggacaactccacacagtggtttcataatgagtccctcatcagctctcaggccagctcttatttcattgatgccgctacagtggacgactccggcgagtatcggtgtcagaccaatctgtctacactgtctgaccccgtgcagcttgaggtccacattggatggttgctcttgcaagccccacgctgggttttcaaagaggaagatccaatccatctgcggtgccacagctggaaaaacaccgctctccacaaagtcacatacctgcaaaatggcaaaggacgcaaatacttccatcacaattccgatttttacattccgaaggctaccctgaaagacagcggcagctatttctgccggggactcgtcggctccaagaatgtgtcctccgaaaccgtgaatatcacgattacccaaggactggctgtgcctacaatctctagcttctttccgcctggataccaagtctccttctgtcttgtgatggtcctcctgtttgctgtggacacaggactgtacttttcc

SEQ ID NO: 1916 - DNA, 1518 bp, synthetic construct
  source 1..1518: mol_type = other DNA
atggccttaccagtgaccgccttgctcctgccgctggccttgctgctccacgccgccaggccgcaggtgcaactggtgcagtctggcggagggctggtgcagccagggggatctctgagactgagctgtgccgccagcgacttcgacttcgccgcctacgagatgagctgggtgcgccaggctcctggacagggactggaatgggtggccatcatcagccacgacggcatcgacaagtattacaccgacagcgtgaagggccggttcaccatcagccgggacaacagcaagaacaccctgtacctgcagatgaataccctgcgggccgaggacaccgccacctactattgcctgagactgggagccgtgggccagggcacacttgtgacagtgtctagcctcgagggaggaggcggctccgggggaggcggaagtggaggcggaggatctgggtctggaggaagcggatctggaggctcagggtcagggggctcaggcagtggaggcagcttcgaacaggtgcaactggtgcagagcggaggcggactggtgcagcctgggggcagtctgaggctgtcttgtgccgcctccgatttcgccttcgatgattacgagatgtcttgggtgcggcaggccccaggcaaagccctggaatggatcggcgacatcaaccacagcggcaccaccatctacaaccccagcctgaagtccagagtgaccatctccagagacaactccaagaatactctgtacctgcagatgaacacactgagagccgaagatacagccatctactactgcgccagaccccactacggcgactacagcgacgccttcgacatctggggccagggaaccatggtcaccgtgtcctctacgcgtggaatgaggactgaggatcttcccaaagctgtcgtctttctcgaaccccaatggtatcgggtgctcgaaaaagactctgtgacactgaaatgccaaggggcctactctcccgaggacaactccacacagtggtttcataatgagtccctcatcagctctcaggccagctcttatttcattgatgccgctacagtggacgactccggcgagtatcggtgtcagaccaatctgtctacactgtctgaccccgtgcagcttgaggtccacattggatggttgctcttgcaagccccacgctgggttttcaaagaggaagatccaatccatctgcggtgccacagctggaaaaacaccgctctccacaaagtcacatacctgcaaaatggcaaaggacgcaaatacttccatcacaattccgatttttacattccgaaggctaccctgaaagacagcggcagctatttctgccggggactcgtcggctccaagaatgtgtcctccgaaaccgtgaatatcacgattacccaaggactggctgtgcctacaatctctagcttctttccgcctggataccaagtctccttctgtcttgtgatggtcctcctgtttgctgtggacacaggactgtacttttcc

SEQ ID NO: 1917 - DNA, 1062 bp, synthetic construct
  source 1..1062: mol_type = other DNA
atggccttaccagtgaccgccttgctcctgccgctggccttgctgctccacgccgccaggccgcaagtgaagctggaagagtctggcggaggactggtgcaggctggaagaagcctgagactgtcttgtgccgccagcgagcacacctttagctctcacgtgatgggctggttcagacaggcccctggcaaagaaagggaaagcgtggccgttatcggctggcgggatattagcaccagctacgccgatagcgtgaagggcagattcaccatcagccgggacaacgccaagaaaaccctgtacctccagatgaacagcctgaagccagaggacaccgccgtgtactactgcgccgccagaagaattgacgccgccgactttgattcttggggccagggaacccaagtgaccgtttctagcacgcgtggaatgaggactgaggatcttcccaaagctgtcgtctttctcgaaccccaatggtatcgggtgctcgaaaaagactctgtgacactgaaatgccaaggggcctactctcccgaggacaactccacacagtggtttcataatgagtccctcatcagctctcaggccagctcttatttcattgatgccgctacagtggacgactccggcgagtatcggtgtcagaccaatctgtctacactgtctgaccccgtgcagcttgaggtccacattggatggttgctcttgcaagccccacgctgggttttcaaagaggaagatccaatccatctgcggtgccacagctggaaaaacaccgctctccacaaagtcacatacctgcaaaatggcaaaggacgcaaatacttccatcacaattccgatttttacattccgaaggctaccctgaaagacagcggcagctatttctgccggggactcgtcggctccaagaatgtgtcctccgaaaccgtgaatatcacgattacccaaggactggctgtgcctacaatctctagcttctttccgcctggataccaagtctccttctgtcttgtgatggtcctcctgtttgctgtggacacaggactgtacttttcc

SEQ ID NO: 1918 - DNA, 1059 bp, synthetic construct
  source 1..1059: mol_type = other DNA
atggccttaccagtgaccgccttgctcctgccgctggccttgctgctccacgccgccaggccggaagtgcaactggttgaatccggtggcggcctggtgcaagcaggcggatctctcagacttagctgtgccgcctccggcagaaccttcacaatgggatggtttaggcaggctccagggaaagagagagagttcgtcgccgccatctctctgtctcccacactggcctactacgccgagtctgtgaaaggccggttcaccatctccagagataatgccaagaacaccgtggtgctgcaaatgaactctctgaaacccgaggatacagccctgtactattgtgccgctgaccggaagtccgtgatgagcatcagacccgattactggggacagggcacacaagtcacagtgtcctctacgcgtggaatgaggactgaggatcttcccaaagctgtcgtctttctcgaaccccaatggtatcgggtgctcgaaaaagactctgtgacactgaaatgccaaggggcctactctcccgaggacaactccacacagtggtttcataatgagtccctcatcagctctcaggccagctcttatttcattgatgccgctacagtggacgactccggcgagtatcggtgtcagaccaatctgtctacactgtctgaccccgtgcagcttgaggtccacattggatggttgctcttgcaagccccacgctgggttttcaaagaggaagatccaatccatctgcggtgccacagctggaaaaacaccgctctccacaaagtcacatacctgcaaaatggcaaaggacgcaaatacttccatcacaattccgatttttacattccgaaggctaccctgaaagacagcggcagctatttctgccggggactcgtcggctccaagaatgtgtcctccgaaaccgtgaatatcacgattacccaaggactggctgtgcctacaatctctagcttctttccgcctggataccaagtctccttctgtcttgtgatggtcctcctgtttgctgtggacacaggactgtacttttcc

SEQ ID NO: 1919 - DNA, 1461 bp, synthetic construct
  source 1..1461: mol_type = other DNA
atggccttaccagtgaccgccttgctcctgccgctggccttgctgctccacgccgccaggccgcaagtgaagctggaagagtctggcggaggactggtgcaggctggaagaagcctgagactgtcttgtgccgccagcgagcacacctttagctctcacgtgatgggctggttcagacaggcccctggcaaagaaagggaaagcgtggccgttatcggctggcgggatattagcaccagctacgccgatagcgtgaagggcagattcaccatcagccgggacaacgccaagaaaaccctgtacctccagatgaacagcctgaagccagaggacaccgccgtgtactactgcgccgccagaagaattgacgccgccgactttgattcttggggccagggaacccaagtgaccgtttctagcggaggcggtggaagtggcggcggtggttcaggcggcggaggatctgaagtgcaactggttgaatccggtggcggcctggtgcaagcaggcggatctctcagacttagctgtgccgcctccggcagaaccttcacaatgggatggtttaggcaggctccagggaaagagagagagttcgtcgccgccatctctctgtctcccacactggcctactacgccgagtctgtgaaaggccggttcaccatctccagagataatgccaagaacaccgtggtgctgcaaatgaactctctgaaacccgaggatacagccctgtactattgtgccgctgaccggaagtccgtgatgagcatcagacccgattactggggacagggcacacaagtcacagtgtcctctacgcgtggaatgaggactgaggatcttcccaaagctgtcgtctttctcgaaccccaatggtatcgggtgctcgaaaaagactctgtgacactgaaatgccaaggggcctactctcccgaggacaactccacacagtggtttcataatgagtccctcatcagctctcaggccagctcttatttcattgatgccgctacagtggacgactccggcgagtatcggtgtcagaccaatctgtctacactgtctgaccccgtgcagcttgaggtccacattggatggttgctcttgcaagccccacgctgggttttcaaagaggaagatccaatccatctgcggtgccacagctggaaaaacaccgctctccacaaagtcacatacctgcaaaatggcaaaggacgcaaatacttccatcacaattccgatttttacattccgaaggctaccctgaaagacagcggcagctatttctgccggggactcgtcggctccaagaatgtgtcctccgaaaccgtgaatatcacgattacccaaggactggctgtgcctacaatctctagcttctttccgcctggataccaagtctccttctgtcttgtgatggtcctcctgtttgctgtggacacaggactgtacttttcc

SEQ ID NO: 1920 - DNA, 1053 bp, synthetic construct
  source 1..1053: mol_type = other DNA
atggccttaccagtgaccgccttgctcctgccgctggccttgctgctccacgccgccaggccggaggtgcaactggttgagtctggcggaggactggttcaggcaggcggatctctgagactgagctgtatcgccaccggcaaggtgttcagcatctacgacatgggctggtacagacaggcccctggcaagcagagagagctggttgccgagatcacaagcagcggcaccacacactacgacgacttcgtgtccggcagattcaccatcagccgggacaacgccaagaacaccgtgtacctccagatgaacaccctgaaggccgaggacaccgccgtgtactactgtagagccaaccacgtgttcggcggcagctattggggacagggaacccaagtgacagtgtctagtacgcgtggaatgaggactgaggatcttcccaaagctgtcgtctttctcgaaccccaatggtatcgggtgctcgaaaaagactctgtgacactgaaatgccaaggggcctactctcccgaggacaactccacacagtggtttcataatgagtccctcatcagctctcaggccagctcttatttcattgatgccgctacagtggacgactccggcgagtatcggtgtcagaccaatctgtctacactgtctgaccccgtgcagcttgaggtccacattggatggttgctcttgcaagccccacgctgggttttcaaagaggaagatccaatccatctgcggtgccacagctggaaaaacaccgctctccacaaagtcacatacctgcaaaatggcaaaggacgcaaatacttccatcacaattccgatttttacattccgaaggctaccctgaaagacagcggcagctatttctgccggggactcgtcggctccaagaatgtgtcctccgaaaccgtgaatatcacgattacccaaggactggctgtgcctacaatctctagcttctttccgcctggataccaagtctccttctgtcttgtgatggtcctcctgtttgctgtggacacaggactgtacttttcc

SEQ ID NO: 1921 - DNA, 1071 bp, synthetic construct
  source 1..1071: mol_type = other DNA
atggccttaccagtgaccgccttgctcctgccgctggccttgctgctccacgccgccaggccgcaggtgcagcttgttgaaagcggaggtggcctggttcaacctggcggaagcctgagactgtcctgtgaagccagcggctttaccctggactactacgccatcggctggtttagacaagctcccggcaaagagagagagggcgtcatctgcatcagcagatccgacggcagcacctactatgccgacagcgtgaagggacgcttcaccatctccagagacaatgccaaaaagacggtctacctgcaaatgatctccctcaagcctgaggataccgccgcctactattgtgccgctggcgctgattgcagcggctacctgagagactacgagttcagaggccagggcacacaagtgaccgtcagctctacgcgtggaatgaggactgaggatcttcccaaagctgtcgtctttctcgaaccccaatggtatcgggtgctcgaaaaagactctgtgacactgaaatgccaaggggcctactctcccgaggacaactccacacagtggtttcataatgagtccctcatcagctctcaggccagctcttatttcattgatgccgctacagtggacgactccggcgagtatcggtgtcagaccaatctgtctacactgtctgaccccgtgcagcttgaggtccacattggatggttgctcttgcaagccccacgctgggttttcaaagaggaagatccaatccatctgcggtgccacagctggaaaaacaccgctctccacaaagtcacatacctgcaaaatggcaaaggacgcaaatacttccatcacaattccgatttttacattccgaaggctaccctgaaagacagcggcagctatttctgccggggactcgtcggctccaagaatgtgtcctccgaaaccgtgaatatcacgattacccaaggactggctgtgcctacaatctctagcttctttccgcctggataccaagtctccttctgtcttgtgatggtcctcctgtttgctgtggacacaggactgtacttttcc

SEQ ID NO: 1922 - DNA, 1440 bp, synthetic construct
  source 1..1440: mol_type = other DNA
atggccttaccagtgaccgccttgctcctgccgctggccttgctgctccacgccgccaggccggaggtgcaactggttgagtctggcggaggactggttcaggcaggcggatctctgagactgagctgtatcgccaccggcaaggtgttcagcatctacgacatgggctggtacagacaggcccctggcaagcagagagagctggttgccgagatcacaagcagcggcaccacacactacgacgacttcgtgtccggcagattcaccatcagccgggacaacgccaagaacaccgtgtacctccagatgaacaccctgaaggccgaggacaccgccgtgtactactgtagagccaaccacgtgttcggcggcagctattggggacagggaacccaagtgacagtgtctagtgaggtggccgctttggagaaacaggtgcagcttgttgaaagcggaggtggcctggttcaacctggcggaagcctgagactgtcctgtgaagccagcggctttaccctggactactacgccatcggctggtttagacaagctcccggcaaagagagagagggcgtcatctgcatcagcagatccgacggcagcacctactatgccgacagcgtgaagggacgcttcaccatctccagagacaatgccaaaaagacggtctacctgcaaatgatctccctcaagcctgaggataccgccgcctactattgtgccgctggcgctgattgcagcggctacctgagagactacgagttcagaggccagggcacacaagtgaccgtcagctctacgcgtggaatgaggactgaggatcttcccaaagctgtcgtctttctcgaaccccaatggtatcgggtgctcgaaaaagactctgtgacactgaaatgccaaggggcctactctcccgaggacaactccacacagtggtttcataatgagtccctcatcagctctcaggccagctcttatttcattgatgccgctacagtggacgactccggcgagtatcggtgtcagaccaatctgtctacactgtctgaccccgtgcagcttgaggtccacattggatggttgctcttgcaagccccacgctgggttttcaaagaggaagatccaatccatctgcggtgccacagctggaaaaacaccgctctccacaaagtcacatacctgcaaaatggcaaaggacgcaaatacttccatcacaattccgatttttacattccgaaggctaccctgaaagacagcggcagctatttctgccggggactcgtcggctccaagaatgtgtcctccgaaaccgtgaatatcacgattacccaaggactggctgtgcctacaatctctagcttctttccgcctggataccaagtctccttctgtcttgtgatggtcctcctgtttgctgtggacacaggactgtacttttcc

SEQ ID NO: 1923 - DNA, 1089 bp, synthetic construct
  source 1..1089: mol_type = other DNA
atggccttaccagtgaccgccttgctcctgccgctggccttgctgctccacgccgccaggccgcaagtgaagctggaagagtctggcggcagactggtgcagcctagaggaagcctgagactgtcttgtgccggcagcggcagaacctttagcacatacggcatggcctggttcagacaggcccctggaaaagagagagagttcgtcgccagcaaggccagcatgaactactccggcaggacctactacgccgacagcgtgaagggcagattcacaatcgccagagacaacgccaagaacatggtgttcctccagatgaacaatctgaagcccgaggacaccgccgtgtactattgtgccgctggcacaggctgtagcacctacggctgtttcgacgcccagatcatcgactactggggcaagggcacactggtcacagtttctagcacgcgtggaatgaggactgaggatcttcccaaagctgtcgtctttctcgaaccccaatggtatcgggtgctcgaaaaagactctgtgacactgaaatgccaaggggcctactctcccgaggacaactccacacagtggtttcataatgagtccctcatcagctctcaggccagctcttatttcattgatgccgctacagtggacgactccggcgagtatcggtgtcagaccaatctgtctacactgtctgaccccgtgcagcttgaggtccacattggatggttgctcttgcaagccccacgctgggttttcaaagaggaagatccaatccatctgcggtgccacagctggaaaaacaccgctctccacaaagtcacatacctgcaaaatggcaaaggacgcaaatacttccatcacaattccgatttttacattccgaaggctaccctgaaagacagcggcagctatttctgccggggactcgtcggctccaagaatgtgtcctccgaaaccgtgaatatcacgattacccaaggactggctgtgcctacaatctctagcttctttccgcctggataccaagtctccttctgtcttgtgatggtcctcctgtttgctgtggacacaggactgtacttttcc

SEQ ID NO: 1924 - DNA, 1062 bp, synthetic construct
  source 1..1062: mol_type = other DNA
atggccttaccagtgaccgccttgctcctgccgctggccttgctgctccacgccgccaggccgcaagtcaaactggaagaaagcggtggcggcctggtgcaacctggcgaatctctgagactgagctgtagcgccagcggctccatcttcaaggtgttcagagtgttcgccatgagctggtacaggcaaggccctggcaagcagagagagctggtcgcctctatcagcagcggcgagacaaccacatacgccgactctgtgaaaggccggttcaccatcagccgggataatgccaagaataccgcctatctccagatggactccctgaagcctgaagatacagctgtgtactactgcaacgccgaccataccttcaccggcgatttttggggccagggaacccaagtgaccgtgtctagtacgcgtggaatgaggactgaggatcttcccaaagctgtcgtctttctcgaaccccaatggtatcgggtgctcgaaaaagactctgtgacactgaaatgccaaggggcctactctcccgaggacaactccacacagtggtttcataatgagtccctcatcagctctcaggccagctcttatttcattgatgccgctacagtggacgactccggcgagtatcggtgtcagaccaatctgtctacactgtctgaccccgtgcagcttgaggtccacattggatggttgctcttgcaagccccacgctgggttttcaaagaggaagatccaatccatctgcggtgccacagctggaaaaacaccgctctccacaaagtcacatacctgcaaaatggcaaaggacgcaaatacttccatcacaattccgatttttacattccgaaggctaccctgaaagacagcggcagctatttctgccggggactcgtcggctccaagaatgtgtcctccgaaaccgtgaatatcacgattacccaaggactggctgtgcctacaatctctagcttctttccgcctggataccaagtctccttctgtcttgtgatggtcctcctgtttgctgtggacacaggactgtacttttcc

SEQ ID NO: 1925 - DNA, 1467 bp, synthetic construct
  source 1..1467: mol_type = other DNA
atggccttaccagtgaccgccttgctcctgccgctggccttgctgctccacgccgccaggccgcaagtgaagctggaagagtctggcggcagactggtgcagcctagaggaagcctgagactgtcttgtgccggcagcggcagaacctttagcacatacggcatggcctggttcagacaggcccctggaaaagagagagagttcgtcgccagcaaggccagcatgaactactccggcaggacctactacgccgacagcgtgaagggcagattcacaatcgccagagacaacgccaagaacatggtgttcctccagatgaacaatctgaagcccgaggacaccgccgtgtactattgtgccgctggcacaggctgtagcacctacggctgtttcgacgcccagatcatcgactactggggcaagggcacactggtcacagtttctagcgaggtggccgctttggagaaacaagtcaaactggaagaaagcggtggcggcctggtgcaacctggcgaatctctgagactgagctgtagcgccagcggctccatcttcaaggtgttcagagtgttcgccatgagctggtacaggcaaggccctggcaagcagagagagctggtcgcctctatcagcagcggcgagacaaccacatacgccgactctgtgaaaggccggttcaccatcagccgggataatgccaagaataccgcctatctccagatggactccctgaagcctgaagatacagctgtgtactactgcaacgccgaccataccttcaccggcgatttttggggccagggaacccaagtgaccgtgtctagtacgcgtggaatgaggactgaggatcttcccaaagctgtcgtctttctcgaaccccaatggtatcgggtgctcgaaaaagactctgtgacactgaaatgccaaggggcctactctcccgaggacaactccacacagtggtttcataatgagtccctcatcagctctcaggccagctcttatttcattgatgccgctacagtggacgactccggcgagtatcggtgtcagaccaatctgtctacactgtctgaccccgtgcagcttgaggtccacattggatggttgctcttgcaagccccacgctgggttttcaaagaggaagatccaatccatctgcggtgccacagctggaaaaacaccgctctccacaaagtcacatacctgcaaaatggcaaaggacgcaaatacttccatcacaattccgatttttacattccgaaggctaccctgaaagacagcggcagctatttctgccggggactcgtcggctccaagaatgtgtcctccgaaaccgtgaatatcacgattacccaaggactggctgtgcctacaatctctagcttctttccgcctggataccaagtctccttctgtcttgtgatggtcctcctgtttgctgtggacacaggactgtacttttcc

SEQ ID NO: 1926 - DNA, 1056 bp, synthetic construct
  source 1..1056: mol_type = other DNA
atggccttaccagtgaccgccttgctcctgccgctggccttgctgctccacgccgccaggccgcaagtgaagctggaagagtctggcggagagctggttcaacctggcggacctctgagactgtcttgtgccgccagcggcaacatcttcagcatcaaccggatgggctggtacagacaggcccctggaaaacagagagccttcgtcgcctctatcaccgtgcggggcatcaccaattacgccgactctgtgaagggcagattcaccatcagcgtggacaagagcaagaacaccatctacctccagatgaacgccctgaagcctgaggacaccgccgtgtactactgcaatgccgtgtccagcaacagggaccccgattattggggccagggcacccaagtgacagtgtctagtacgcgtggaatgaggactgaggatcttcccaaagctgtcgtctttctcgaaccccaatggtatcgggtgctcgaaaaagactctgtgacactgaaatgccaaggggcctactctcccgaggacaactccacacagtggtttcataatgagtccctcatcagctctcaggccagctcttatttcattgatgccgctacagtggacgactccggcgagtatcggtgtcagaccaatctgtctacactgtctgaccccgtgcagcttgaggtccacattggatggttgctcttgcaagccccacgctgggttttcaaagaggaagatccaatccatctgcggtgccacagctggaaaaacaccgctctccacaaagtcacatacctgcaaaatggcaaaggacgcaaatacttccatcacaattccgatttttacattccgaaggctaccctgaaagacagcggcagctatttctgccggggactcgtcggctccaagaatgtgtcctccgaaaccgtgaatatcacgattacccaaggactggctgtgcctacaatctctagcttctttccgcctggataccaagtctccttctgtcttgtgatggtcctcctgtttgctgtggacacaggactgtacttttcc

SEQ ID NO: 1927 - DNA, 1092 bp, synthetic construct
  source 1..1092: mol_type = other DNA
atggccttaccagtgaccgccttgctcctgccgctggccttgctgctccacgccgccaggccgcctgttcaactggttgaatctggcggcggactggtgcaggctggcgatagtctcagactgagctgtgccgcctccggcagaacatttggcatcggcacaatgggatggttccggcagcctcctggaaaagaacgcgaatttgtggccgccatcagatggtctacaggcggcaccagatacgccgacagcgtgaaaggccggtttaccatcagcagagacaacgccaagctgaccgtggatctccagatggatagcctgaaaccagaggatacagccgtctattactgcgccgctgacaggctgagcctggatctgtctggcagataccactacaaccctgccgtgtacgactactggggacagggaacacaagtcaccgtgtcctctacgcgtggaatgaggactgaggatcttcccaaagctgtcgtctttctcgaaccccaatggtatcgggtgctcgaaaaagactctgtgacactgaaatgccaaggggcctactctcccgaggacaactccacacagtggtttcataatgagtccctcatcagctctcaggccagctcttatttcattgatgccgctacagtggacgactccggcgagtatcggtgtcagaccaatctgtctacactgtctgaccccgtgcagcttgaggtccacattggatggttgctcttgcaagccccacgctgggttttcaaagaggaagatccaatccatctgcggtgccacagctggaaaaacaccgctctccacaaagtcacatacctgcaaaatggcaaaggacgcaaatacttccatcacaattccgatttttacattccgaaggctaccctgaaagacagcggcagctatttctgccggggactcgtcggctccaagaatgtgtcctccgaaaccgtgaatatcacgattacccaaggactggctgtgcctacaatctctagcttctttccgcctggataccaagtctccttctgtcttgtgatggtcctcctgtttgctgtggacacaggactgtacttttcc

SEQ ID NO: 1928 - DNA, 1488 bp, synthetic construct
  source 1..1488: mol_type = other DNA
atggccttaccagtgaccgccttgctcctgccgctggccttgctgctccacgccgccaggccgcaagtgaagctggaagagtctggcggagagctggttcaacctggcggacctctgagactgtcttgtgccgccagcggcaacatcttcagcatcaaccggatgggctggtacagacaggcccctggaaaacagagagccttcgtcgcctctatcaccgtgcggggcatcaccaattacgccgactctgtgaagggcagattcaccatcagcgtggacaagagcaagaacaccatctacctccagatgaacgccctgaagcctgaggacaccgccgtgtactactgcaatgccgtgtccagcaacagggaccccgattattggggccagggcacccaagtgacagtgtctagtggaggcggtggaagtggcggcggtggttcaggcggcggaggatctcctgttcaactggttgaatctggcggcggactggtgcaggctggcgatagtctcagactgagctgtgccgcctccggcagaacatttggcatcggcacaatgggatggttccggcagcctcctggaaaagaacgcgaatttgtggccgccatcagatggtctacaggcggcaccagatacgccgacagcgtgaaaggccggtttaccatcagcagagacaacgccaagctgaccgtggatctccagatggatagcctgaaaccagaggatacagccgtctattactgcgccgctgacaggctgagcctggatctgtctggcagataccactacaaccctgccgtgtacgactactggggacagggaacacaagtcaccgtgtcctctacgcgtggaatgaggactgaggatcttcccaaagctgtcgtctttctcgaaccccaatggtatcgggtgctcgaaaaagactctgtgacactgaaatgccaaggggcctactctcccgaggacaactccacacagtggtttcataatgagtccctcatcagctctcaggccagctcttatttcattgatgccgctacagtggacgactccggcgagtatcggtgtcagaccaatctgtctacactgtctgaccccgtgcagcttgaggtccacattggatggttgctcttgcaagccccacgctgggttttcaaagaggaagatccaatccatctgcggtgccacagctggaaaaacaccgctctccacaaagtcacatacctgcaaaatggcaaaggacgcaaatacttccatcacaattccgatttttacattccgaaggctaccctgaaagacagcggcagctatttctgccggggactcgtcggctccaagaatgtgtcctccgaaaccgtgaatatcacgattacccaaggactggctgtgcctacaatctctagcttctttccgcctggataccaagtctccttctgtcttgtgatggtcctcctgtttgctgtggacacaggactgtacttttcc

SEQ ID NO: 1929 - DNA, 1062 bp, synthetic construct
  source 1..1062: mol_type = other DNA
atggccttaccagtgaccgccttgctcctgccgctggccttgctgctccacgccgccaggccggccgtgcaactggttgaatctggcggaggactggtgcaggctggcgattctctgagactgacctgtacagccagcggcagagccttcagcacctacttcatggcctggttcagacaggcccctggcaaagagagagagttcgtcgccggaatcgcttggagcggaggctctacagcctacgccgattctgtgaagggcagattcaccatcagccgggacaacgccaagaacaccgtgtacctccagatgaacagcctgaagtccgaggacaccgccgtgtactactgtgccagcagaggcatcgaggtggaagagtttggagcctggggccagggaacccaagtgacagtttcttctacgcgtggaatgaggactgaggatcttcccaaagctgtcgtctttctcgaaccccaatggtatcgggtgctcgaaaaagactctgtgacactgaaatgccaaggggcctactctcccgaggacaactccacacagtggtttcataatgagtccctcatcagctctcaggccagctcttatttcattgatgccgctacagtggacgactccggcgagtatcggtgtcagaccaatctgtctacactgtctgaccccgtgcagcttgaggtccacattggatggttgctcttgcaagccccacgctgggttttcaaagaggaagatccaatccatctgcggtgccacagctggaaaaacaccgctctccacaaagtcacatacctgcaaaatggcaaaggacgcaaatacttccatcacaattccgatttttacattccgaaggctaccctgaaagacagcggcagctatttctgccggggactcgtcggctccaagaatgtgtcctccgaaaccgtgaatatcacgattacccaaggactggctgtgcctacaatctctagcttctttccgcctggataccaagtctccttctgtcttgtgatggtcctcctgtttgctgtggacacaggactgtacttttcc

SEQ ID NO: 1930 - DNA, 1065 bp, synthetic construct
  source 1..1065: mol_type = other DNA
atggccttaccagtgaccgccttgctcctgccgctggccttgctgctccacgccgccaggccgcaggttcaactggtggaaagtggcggtggcttggtgcaagcaggcggctctcttagactgtcttgtgctgcctctggcggcaccctgagcaagaataccgtggcatggtttaggcaggctcccggaaaagagcggggctttgtcgccagcatcacctgggatggcagaaccacctactacgccgacagcgtgaaaggccggttcaccatctccagagataatgccaagaatacggtctacttgcaaatgaactccctgaagcctgaagatacagccgtgtacgtgtgcgccgatctcggcaaatggcctgctggacctgccgattattggggacagggcacacaagtcaccgtgtcctctacgcgtggaatgaggactgaggatcttcccaaagctgtcgtctttctcgaaccccaatggtatcgggtgctcgaaaaagactctgtgacactgaaatgccaaggggcctactctcccgaggacaactccacacagtggtttcataatgagtccctcatcagctctcaggccagctcttatttcattgatgccgctacagtggacgactccggcgagtatcggtgtcagaccaatctgtctacactgtctgaccccgtgcagcttgaggtccacattggatggttgctcttgcaagccccacgctgggttttcaaagaggaagatccaatccatctgcggtgccacagctggaaaaacaccgctctccacaaagtcacatacctgcaaaatggcaaaggacgcaaatacttccatcacaattccgatttttacattccgaaggctaccctgaaagacagcggcagctatttctgccggggactcgtcggctccaagaatgtgtcctccgaaaccgtgaatatcacgattacccaaggactggctgtgcctacaatctctagcttctttccgcctggataccaagtctccttctgtcttgtgatggtcctcctgtttgctgtggacacaggactgtacttttcc

SEQ ID NO: 1931 - DNA, 1077 bp, synthetic construct
  source 1..1077: mol_type = other DNA
atggccttaccagtgaccgccttgctcctgccgctggccttgctgctccacgccgccaggccgggctctgacctgggcatcaagctgctgttcgccgctgccaagggccaggacgacgaagtgcggattctgctggctgctggggccgacgtgaacgccaaggatttcgagggctacacccccctgcacgtggccgcctatgatggacacctggaaatcgtggaagtgctgctgaaggctggcgctgatgtgaatgccaaagacagccagggccggacccctctgcatgaagccgcctacagcggccatctggaaattgtggaagtgctgctgaaagccggggcagacgtgaacgctcaggacgacgctggcgagacaccagccgatctggctgcagcttggggccacgaagatatcgccgaggtgctgcagaagacgcgtggaatgaggactgaggatcttcccaaagctgtcgtctttctcgaaccccaatggtatcgggtgctcgaaaaagactctgtgacactgaaatgccaaggggcctactctcccgaggacaactccacacagtggtttcataatgagtccctcatcagctctcaggccagctcttatttcattgatgccgctacagtggacgactccggcgagtatcggtgtcagaccaatctgtctacactgtctgaccccgtgcagcttgaggtccacattggatggttgctcttgcaagccccacgctgggttttcaaagaggaagatccaatccatctgcggtgccacagctggaaaaacaccgctctccacaaagtcacatacctgcaaaatggcaaaggacgcaaatacttccatcacaattccgatttttacattccgaaggctaccctgaaagacagcggcagctatttctgccggggactcgtcggctccaagaatgtgtcctccgaaaccgtgaatatcacgattacccaaggactggctgtgcctacaatctctagcttctttccgcctggataccaagtctccttctgtcttgtgatggtcctcctgtttgctgtggacacaggactgtacttttcc

SEQ ID NO: 1932 - DNA, 1083 bp, synthetic construct
  source 1..1083: mol_type = other DNA
atggccttaccagtgaccgccttgctcctgccgctggccttgctgctccacgccgccaggccgagaagcgatctgggaaagaagctgctggaagctgccagagccggacaggatgatgaagtgcgcatcctgatggcaaacggcgcagatgtgaacgcaaaggacgagtacggcctgacccccctgtacctggctacagcccacgggcacctggaaattgtggaagtgctgctgaagaacggcgctgacgtgaacgccgtggacgccatcggctttaccccactgcatctggccgctttcatcgggcatctcgaaatcgcagaggtgctgctgaaacacggggccgatgtgaatgcccaggacaagttcggcaagaccgccttcgacatcagcatcggcaacggcaacgaggacctggccgagatcctgcagaaactgaacacgcgtggaatgaggactgaggatcttcccaaagctgtcgtctttctcgaaccccaatggtatcgggtgctcgaaaaagactctgtgacactgaaatgccaaggggcctactctcccgaggacaactccacacagtggtttcataatgagtccctcatcagctctcaggccagctcttatttcattgatgccgctacagtggacgactccggcgagtatcggtgtcagaccaatctgtctacactgtctgaccccgtgcagcttgaggtccacattggatggttgctcttgcaagccccacgctgggttttcaaagaggaagatccaatccatctgcggtgccacagctggaaaaacaccgctctccacaaagtcacatacctgcaaaatggcaaaggacgcaaatacttccatcacaattccgatttttacattccgaaggctaccctgaaagacagcggcagctatttctgccggggactcgtcggctccaagaatgtgtcctccgaaaccgtgaatatcacgattacccaaggactggctgtgcctacaatctctagcttctttccgcctggataccaagtctccttctgtcttgtgatggtcctcctgtttgctgtggacacaggactgtacttttcc

SEQ ID NO: 1933 - DNA, 879 bp, synthetic construct
  source 1..879: mol_type = other DNA
atggccttaccagtgaccgccttgctcctgccgctggccttgctgctccacgccgccaggccggtggacaacaagttcaacaaagagcggtacagcgcctactacgagatttggcaactgcccaacctgaacgtgcggcagaaggccgccttcatcggatctctgcaggacgaccctagccagagcgccaatctgctggccgaggccaagaagctgaacgacgcccaggcccctaaaacgcgtggaatgaggactgaggatcttcccaaagctgtcgtctttctcgaaccccaatggtatcgggtgctcgaaaaagactctgtgacactgaaatgccaaggggcctactctcccgaggacaactccacacagtggtttcataatgagtccctcatcagctctcaggccagctcttatttcattgatgccgctacagtggacgactccggcgagtatcggtgtcagaccaatctgtctacactgtctgaccccgtgcagcttgaggtccacattggatggttgctcttgcaagccccacgctgggttttcaaagaggaagatccaatccatctgcggtgccacagctggaaaaacaccgctctccacaaagtcacatacctgcaaaatggcaaaggacgcaaatacttccatcacaattccgatttttacattccgaaggctaccctgaaagacagcggcagctatttctgccggggactcgtcggctccaagaatgtgtcctccgaaaccgtgaatatcacgattacccaaggactggctgtgcctacaatctctagcttctttccgcctggataccaagtctccttctgtcttgtgatggtcctcctgtttgctgtggacacaggactgtacttttcc

SEQ ID NO: 1934 - DNA, 858 bp, synthetic construct
  source 1..858: mol_type = other DNA
atggccttaccagtgaccgccttgctcctgccgctggccttgctgctccacgccgccaggccgtacgccaaagagatgcggaacgcctactgggagatcgccctgctgcccaatctgaccaaccagcagaagagagcccccatcagaaagctgtacgacgacccctcccagagcagcgagctgctgtctgaggctaaaaaactgaacgatagccagacgcgtggaatgaggactgaggatcttcccaaagctgtcgtctttctcgaaccccaatggtatcgggtgctcgaaaaagactctgtgacactgaaatgccaaggggcctactctcccgaggacaactccacacagtggtttcataatgagtccctcatcagctctcaggccagctcttatttcattgatgccgctacagtggacgactccggcgagtatcggtgtcagaccaatctgtctacactgtctgaccccgtgcagcttgaggtccacattggatggttgctcttgcaagccccacgctgggttttcaaagaggaagatccaatccatctgcggtgccacagctggaaaaacaccgctctccacaaagtcacatacctgcaaaatggcaaaggacgcaaatacttccatcacaattccgatttttacattccgaaggctaccctgaaagacagcggcagctatttctgccggggactcgtcggctccaagaatgtgtcctccgaaaccgtgaatatcacgattacccaaggactggctgtgcctacaatctctagcttctttccgcctggataccaagtctccttctgtcttgtgatggtcctcctgtttgctgtggacacaggactgtacttttcc

SEQ ID NO: 1935 - DNA, 858 bp, synthetic construct
  source 1..858: mol_type = other DNA
atggccttaccagtgaccgccttgctcctgccgctggccttgctgctccacgccgccaggccgtatgccaaagaaatgtggattgcctgggaggaaatccgcaacctgcctaatctgaatggctggcagatgaccgcctttatcgctaagctgctggatgaccccagccagtcctctgagctgctgagcgaagcaaagaaactgaatgactcccagacgcgtggaatgaggactgaggatcttcccaaagctgtcgtctttctcgaaccccaatggtatcgggtgctcgaaaaagactctgtgacactgaaatgccaaggggcctactctcccgaggacaactccacacagtggtttcataatgagtccctcatcagctctcaggccagctcttatttcattgatgccgctacagtggacgactccggcgagtatcggtgtcagaccaatctgtctacactgtctgaccccgtgcagcttgaggtccacattggatggttgctcttgcaagccccacgctgggttttcaaagaggaagatccaatccatctgcggtgccacagctggaaaaacaccgctctccacaaagtcacatacctgcaaaatggcaaaggacgcaaatacttccatcacaattccgatttttacattccgaaggctaccctgaaagacagcggcagctatttctgccggggactcgtcggctccaagaatgtgtcctccgaaaccgtgaatatcacgattacccaaggactggctgtgcctacaatctctagcttctttccgcctggataccaagtctccttctgtcttgtgatggtcctcctgtttgctgtggacacaggactgtacttttcc

SEQ ID NO: 1936 - DNA, 972 bp, synthetic construct
  source 1..972: mol_type = other DNA
atggccttaccagtgaccgccttgctcctgccgctggccttgctgctccacgccgccaggccgctgccagccccgaagaatttggtcgtttcccgtgtcactgaggactctgcacgtctgagctggaccgcaccggacgcggcgttcgacagctttgcaatcggctactgggagtgggatgatgacggcgaggccattgtgctgaccgttccgggtagcgagcgcagctacgatctgaccggtctgaagccgggtacggaatatccggtgtatattgcgggcgtgaagggtggccagtggagcttcccgctgagcgcgatctttaccaccacgcgtggaatgaggactgaggatcttcccaaagctgtcgtctttctcgaaccccaatggtatcgggtgctcgaaaaagactctgtgacactgaaatgccaaggggcctactctcccgaggacaactccacacagtggtttcataatgagtccctcatcagctctcaggccagctcttatttcattgatgccgctacagtggacgactccggcgagtatcggtgtcagaccaatctgtctacactgtctgaccccgtgcagcttgaggtccacattggatggttgctcttgcaagccccacgctgggttttcaaagaggaagatccaatccatctgcggtgccacagctggaaaaacaccgctctccacaaagtcacatacctgcaaaatggcaaaggacgcaaatacttccatcacaattccgatttttacattccgaaggctaccctgaaagacagcggcagctatttctgccggggactcgtcggctccaagaatgtgtcctccgaaaccgtgaatatcacgattacccaaggactggctgtgcctacaatctctagcttctttccgcctggataccaagtctccttctgtcttgtgatggtcctcctgtttgctgtggacacaggactgtacttttcc

SEQ ID NO: 1937 - DNA, 978 bp, synthetic construct
  source 1..978: mol_type = other DNA
atggccttaccagtgaccgccttgctcctgccgctggccttgctgctccacgccgccaggccgctgccggctccgaaaaacctggtcgtttcccgtgtcactgaagattctgcacgcttgagctgggcgatcgacgagcagcgtgactggtttgagagcttcctgattcagtatcaagaatcggaaaaagttggcgaggccatcgtgctgaccgttccgggtagcgagcgcagctatgatctgacgggtctgaagccaggcaccgagtatacggtgagcatttacggtgtctaccatgtgtaccgtagcaatccgctgagcgcgatcttcaccaccacgcgtggaatgaggactgaggatcttcccaaagctgtcgtctttctcgaaccccaatggtatcgggtgctcgaaaaagactctgtgacactgaaatgccaaggggcctactctcccgaggacaactccacacagtggtttcataatgagtccctcatcagctctcaggccagctcttatttcattgatgccgctacagtggacgactccggcgagtatcggtgtcagaccaatctgtctacactgtctgaccccgtgcagcttgaggtccacattggatggttgctcttgcaagccccacgctgggttttcaaagaggaagatccaatccatctgcggtgccacagctggaaaaacaccgctctccacaaagtcacatacctgcaaaatggcaaaggacgcaaatacttccatcacaattccgatttttacattccgaaggctaccctgaaagacagcggcagctatttctgccggggactcgtcggctccaagaatgtgtcctccgaaaccgtgaatatcacgattacccaaggactggctgtgcctacaatctctagcttctttccgcctggataccaagtctccttctgtcttgtgatggtcctcctgtttgctgtggacacaggactgtacttttcc

SEQ ID NO: 1938 - DNA, 972 bp, synthetic construct
  source 1..972: mol_type = other DNA
atggccttaccagtgaccgccttgctcctgccgctggccttgctgctccacgccgccaggccgctgccagccccgaaaaacttagttgtctcccgcgtgaccgaagattctgctcgtctgagctggactgcaccggacgcggcgttcgacagctttccgattggctactgggagtgggatgatgacggtgaagcgatcgtgctgaccgttccgggtagcgagcgtagctatgacctgacgggtttgaaacctggtaccgagtatcacgtttacattgcgggcgtcaagggtggccagtggtcgttcccgctgagcgcaatctttacgaccacgcgtggaatgaggactgaggatcttcccaaagctgtcgtctttctcgaaccccaatggtatcgggtgctcgaaaaagactctgtgacactgaaatgccaaggggcctactctcccgaggacaactccacacagtggtttcataatgagtccctcatcagctctcaggccagctcttatttcattgatgccgctacagtggacgactccggcgagtatcggtgtcagaccaatctgtctacactgtctgaccccgtgcagcttgaggtccacattggatggttgctcttgcaagccccacgctgggttttcaaagaggaagatccaatccatctgcggtgccacagctggaaaaacaccgctctccacaaagtcacatacctgcaaaatggcaaaggacgcaaatacttccatcacaattccgatttttacattccgaaggctaccctgaaagacagcggcagctatttctgccggggactcgtcggctccaagaatgtgtcctccgaaaccgtgaatatcacgattacccaaggactggctgtgcctacaatctctagcttctttccgcctggataccaagtctccttctgtcttgtgatggtcctcctgtttgctgtggacacaggactgtacttttcc

SEQ ID NO: 1939 - DNA, 987 bp, synthetic construct
  source 1..987: mol_type = other DNA
atggccttaccagtgaccgccttgctcctgccgctggccttgctgctccacgccgccaggccgctgcccgctcctaagaatctggtggtgtccgaagtgaccgaggacagcgctagactgagctgggatgatccctgggccttctacgagagcttcctgatccagtaccaagagagcgagaaagtcggcgaggccatcgtgcttacagtgcctggaagcgagagaagctacgacctgacaggcctgaagcctggcaccgagtacaccgtgtctatctacggcgtgcacaacgtgtacaaggacaccaacatgcggggcctgcctctgagcgccatctttacaacaacgcgtggaatgaggactgaggatcttcccaaagctgtcgtctttctcgaaccccaatggtatcgggtgctcgaaaaagactctgtgacactgaaatgccaaggggcctactctcccgaggacaactccacacagtggtttcataatgagtccctcatcagctctcaggccagctcttatttcattgatgccgctacagtggacgactccggcgagtatcggtgtcagaccaatctgtctacactgtctgaccccgtgcagcttgaggtccacattggatggttgctcttgcaagccccacgctgggttttcaaagaggaagatccaatccatctgcggtgccacagctggaaaaacaccgctctccacaaagtcacatacctgcaaaatggcaaaggacgcaaatacttccatcacaattccgatttttacattccgaaggctaccctgaaagacagcggcagctatttctgccggggactcgtcggctccaagaatgtgtcctccgaaaccgtgaatatcacgattacccaaggactggctgtgcctacaatctctagcttctttccgcctggataccaagtctccttctgtcttgtgatggtcctcctgtttgctgtggacacaggactgtacttttcc

SEQ ID NO: 1940 - DNA, 972 bp, synthetic construct
  source 1..972: mol_type = other DNA
atggccttaccagtgaccgccttgctcctgccgctggccttgctgctccacgccgccaggccgttgcctgctccaaaaaacctggtcgtcagcagagtgacagaggactccgccagactgtcttggacagcccctgatgccgccttcgacagcttctggatcagatacttcgagttcctcggcagcggagaagccattgtgctgaccgttccaggcagcgagagatcctatgatctgaccggactgaagcccggaacagagtatgtggtcaacatcatgggcgtgaaaggcggcaagatcagccctcctctgtccgccattttcaccaccacgcgtggaatgaggactgaggatcttcccaaagctgtcgtctttctcgaaccccaatggtatcgggtgctcgaaaaagactctgtgacactgaaatgccaaggggcctactctcccgaggacaactccacacagtggtttcataatgagtccctcatcagctctcaggccagctcttatttcattgatgccgctacagtggacgactccggcgagtatcggtgtcagaccaatctgtctacactgtctgaccccgtgcagcttgaggtccacattggatggttgctcttgcaagccccacgctgggttttcaaagaggaagatccaatccatctgcggtgccacagctggaaaaacaccgctctccacaaagtcacatacctgcaaaatggcaaaggacgcaaatacttccatcacaattccgatttttacattccgaaggctaccctgaaagacagcggcagctatttctgccggggactcgtcggctccaagaatgtgtcctccgaaaccgtgaatatcacgattacccaaggactggctgtgcctacaatctctagcttctttccgcctggataccaagtctccttctgtcttgtgatggtcctcctgtttgctgtggacacaggactgtacttttcc

SEQ ID NO: 1941 - DNA, 1284 bp, synthetic construct
  source 1..1284: mol_type = other DNA
atggccttaccagtgaccgccttgctcctgccgctggccttgctgctccacgccgccaggccgctgcccgctcctaagaatctggtggtgtccgaagtgaccgaggacagcgctagactgagctgggatgatccctgggccttctacgagagcttcctgatccagtaccaagagagcgagaaagtcggcgaggccatcgtgcttacagtgcctggaagcgagagaagctacgacctgacaggcctgaagcctggcaccgagtacaccgtgtctatctacggcgtgcacaacgtgtacaaggacaccaacatgcggggcctgcctctgagcgccatctttacaacagctcccgctcctgctccagcaccagctccattgcctgctccaaaaaacctggtcgtcagcagagtgacagaggactccgccagactgtcttggacagcccctgatgccgccttcgacagcttctggatcagatacttcgagttcctcggcagcggagaagccattgtgctgaccgttccaggcagcgagagatcctatgatctgaccggactgaagcccggaacagagtatgtggtcaacatcatgggcgtgaaaggcggcaagatcagccctcctctgtccgccattttcaccaccacgcgtggaatgaggactgaggatcttcccaaagctgtcgtctttctcgaaccccaatggtatcgggtgctcgaaaaagactctgtgacactgaaatgccaaggggcctactctcccgaggacaactccacacagtggtttcataatgagtccctcatcagctctcaggccagctcttatttcattgatgccgctacagtggacgactccggcgagtatcggtgtcagaccaatctgtctacactgtctgaccccgtgcagcttgaggtccacattggatggttgctcttgcaagccccacgctgggttttcaaagaggaagatccaatccatctgcggtgccacagctggaaaaacaccgctctccacaaagtcacatacctgcaaaatggcaaaggacgcaaatacttccatcacaattccgatttttacattccgaaggctaccctgaaagacagcggcagctatttctgccggggactcgtcggctccaagaatgtgtcctccgaaaccgtgaatatcacgattacccaaggactggctgtgcctacaatctctagcttctttccgcctggataccaagtctccttctgtcttgtgatggtcctcctgtttgctgtggacacaggactgtacttttcc

SEQ ID NO: 1942 - DNA, 975 bp, synthetic construct
  source 1..975: mol_type = other DNA
atggccttaccagtgaccgccttgctcctgccgctggccttgctgctccacgccgccaggccgatgctgcccgctcctaagaatctggtggtgtccagaatcaccgaggacagcgccagactgtcttggacagctcctgatgccgccttcgacagcttccccatccggtacatcgagacactgatctggggcgaagccatctggctggatgtgcctggaagcgagagaagctacgacctgaccggactgaagcctggcacagagtatgccgtggtcatcaccggcgtgaaaggcggcagattctctagccctctggtggcctctttcaccaccacgcgtggaatgaggactgaggatcttcccaaagctgtcgtctttctcgaaccccaatggtatcgggtgctcgaaaaagactctgtgacactgaaatgccaaggggcctactctcccgaggacaactccacacagtggtttcataatgagtccctcatcagctctcaggccagctcttatttcattgatgccgctacagtggacgactccggcgagtatcggtgtcagaccaatctgtctacactgtctgaccccgtgcagcttgaggtccacattggatggttgctcttgcaagccccacgctgggttttcaaagaggaagatccaatccatctgcggtgccacagctggaaaaacaccgctctccacaaagtcacatacctgcaaaatggcaaaggacgcaaatacttccatcacaattccgatttttacattccgaaggctaccctgaaagacagcggcagctatttctgccggggactcgtcggctccaagaatgtgtcctccgaaaccgtgaatatcacgattacccaaggactggctgtgcctacaatctctagcttctttccgcctggataccaagtctccttctgtcttgtgatggtcctcctgtttgctgtggacacaggactgtacttttcc

SEQ ID NO: 1943 - DNA, 2403 bp, synthetic construct
  source 1..2403: mol_type = other DNA
atggccttaccagtgaccgccttgctcctgccgctggccttgctgctccacgccgccaggccggagtgggtcaagttcgccaagccttgcagagaaggcgaggacaacagcaagcggaaccctatcgccaagatcaccagcgactaccaggccacacagaagatcacctaccggatctctggcgtgggcatcgaccagcctccattcggcatcttcgtggtggacaagaacaccggcgacatcaacatcaccgccatcgtggacagagaggaaacccctagcttcctgattacctgtagagccctgaacgcccagggcctcgatgtggaaaagcctctgatcctgaccgtgaagatcctggacatcaacgacaaccctccagtgttcagccagcagattttcatgggcgagatcgaggaaaacagcgccagcaacagcctggtcatgatcctgaatgccaccgacgccgacgagcccaaccacctgaatagcaagatcgccttcaagatcgtgtcccaagagcctgccggcacacccatgtttctgctgtccagaaataccggcgaagtgcggaccctgaccaatagcctggatagagagcaggccagcagctacagactggtggtgtctggcgctgacaaggatggcgagggactgagcacccagtgcgagtgcaacatcaaagtgaaggacgtgaacgacaacttccccatgttccgggacagccagtatagcgcccggatcgaagagaacatcctgagcagcgagctgctgcggttccaagtgaccgacctggacgaagagtacaccgacaactggctggccgtgtacttcttcaccagcggcaacgaaggcaactggttcgagatccagacagaccccaggaccaacgagggcatcctgaaggttgtgaaggccctggactacgagcagctccagagcgtgaagctgtctatcgccgtgaagaacaaggccgagttccaccagtccgtgatctcccggtacagagtgcagagcacccctgtgaccatccaagtgattaacgtgcgcgagggcattgccttcagacccgccagcaagaccttcaccgtgcagaagggcatcagcagcaagaaactggtggactacatcctgggcacctatcaggccatcgacgaggacacaaacaaagccgcctccaacgtgaaatacgtgatgggcagaaacgacggcggctacctgatgatcgactccaagaccgccgagatcaagttcgtgaagaatatgaaccgggactccaccttcatcgtgaacaagaccatcacagccgaggtgctggctatcgacgagtataccggcaagaccagcaccggcacagtgtatgtgcgggtgcccgacttcaacgataactgccctacagccgtgctggaaaaggacgccgtgtgtagctctagccctagcgtggtcgtgtccgccagaacactgaacaacagatacacaggcccctacacattcgccctggaagatcagcctgtgaagctgcctgccgtgtggtccatcaccacactgaatgctacaagcgccctgctgagagcccaagagcaaattcctcctggcgtgtaccacatcagcctggtgctgacagacagccagaacaatagatgcgagatgcctcggagcctgacactggaagtgtgccagtgcgacaacagaggcatctgcggcacaagctaccccacaacaagccccggcacaagatacggcagacctcactctggaagaacgcgtggaatgaggactgaggatcttcccaaagctgtcgtctttctcgaaccccaatggtatcgggtgctcgaaaaagactctgtgacactgaaatgccaaggggcctactctcccgaggacaactccacacagtggtttcataatgagtccctcatcagctctcaggccagctcttatttcattgatgccgctacagtggacgactccggcgagtatcggtgtcagaccaatctgtctacactgtctgaccccgtgcagcttgaggtccacattggatggttgctcttgcaagccccacgctgggttttcaaagaggaagatccaatccatctgcggtgccacagctggaaaaacaccgctctccacaaagtcacatacctgcaaaatggcaaaggacgcaaatacttccatcacaattccgatttttacattccgaaggctaccctgaaagacagcggcagctatttctgccggggactcgtcggctccaagaatgtgtcctccgaaaccgtgaatatcacgattacccaaggactggctgtgcctacaatctctagcttctttccgcctggataccaagtctccttctgtcttgtgatggtcctcctgtttgctgtggacacaggactgtacttttcc

SEQ ID NO: 1944 - DNA, 1626 bp, synthetic construct
  source 1..1626: mol_type = other DNA
atggccttaccagtgaccgccttgctcctgccgctggccttgctgctccacgccgccaggccgatggccttaccagtgaccgccttgctcctgccgctggccttgctgctccacgccgccaggccgctgttcaatcaagaggtgcagatccctctgaccgagagctactgtggcccctgtcctaagaactggatctgctacaagaacaactgctaccagttcttcgacgagagcaagaattggtacgagagccaggccagctgcatgagccagaatgccagcctgctgaaggtgtacagcaaagaggaccaggacctgctgaaactggtcaagagctaccactggatgggccttgtgcacatccccaccaatggctcttggcagtgggaggacggcagcattctgagccctaacctgctgaccatcatcgagatgcagaagggcgactgcgccctgtacgccagcagctttaagggctacatcgagaattgcagcaccccgaacacctacatctgtatgcagagaaccgttggcggaggcggaagtggaggcggaggatctggcggcggaggctctgacctctttaatcaagaagtccagattccactcaccgaatcctactgcggaccttgtccaaaaaattggatttgttataagaacaactgttatcaattctttgatgagtctaaaaattggtatgagtcccaggcttcctgcatgtctcagaacgcttctctgctgaaagtctactctaaagaagatcaggatctcctgaagctcgtcaagtcttatcattggatggggctcgtccacattcctaccaacggaagctggcaatgggaagatggctccatcctgtctccaaatctgctcacgattattgaaatgcagaaaggggattgtgctctctacgccagctccttcaagggatatattgagaactgtagcacgcccaatacttatatctgtatgcaacggaccgtgacgcgtggaatgaggactgaggatcttcccaaagctgtcgtctttctcgaaccccaatggtatcgggtgctcgaaaaagactctgtgacactgaaatgccaaggggcctactctcccgaggacaactccacacagtggtttcataatgagtccctcatcagctctcaggccagctcttatttcattgatgccgctacagtggacgactccggcgagtatcggtgtcagaccaatctgtctacactgtctgaccccgtgcagcttgaggtccacattggatggttgctcttgcaagccccacgctgggttttcaaagaggaagatccaatccatctgcggtgccacagctggaaaaacaccgctctccacaaagtcacatacctgcaaaatggcaaaggacgcaaatacttccatcacaattccgatttttacattccgaaggctaccctgaaagacagcggcagctatttctgccggggactcgtcggctccaagaatgtgtcctccgaaaccgtgaatatcacgattacccaaggactggctgtgcctacaatctctagcttctttccgcctggataccaagtctccttctgtcttgtgatggtcctcctgtttgctgtggacacaggactgtacttttcc

SEQ ID NO: 1945 - DNA, 1266 bp, synthetic construct
  source 1..1266: mol_type = other DNA
atggccttaccagtgaccgccttgctcctgccgctggccttgctgctccacgccgccaggccgatggagctgactgatttgctcctggcggccatgcttcttgcagtggcaagactaactctgtccagccccgtagctcctgcctgtgaccccagactcctaaataaactgctgcgtgactcccacctccttcacagccgactgagtcagtgtcccgacgtggaccctttgtctatccctgttctgctgcctgctgtggactttagcctgggagaatggaaaacccagacggaacagagcaaggcacaggacattctaggggcagtgtcccttctactggagggagtgatggcagcacgaggacagttggaaccctcctgcctctcatccctcctgggacagctttctgggcaggttcgcctcctcttgggggccctgcagggcctcctaggaacccagcttcctctacagggcaggaccacagctcacaaggaccccaatgccctcttcttgagcttgcaacaactgcttcggggaaaggtgcgcttcctgcttctggtagaaggtcccaccctctgtgtcagacggaccctgccaaccacagctgtcccaagcagtacttctacgcgtggaatgaggactgaggatcttcccaaagctgtcgtctttctcgaaccccaatggtatcgggtgctcgaaaaagactctgtgacactgaaatgccaaggggcctactctcccgaggacaactccacacagtggtttcataatgagtccctcatcagctctcaggccagctcttatttcattgatgccgctacagtggacgactccggcgagtatcggtgtcagaccaatctgtctacactgtctgaccccgtgcagcttgaggtccacattggatggttgctcttgcaagccccacgctgggttttcaaagaggaagatccaatccatctgcggtgccacagctggaaaaacaccgctctccacaaagtcacatacctgcaaaatggcaaaggacgcaaatacttccatcacaattccgatttttacattccgaaggctaccctgaaagacagcggcagctatttctgccggggactcgtcggctccaagaatgtgtcctccgaaaccgtgaatatcacgattacccaaggactggctgtgcctacaatctctagcttctttccgcctggataccaagtctccttctgtcttgtgatggtcctcctgtttgctgtggacacaggactgtacttttcc

SEQ ID NO: 1946 - DNA, 864 bp, synthetic construct
  source 1..864: mol_type = other DNA
atggccttaccagtgaccgccttgctcctgccgctggccttgctgctccacgccgccaggccgatggaccccgacctggaaatcagagccgccttcctgcggcagagaaacacagccctgagaacagaggtggccgagctggaacaagaggtgcagcggctggaaaacgaggtgtcccagtacgagacaagatacggccctctcggaggcggaaaaacgcgtacgcgtggaatgaggactgaggatcttcccaaagctgtcgtctttctcgaaccccaatggtatcgggtgctcgaaaaagactctgtgacactgaaatgccaaggggcctactctcccgaggacaactccacacagtggtttcataatgagtccctcatcagctctcaggccagctcttatttcattgatgccgctacagtggacgactccggcgagtatcggtgtcagaccaatctgtctacactgtctgaccccgtgcagcttgaggtccacattggatggttgctcttgcaagccccacgctgggttttcaaagaggaagatccaatccatctgcggtgccacagctggaaaaacaccgctctccacaaagtcacatacctgcaaaatggcaaaggacgcaaatacttccatcacaattccgatttttacattccgaaggctaccctgaaagacagcggcagctatttctgccggggactcgtcggctccaagaatgtgtcctccgaaaccgtgaatatcacgattacccaaggactggctgtgcctacaatctctagcttctttccgcctggataccaagtctccttctgtcttgtgatggtcctcctgtttgctgtggacacaggactgtacttttcc

SEQ ID NO: 1947 - DNA, 789 bp, synthetic construct
  source 1..789: mol_type = other DNA
atggccttaccagtgaccgccttgctcctgccgctggccttgctgctccacgccgccaggccggaagttgctgccctcgagaaggaggtagcagctttggaaaaagaagtcgcagcccttgagaaagaagttgcggctctggagaagacgcgtggaatgaggactgaggatcttcccaaagctgtcgtctttctcgaaccccaatggtatcgggtgctcgaaaaagactctgtgacactgaaatgccaaggggcctactctcccgaggacaactccacacagtggtttcataatgagtccctcatcagctctcaggccagctcttatttcattgatgccgctacagtggacgactccggcgagtatcggtgtcagaccaatctgtctacactgtctgaccccgtgcagcttgaggtccacattggatggttgctcttgcaagccccacgctgggttttcaaagaggaagatccaatccatctgcggtgccacagctggaaaaacaccgctctccacaaagtcacatacctgcaaaatggcaaaggacgcaaatacttccatcacaattccgatttttacattccgaaggctaccctgaaagacagcggcagctatttctgccggggactcgtcggctccaagaatgtgtcctccgaaaccgtgaatatcacgattacccaaggactggctgtgcctacaatctctagcttctttccgcctggataccaagtctccttctgtcttgtgatggtcctcctgtttgctgtggacacaggactgtacttttcc

SEQ ID NO: 1948 - DNA, 1563 bp, synthetic construct
  source 1..1563: mol_type = other DNA
atggccttaccagtgaccgccttgctcctgccgctggccttgctgctccacgccgccaggccgctgttcaatcaagaggtgcagatccctctgaccgagagctactgtggcccctgtcctaagaactggatctgctacaagaacaactgctaccagttcttcgacgagagcaagaattggtacgagagccaggccagctgcatgagccagaatgccagcctgctgaaggtgtacagcaaagaggaccaggacctgctgaaactggtcaagagcgcccactggatgggccttgtgcacatccccaccaatggctcttggcagtgggaggacggcagcattctgagccctaacctgctgaccatcatcgagatgcagaagggcgactgcgccctgtacgccagcagctttaagggcttcatcgagaattgcagcaccccgaacacctacatctgtatgcagagaaccgttggcggaggcggaagtggaggcggaggatctggcggcggaggctctgacctctttaatcaagaagtccagattccactcaccgaatcctactgcggaccttgtccaaaaaattggatttgttataagaacaactgttatcaattctttgatgagtctaaaaattggtatgagtcccaggcttcctgcatgtctcagaacgcttctctgctgaaagtctactctaaagaagatcaggatctcctgaagctcgtcaagtctgcccattggatggggctcgtccacattcctaccaacggaagctggcaatgggaagatggctccatcctgtctccaaatctgctcacgattattgaaatgcagaaaggggattgtgctctctacgccagctccttcaagggatttattgagaactgtagcacgcccaatacttatatctgtatgcaacggaccgtgacgcgtggaatgaggactgaggatcttcccaaagctgtcgtctttctcgaaccccaatggtatcgggtgctcgaaaaagactctgtgacactgaaatgccaaggggcctactctcccgaggacaactccacacagtggtttcataatgagtccctcatcagctctcaggccagctcttatttcattgatgccgctacagtggacgactccggcgagtatcggtgtcagaccaatctgtctacactgtctgaccccgtgcagcttgaggtccacattggatggttgctcttgcaagccccacgctgggttttcaaagaggaagatccaatccatctgcggtgccacagctggaaaaacaccgctctccacaaagtcacatacctgcaaaatggcaaaggacgcaaatacttccatcacaattccgatttttacattccgaaggctaccctgaaagacagcggcagctatttctgccggggactcgtcggctccaagaatgtgtcctccgaaaccgtgaatatcacgattacccaaggactggctgtgcctacaatctctagcttctttccgcctggataccaagtctccttctgtcttgtgatggtcctcctgtttgctgtggacacaggactgtacttttcc

SEQ ID NO: 1949 - DNA, 1563 bp, synthetic construct
  source 1..1563: mol_type = other DNA
atggccttaccagtgaccgccttgctcctgccgctggccttgctgctccacgccgccaggccgctgttcaatcaagaggtgcagatccctctgaccgagagctactgtggcccctgtcctaagaactggatctgctacaagaacaactgctaccagttcttcgacgagagcaagaattggtacgagagccaggccagctgcatgagccagaatgccagcctgctgaaggtgtacagcaaagaggaccaggacctgctgaaactggtcaagagcgcccactggatgggccttgtgcacatccccaccaatggctcttggcagtgggaggacggcagcattctgagccctaacctgctgaccatcatcgagatgcagaagggcgactgcgccctgtacgccagcagctttaagggctacatcgagaattgcagcaccccgaacacctacatctgtatgcagagaaccgtttctggcggaggcggctctggaggaggcggaagtggcggcggaggcgacctctttaatcaagaagtccagattccactcaccgaatcctactgcggaccttgtccaaaaaattggatttgttataagaacaactgttatcaattctttgatgagtctaaaaattggtatgagtcccaggcttcctgcatgtctcagaacgcttctctgctgaaagtctactctaaagaagatcaggatctcctgaagctcgtcaagtctgcccattggatggggctcgtccacattcctaccaacggaagctggcaatgggaagatggctccatcctgtctccaaatctgctcacgattattgaaatgcagaaaggggattgtgctctctacgccagctccttcaagggatatattgagaactgtagcacgcccaatacttatatctgtatgcaacggaccgtgacgcgtggaatgaggactgaggatcttcccaaagctgtcgtctttctcgaaccccaatggtatcgggtgctcgaaaaagactctgtgacactgaaatgccaaggggcctactctcccgaggacaactccacacagtggtttcataatgagtccctcatcagctctcaggccagctcttatttcattgatgccgctacagtggacgactccggcgagtatcggtgtcagaccaatctgtctacactgtctgaccccgtgcagcttgaggtccacattggatggttgctcttgcaagccccacgctgggttttcaaagaggaagatccaatccatctgcggtgccacagctggaaaaacaccgctctccacaaagtcacatacctgcaaaatggcaaaggacgcaaatacttccatcacaattccgatttttacattccgaaggctaccctgaaagacagcggcagctatttctgccggggactcgtcggctccaagaatgtgtcctccgaaaccgtgaatatcacgattacccaaggactggctgtgcctacaatctctagcttctttccgcctggataccaagtctccttctgtcttgtgatggtcctcctgtttgctgtggacacaggactgtacttttcc

SEQ ID NO: 1950 - DNA, 2121 bp, synthetic construct
  source 1..2121: mol_type = other DNA
atggccttaccagtgaccgccttgctcctgccgctggccttgctgctccacgccgccaggccggacatccagatgacacagagccctagcagcctgtctgccagcgtgggagacagagtgaccatcacatgcaaggccagccaggatgtgggcacagccgtggattggtatcagcagaagcctggcaaggcccctaagctgctgatctactgggccagcacaagacacacaggcgtgcccagcagattttctggcagcggctctggcaccgacttcaccctgacaatatccagcctccagcctgaggacttcgccacctactactgccagcagtacaacagctaccctctgaccttcggccagggcaccaaggtggaaatcaaaagactcgaggacctgaagaacgtgttcccacctgaggtggccgtgttcgagcctagcgaggccgagatcagccacacccagaaagccaccctcgtgtgcctggctaccggcttctaccccgaccatgtggaactgtcttggtgggtcaacggcaaagaggtgcacagcggcgtgtctaccgacccccagccactgaaagaacagcccgccctgaacgacagccggtactgcctgagcagcagactgagagtgtccgccaccttctggcagaacccccggaaccacttcagatgccaggtgcagttctacggcctgagcgagaacgacgagtggacccaggacagagccaagcccgtgacccagatcgtgtctgccgaagcctggggcagagccgattgcggatcccagagcttcggcctgctggaccccaagctgtgctacctgctggatggcatcctgttcatctacggcgtgatcctgaccgccctgttcctgagagtgaagttcagcagaagcgccgacgcccctgcctaccagcagggacagaaccaactgtacaacgagctgaacctgggcagacgggaagagtacgacgtgctggacaagcggagaggcagggaccctgagatgggcggaaagccccagcggagaaagaacccccaggaaggactgtataacgaactccagaaagacaagatggccgaagcctacagcgagatcggcatgaagggcgagcggagaagaggcaagggccacgatggcctgtaccagggcctgagcaccgccaccaaggacacctatgacgccctgcacatgcaggccctgcctccaagaagggccaagcgatctggatctggagcaacaaacttctcactactcaaacaagcaggtgacgtggaggagaatcccgggcctactagtatggactggatttggcgcatccttttccttgtcggcgctgctaccggcgcgcattccttcgaagtgcagctggttgaatcaggtggcggcctggttcaacctggcggatctctgagactgagctgtgccgccagcggctacacctttaccgagtacacaatccactgggtccgacaggcccctggcaaaggacttgagtgggtcgccaacatcaaccccaacaatggcggcaccacctacaaccagaagttcgaggacagattcaccatcagccgggacaacagcaagaacaccctgtacctccagatgaactccctgagagccgaggacaccgccgtgtactattgtgccagaggctggaacttcgactactggggccagggaacactggtcaccgttagctctacgcgtatccagaaccctgatcctgccgtgtaccagctgcgggatagcaagagcagcgacaagagcgtgtgtctgttcaccgacttcgacagccagaccaacgtgtcccagagcaaggactccgacgtgtacatcaccgataagaccgtgctggacatgcggagcatggacttcaagagcaactccgccgtggcctggtccaacaagtccgatttcgcctgcgccaacgccttcaacaacagcattatccccgaggacacattcttcccaagccccgagagcagctgcggtaccattacccaaggactggctgtgcctacaatctctagcttctttccgcctggataccaagtctccttctgtcttgtgatggtcctcctgtttgctgtggacacaggactgtacttttcc

SEQ ID NO: 1951 - DNA, 1896 bp, synthetic construct
  source 1..1896: mol_type = other DNA
atggccttaccagtgaccgccttgctcctgccgctggccttgctgctccacgccgccaggccggacatccagatgacacagagccctagcagcctgtctgccagcgtgggagacagagtgaccatcacatgcaaggccagccaggatgtgggcacagccgtggattggtatcagcagaagcctggcaaggcccctaagctgctgatctactgggccagcacaagacacacaggcgtgcccagcagattttctggcagcggctctggcaccgacttcaccctgacaatatccagcctccagcctgaggacttcgccacctactactgccagcagtacaacagctaccctctgaccttcggccagggcaccaaggtggaaatcaaaagactcgaggacctgaagaacgtgttcccacctgaggtggccgtgttcgagcctagcgaggccgagatcagccacacccagaaagccaccctcgtgtgcctggctaccggcttctaccccgaccatgtggaactgtcttggtgggtcaacggcaaagaggtgcacagcggcgtgtctaccgacccccagccactgaaagaacagcccgccctgaacgacagccggtactgcctgagcagcagactgagagtgtccgccaccttctggcagaacccccggaaccacttcagatgccaggtgcagttctacggcctgagcgagaacgacgagtggacccaggacagagccaagcccgtgacccagatcgtgtctgccgaagcctggggcagagccgattgcggatccctgggagagcctcagctgtgctatatcctggacgccatcctgtttctgtacggcatcgtgctgaccctgctgtactgccggctgaagatccaagtgcggaaggccgccatcaccagctacgagaaatccgacggcgtgtacaccggcctgagcaccagaaatcaagagacatacgagacactgaagcacgaaaagcctccacaaagggccaagcgatctggatctggagcaacaaacttctcactactcaaacaagcaggtgacgtggaggagaatcccgggcctactagtatggactggatttggcgcatccttttccttgtcggcgctgctaccggcgcgcattccttcgaagtgcagctggttgaatcaggtggcggcctggttcaacctggcggatctctgagactgagctgtgccgccagcggctacacctttaccgagtacacaatccactgggtccgacaggcccctggcaaaggacttgagtgggtcgccaacatcaaccccaacaatggcggcaccacctacaaccagaagttcgaggacagattcaccatcagccgggacaacagcaagaacaccctgtacctccagatgaactccctgagagccgaggacaccgccgtgtactattgtgccagaggctggaacttcgactactggggccagggaacactggtcaccgttagctctacgcgtatccagaaccctgatcctgccgtgtaccagctgcgggatagcaagagcagcgacaagagcgtgtgtctgttcaccgacttcgacagccagaccaacgtgtcccagagcaaggactccgacgtgtacatcaccgataagaccgtgctggacatgcggagcatggacttcaagagcaactccgccgtggcctggtccaacaagtccgatttcgcctgcgccaacgccttcaacaacagcattatccccgaggacacattcttcccaagccccgagagcagctgcggtaccattacccaaggactggctgtgcctacaatctctagcttctttccgcctggataccaagtctccttctgtcttgtgatggtcctcctgtttgctgtggacacaggactgtacttttcc

SEQ ID NO: 1952 - DNA, 1824 bp, synthetic construct
  source 1..1824: mol_type = other DNA
atggccttaccagtgaccgccttgctcctgccgctggccttgctgctccacgccgccaggccggacatccagatgacacagagccctagcagcctgtctgccagcgtgggagacagagtgaccatcacatgcaaggccagccaggatgtgggcacagccgtggattggtatcagcagaagcctggcaaggcccctaagctgctgatctactgggccagcacaagacacacaggcgtgcccagcagattttctggcagcggctctggcaccgacttcaccctgacaatatccagcctccagcctgaggacttcgccacctactactgccagcagtacaacagctaccctctgaccttcggccagggcaccaaggtggaaatcaaaagactcgagggacagcctaaggccaatcctaccgtgacactgttccctccaagcagcgaagaactccaggccaacaaggccacacttgtgtgcctgatctccgacttctaccctggggctgtgacagtggcttggaaggccgatggatctcctgtgaaagccggcgtggaaaccaccaagccatccaagcagagcaacaacaaatacgccgccagctcctacctgagcctgacacctgagcagtggaagtcccacagatcctacagctgccaagtgacccacgaaggcagcaccgtggaaaagacagtggcccctacagagtgcagcggatccctgggagagcctcagctgtgctatatcctggacgccatcctgtttctgtacggcatcgtgctgaccctgctgtactgccggctgaagatccaagtgcggaaggccgccatcaccagctacgagaaatccgacggcgtgtacaccggcctgagcaccagaaatcaagagacatacgagacactgaagcacgaaaagcctccacaaagggccaagcgatctggatctggagcaacaaacttctcactactcaaacaagcaggtgacgtggaggagaatcccgggcctactagtatggactggatttggcgcatccttttccttgtcggcgctgctaccggcgcgcattccttcgaagtgcagctggttgaatcaggtggcggcctggttcaacctggcggatctctgagactgagctgtgccgccagcggctacacctttaccgagtacacaatccactgggtccgacaggcccctggcaaaggacttgagtgggtcgccaacatcaaccccaacaatggcggcaccacctacaaccagaagttcgaggacagattcaccatcagccgggacaacagcaagaacaccctgtacctccagatgaactccctgagagccgaggacaccgccgtgtactattgtgccagaggctggaacttcgactactggggccagggaacactggtcaccgttagctctacgcgtatccagaaccctgatcctgccgtgtaccagctgcgggatagcaagagcagcgacaagagcgtgtgtctgttcaccgacttcgacagccagaccaacgtgtcccagagcaaggactccgacgtgtacatcaccgataagaccgtgctggacatgcggagcatggacttcaagagcaactccgccgtggcctggtccaacaagtccgatttcgcctgcgccaacgccttcaacaacagcattatccccgaggacacattcttcccaagccccgagagcagctgcggtaccattacccaaggactggctgtgcctacaatctctagcttctttccgcctggataccaagtctccttctgtcttgtgatggtcctcctgtttgctgtggacacaggactgtacttttcc

SEQ ID NO: 1953 - DNA, 1851 bp, synthetic construct
  source 1..1851: mol_type = other DNA
atggccttaccagtgaccgccttgctcctgccgctggccttgctgctccacgccgccaggccggacatccagatgacacagagccctagcagcctgtctgccagcgtgggagacagagtgaccatcacatgcaaggccagccaggatgtgggcacagccgtggattggtatcagcagaagcctggcaaggcccctaagctgctgatctactgggccagcacaagacacacaggcgtgcccagcagattttctggcagcggctctggcaccgacttcaccctgacaatatccagcctccagcctgaggacttcgccacctactactgccagcagtacaacagctaccctctgaccttcggccagggcaccaaggtggaaatcaaaagactcgagggacagcctaaggccaatcctaccgtgacactgttccctccaagcagcgaagaactccaggccaacaaggccacacttgtgtgcctgatctccgacttctaccctggggctgtgacagtggcttggaaggccgatggatctcctgtgaaagccggcgtggaaaccaccaagccatccaagcagagcaacaacaaatacgccgccagctcctacctgagcctgacacctgagcagtggaagtcccacagatcctacagctgccaagtgacccacgaaggcagcaccgtggaaaagacagtggcccctacagagtgcagcggatccctgggagagcctcagctgtgctatatcctggacgccatcctgtttctgtacggcatcgtgctgaccctgctgtactgccggctgaagatccaagtgcggaaggccgccatcaccagctacgagaaatccgacggcgtgtacaccggcctgagcaccagaaatcaagagacatacgagacactgaagcacgaaaagcctccacaaagggccaagcgatctggatctggagcaacaaacttctcactactcaaacaagcaggtgacgtggaggagaatcccgggcctactagtatggactggatttggcgcatccttttccttgtcggcgctgctaccggcgcgcattccttcgaagtgcagctggttgaatcaggtggcggcctggttcaacctggcggatctctgagactgagctgtgccgccagcggctacacctttaccgagtacacaatccactgggtccgacaggcccctggcaaaggacttgagtgggtcgccaacatcaaccccaacaatggcggcaccacctacaaccagaagttcgaggacagattcaccatcagccgggacaacagcaagaacaccctgtacctccagatgaactccctgagagccgaggacaccgccgtgtactattgtgccagaggctggaacttcgactactggggccagggaacactggtcaccgttagctctacgcgtgcctctacaaagggaccctccgtgtttcctctggctcccagcagcaagtctacaagcggaggaacagccgctctgggctgcctggtcaaggattactttcccgagcctgtgaccgtgtcctggaatagcggagcactgacaagcggcgtgcacacctttccagccgtgctgcaaagcagcggcctgtactctctgagcagcgtggtcacagtgcctagctctagcctgggcacccagacctacatctgcaatgtgaaccacaagcctagcaacaccaaggtggacaagagagtggaacccaagagctgtggtaccattacccaaggactggctgtgcctacaatctctagcttctttccgcctggataccaagtctccttctgtcttgtgatggtcctcctgtttgctgtggacacaggactgtacttttcc

SEQ ID NO: 1954 - DNA, 1461 bp, synthetic construct
  source 1..1461: mol_type = other DNA
atggccttaccagtgaccgccttgctcctgccgctggccttgctgctccacgccgccaggccggacgtgcagatgatccagacccccgatagcctggccgtgtccctgggacagagagccaccatctcttgcagagccagcgagagcgtggacaactacggcatcagcttcatgcactggtatcagcagaagcccggccagagccccaagctgctgatctacagagcctccaacctggaaagcggcatccccgccagattttccggcagcggcagcagaaccgacttcaccctgaccatcaaccccgtggaaaccgacgacgtggcaacctactactgccagcagaacaacaaggacccccccacctttggcggaggcaccaagctggaaatcaagggcggaggcggaagtggaggcggaggatctggcggcggaggctctgggggaggcggctctcaggtgcaactccagcagtctggcgctgagcttgtgaagcctggggccagcgtgaagattagctgcaaggccagcggctacgccttcagcagctactggatgaactgggtcaagcagcggcctggcaagggcctggaatggatcggccaaatctaccccggcgacggcgacaccacctacaacggcaagttcaagggcaaggccaccctgacagccgacaagagcagcagcaccgtgtacatgcaactgaacagcctgaccagcgaggacagcgccgtgtacttctgcgtgcggtactactacggcagctccggctacttcgactattggggccagggcaccacactgaccgtgtcctctacgcgtggaatgaggactgaggatcttcccaaagctgtcgtctttctcgaaccccaatggtatcgggtgctcgaaaaagactctgtgacactgaaatgccaaggggcctactctcccgaggacaactccacacagtggtttcataatgagtccctcatcagctctcaggccagctcttatttcattgatgccgctacagtggacgactccggcgagtatcggtgtcagaccaatctgtctacactgtctgaccccgtgcagcttgaggtccacattggatggttgctcttgcaagccccacgctgggttttcaaagaggaagatccaatccatctgcggtgccacagctggaaaaacaccgctctccacaaagtcacatacctgcaaaatggcaaaggacgcaaatacttccatcacaattccgatttttacattccgaaggctaccctgaaagacagcggcagctatttctgccggggactcgtcggctccaagaatgtgtcctccgaaaccgtgaatatcacgattacccaaggactggctgtgcctacaatctctagcttctttccgcctggataccaagtctccttctgtcttgtgatggtcctcctgtttgctgtggacacaggactgtacttttacgtg

SEQ ID NO: 1955 - DNA, 1434 bp, synthetic construct
  source 1..1434: mol_type = other DNA
atggccttaccagtgaccgccttgctcctgccgctggccttgctgctccacgccgccaggccggacgtgcagatgatccagacccccagcagcctgtctgccagcctgggcgatagagtgaccatcagctgtcgggccagccaggacatcggcaactacctgaactggtatcagcagaaacccgacggcaccgtgaagctgctgatctactacaccagcagactgcacagcggcgtgcccagcagattttctggcagcggctctggcaccgagtacagcctgaccatctccaacctggaacaggaagatattgctacctacttctgtcagcaaggcagcgccctgccccctacatttggcggcggaacaaagctggaaatcaacggcggaggcggaagtggaggcggaggatctggcggcggaggctctgctctccagctccagcagtctggcgcagaactcgtgcggcctggcgcttctgtgaccctgagctgtaaagccagcggctacaccttcaccgactacgagatgcactgggtcaagcagacccctgtgcacggcctggaatggatcggagccatcgaccctgagacaggcggcaccgcctacaaccagaagttcgagggcaaggccatcctgaccgccgacaagagcagcagcacagcctacatggaactgcggagcctgacctccgaggacagccccgtgtactactgtgccagacggcggtactacggcagcagctccttcgactattggggccagggcaccaccctgaccgtgtctagtacgcgtggaatgaggactgaggatcttcccaaagctgtcgtctttctcgaaccccaatggtatcgggtgctcgaaaaagactctgtgacactgaaatgccaaggggcctactctcccgaggacaactccacacagtggtttcataatgagtccctcatcagctctcaggccagctcttatttcattgatgccgctacagtggacgactccggcgagtatcggtgtcagaccaatctgtctacactgtctgaccccgtgcagcttgaggtccacattggatggttgctcttgcaagccccacgctgggttttcaaagaggaagatccaatccatctgcggtgccacagctggaaaaacaccgctctccacaaagtcacatacctgcaaaatggcaaaggacgcaaatacttccatcacaattccgatttttacattccgaaggctaccctgaaagacagcggcagctatttctgccggggactcgtcggctccaagaatgtgtcctccgaaaccgtgaatatcacgattacccaaggactggctgtgcctacaatctctagcttctttccgcctggataccaagtctccttctgtcttgtgatggtcctcctgtttgctgtggacacaggactgtacttttacgtg

SEQ ID NO: 1956 - DNA, 1440 bp, synthetic construct
  source 1..1440: mol_type = other DNA
atggccttaccagtgaccgccttgctcctgccgctggccttgctgctccacgccgccaggccggacatcgtgctgacacagagccctgccaccctgtctctgagccctggcgatagagccaccatcagctgtagagccagcgagagcgtgaccatcctgggcagccacctgatctactggtatcagcagaagcccggccagccccccagactgctgattcagctggcctccaatgtgcagaccggcgtgccagccagattttccggcagcggcagcagaaccgacttcaccctgaccatcagcagcgtggaacccgaggacttcgccgtgtactactgcctccagagccggaccatccccagaacattcggccagggcaccaagctggaaatcaagagaggcggaggcggaagtggaggcggaggatctggcggcggaggctctcaggtgcagctggtgcagtctggccccgaagtgaagaaacccggcgagtccgtgaagatcagctgcaaggccagcggctacaccttccggcactacagcatgaactgggtcaagcaggccccaggccagggcctgaagtggatgggcagaatcaacaccgagagcggcgtgcccatctacgccgacgacttcaagggccggttcagcttcaccgtggacaccagcgccagcaccgcctacctggaaatctccagcctgaccagcgaggataccgccgtgtatttctgctccaacgactacctgtacagcctggatttctggggccagggaaccaccctgacagtgtcctctacgcgtggaatgaggactgaggatcttcccaaagctgtcgtctttctcgaaccccaatggtatcgggtgctcgaaaaagactctgtgacactgaaatgccaaggggcctactctcccgaggacaactccacacagtggtttcataatgagtccctcatcagctctcaggccagctcttatttcattgatgccgctacagtggacgactccggcgagtatcggtgtcagaccaatctgtctacactgtctgaccccgtgcagcttgaggtccacattggatggttgctcttgcaagccccacgctgggttttcaaagaggaagatccaatccatctgcggtgccacagctggaaaaacaccgctctccacaaagtcacatacctgcaaaatggcaaaggacgcaaatacttccatcacaattccgatttttacattccgaaggctaccctgaaagacagcggcagctatttctgccggggactcgtcggctccaagaatgtgtcctccgaaaccgtgaatatcacgattacccaaggactggctgtgcctacaatctctagcttctttccgcctggataccaagtctccttctgtcttgtgatggtcctcctgtttgctgtggacacaggactgtacttttacgtg

SEQ ID NO: 1957 - DNA, 1440 bp, synthetic construct
  source 1..1440: mol_type = other DNA
atggccttaccagtgaccgccttgctcctgccgctggccttgctgctccacgccgccaggccggacatccagatgacccagagccctagctcactgagcgccagcgtgggcgacagggtgaccattacctgctccgccagccaggacatcagcaactacctgaactggtaccagcagaagcccggcaaggcccccaagctgctgatctactacacctccaacctgcactccggcgtgcccagcaggttcagcggaagcggcagcggcaccgatttcaccctgaccatctccagcctgcagcccgaggacttcgccacctactactgccagcagtacaggaagctcccctggactttcggccagggcaccaaactggagatcaagcgtggcggaggcggaagtggaggcggaggatctggcggcggaggctctcaggtgcagctggtccagagcggcgccgaagtgaagaagcccggcagctccgtgaaagtgagctgcaaggccagcggcggcaccttcagcaactactggatgcactgggtgaggcaggcccccggacagggcctggagtggatgggcgccacctacaggggccacagcgacacctactacaaccagaagttcaagggccgggtgaccatcaccgccgacaagagcaccagcaccgcctacatggaactgagcagcctcaggagcgaggacaccgctgtgtattactgcgccaggggcgccatctacgacggctacgacgtgctggacaactggggccagggcacactggtgaccgtgtccagcacgcgtggaatgaggactgaggatcttcccaaagctgtcgtctttctcgaaccccaatggtatcgggtgctcgaaaaagactctgtgacactgaaatgccaaggggcctactctcccgaggacaactccacacagtggtttcataatgagtccctcatcagctctcaggccagctcttatttcattgatgccgctacagtggacgactccggcgagtatcggtgtcagaccaatctgtctacactgtctgaccccgtgcagcttgaggtccacattggatggttgctcttgcaagccccacgctgggttttcaaagaggaagatccaatccatctgcggtgccacagctggaaaaacaccgctctccacaaagtcacatacctgcaaaatggcaaaggacgcaaatacttccatcacaattccgatttttacattccgaaggctaccctgaaagacagcggcagctatttctgccggggactcgtcggctccaagaatgtgtcctccgaaaccgtgaatatcacgattacccaaggactggctgtgcctacaatctctagcttctttccgcctggataccaagtctccttctgtcttgtgatggtcctcctgtttgctgtggacacaggactgtacttttacgtg

SEQ ID NO: 1958 - DNA, 1455 bp, synthetic construct
  source 1..1455: mol_type = other DNA
atggccttaccagtgaccgccttgctcctgccgctggccttgctgctccacgccgccaggccggacatcgtgatgacccagagccccgatagcctggccgtgtctctgggagagagagccaccatcaactgcgagagcagccagagcctgctgaacagcggcaaccagaagaactacctgacctggtatcagcagaagcccggccagccccccaagcccctgatctattgggccagcaccagagaaagcggcgtgcccgatagattcagcggcagcggaagcggcaccgacttcaccctgaccatcagttctcttcaggccgaggacgtggccgtgtactactgccagaacgactacagctacccctacaccttcggccagggcaccaagctggaaatcaagagaggcggaggcggaagtggaggcggaggatctggcggcggaggctctgaagtgcagctggtgcagtctggggccgaagtgaagaagcctggcgagagcctgaagatcagctgcaagggcagcggctacagcttcaccgactactacatgaagtgggccagacagatgcccggcaagggcctggaatggatgggcgacatcatccccagcaacggggccaccttctacaaccagaaattcaagggccaagtgaccatctccgccgacaagagcatcagcaccacctacctccagtggtccagcctgaaggccagcgacaccgccatgtactattgcgccagaagccatctgctgcgggccagttggttcgcctattggggccagggaacaatggtcacagtgtccagcacgcgtggaatgaggactgaggatcttcccaaagctgtcgtctttctcgaaccccaatggtatcgggtgctcgaaaaagactctgtgacactgaaatgccaaggggcctactctcccgaggacaactccacacagtggtttcataatgagtccctcatcagctctcaggccagctcttatttcattgatgccgctacagtggacgactccggcgagtatcggtgtcagaccaatctgtctacactgtctgaccccgtgcagcttgaggtccacattggatggttgctcttgcaagccccacgctgggttttcaaagaggaagatccaatccatctgcggtgccacagctggaaaaacaccgctctccacaaagtcacatacctgcaaaatggcaaaggacgcaaatacttccatcacaattccgatttttacattccgaaggctaccctgaaagacagcggcagctatttctgccggggactcgtcggctccaagaatgtgtcctccgaaaccgtgaatatcacgattacccaaggactggctgtgcctacaatctctagcttctttccgcctggataccaagtctccttctgtcttgtgatggtcctcctgtttgctgtggacacaggactgtacttttacgtg

SEQ ID NO: 1959 - DNA, 1440 bp, synthetic construct
  source 1..1440: mol_type = other DNA
atggccttaccagtgaccgccttgctcctgccgctggccttgctgctccacgccgccaggccggacatccagatgacccagtctaccagttccctgagtgcatccctcggagacagggtgacgatcagttgcagcgcaagccaagggatcaataactatctgaactggtatcagcagaaaccggacggaacagtcgaactcctgatttattacaccagcacccttcagagtggcgtcccttcccggttcagtggctccggaagcgggaccgattactccctgaccatttctaatctggagccagaggacataggaacgtattattgccagcagtatagtaaactgccacgaacttttggaggggggacgaaactggagatcaaaggcggaggcggaagtggaggcggaggatctggcggcggaggctctcaggtgcaactccagcagtccggaagcgagcttatgatgccaggggcatcagtgaagatcagctgcaaggctactggctacaccttctctaattactggatagagtgggttaaacaaaggccagggcacggcctggaatggatcggcgagatcctgcctgggacaggccgaaccatttataacgagaagttcaaaggcaaggctactttcaccgcagatataagctctaatacagtgcaaatgcagctctcttccctgacaagtgaggatagtgccgtgtattattgcgcacgaagagattactatggaaatttttattacgctatggattattggggtcaaggaacaagtgtgaccgttagcagcacgcgtggaatgaggactgaggatcttcccaaagctgtcgtctttctcgaaccccaatggtatcgggtgctcgaaaaagactctgtgacactgaaatgccaaggggcctactctcccgaggacaactccacacagtggtttcataatgagtccctcatcagctctcaggccagctcttatttcattgatgccgctacagtggacgactccggcgagtatcggtgtcagaccaatctgtctacactgtctgaccccgtgcagcttgaggtccacattggatggttgctcttgcaagccccacgctgggttttcaaagaggaagatccaatccatctgcggtgccacagctggaaaaacaccgctctccacaaagtcacatacctgcaaaatggcaaaggacgcaaatacttccatcacaattccgatttttacattccgaaggctaccctgaaagacagcggcagctatttctgccggggactcgtcggctccaagaatgtgtcctccgaaaccgtgaatatcacgattacccaaggactggctgtgcctacaatctctagcttctttccgcctggataccaagtctccttctgtcttgtgatggtcctcctgtttgctgtggacacaggactgtacttttacgtg

SEQ ID NO: 1960 - DNA, 1425 bp, synthetic construct
  source 1..1425: mol_type = other DNA
atggccttaccagtgaccgccttgctcctgccgctggccttgctgctccacgccgccaggccggacatccagatgacccagagccctgccagcctgtccgtgtctgtgggcgagacagtgaccatcacctgtcgggccagcgagaacatctacagcaacctggcctggtatcagcagaagcagggcaagagcccccaactgctggtgtacgccgccaccaatctggccgatggcgtgcccagcagattttccggctctggcagcggcacccagtacagcctgaagatcaacagcctccagagcgaggacttcggcagctactactgccagcacttctggggcacctggacctttggaggaggcaccaccctggaaatcaagggcggaggcggaagtggaggcggaggatctggcggcggaggctctgaagtgcaactccagcagagcggccctgagcttgtgaagcctggcgcttccgtgaagatgagctgcaaggccagcggctacaccttcaccgactactacatgaagtggatgaagcagagccacggcaagtccctggaatggatcggcgacatcaaccccaacaacggcggcaccacctacaaccagaagttcaagggcaaggccaccctgaccgtggacaagagcagcagcaccgcctacatgcaactgaacagcctgaccagcgaggacagcgccgtgtactactgcgccagagactacggctacggctatttcgactactggggccagggcacaaccctgacagtgtcctctacgcgtggaatgaggactgaggatcttcccaaagctgtcgtctttctcgaaccccaatggtatcgggtgctcgaaaaagactctgtgacactgaaatgccaaggggcctactctcccgaggacaactccacacagtggtttcataatgagtccctcatcagctctcaggccagctcttatttcattgatgccgctacagtggacgactccggcgagtatcggtgtcagaccaatctgtctacactgtctgaccccgtgcagcttgaggtccacattggatggttgctcttgcaagccccacgctgggttttcaaagaggaagatccaatccatctgcggtgccacagctggaaaaacaccgctctccacaaagtcacatacctgcaaaatggcaaaggacgcaaatacttccatcacaattccgatttttacattccgaaggctaccctgaaagacagcggcagctatttctgccggggactcgtcggctccaagaatgtgtcctccgaaaccgtgaatatcacgattacccaaggactggctgtgcctacaatctctagcttctttccgcctggataccaagtctccttctgtcttgtgatggtcctcctgtttgctgtggacacaggactgtacttttacgtg

SEQ ID NO: 1961 - DNA, 1437 bp, synthetic construct
  source 1..1437: mol_type = other DNA
atggccttaccagtgaccgccttgctcctgccgctggccttgctgctccacgccgccaggccggacgagatcgtgctgacacagagccccgccaccctgtcactgtctccaggcgaaagagccaccctgagctgtagcgccagcagcagcgtgtcctacatgcactggtatcagcagaagcccggccaggcccccagactgctgatctacgataccagcaagctggcctccggcatccccgccagattttctggcagcggctccggcaccgacttcaccctgacaatcagcagcctggaacccgaggacgtggccgtgtactactgttttcaaggcagcgtgtaccccttcaccttcggccagggcaccaagctggaaatcaagagaggtggcggtggctcgggcggtggtgggtcgggtggcggcggatctcaggtgcagctccaggaatctggccctggcctcgtgaagcctagccagaccctgagcctgacctgtaccgtgtctggcggcagcatcagcacaagcggcatgggcgtgggctggatcagacagcaccctggcaagggcctggaatggatcggccacatttggtgggacgacgacaagcggtacaaccccgccctgaagtccagagtgaccatcagcgtggacaccagcaagaaccagttcagcctgaagctgagcagcgtgacagccgccgataccgccgtgtattattgcgcccggatggaactgtggtcctactacttcgactactggggccagggaaccctcgtgaccgtgtctagtacgcgtggaatgaggactgaggatcttcccaaagctgtcgtctttctcgaaccccaatggtatcgggtgctcgaaaaagactctgtgacactgaaatgccaaggggcctactctcccgaggacaactccacacagtggtttcataatgagtccctcatcagctctcaggccagctcttatttcattgatgccgctacagtggacgactccggcgagtatcggtgtcagaccaatctgtctacactgtctgaccccgtgcagcttgaggtccacattggatggttgctcttgcaagccccacgctgggttttcaaagaggaagatccaatccatctgcggtgccacagctggaaaaacaccgctctccacaaagtcacatacctgcaaaatggcaaaggacgcaaatacttccatcacaattccgatttttacattccgaaggctaccctgaaagacagcggcagctatttctgccggggactcgtcggctccaagaatgtgtcctccgaaaccgtgaatatcacgattacccaaggactggctgtgcctacaatctctagcttctttccgcctggataccaagtctccttctgtcttgtgatggtcctcctgtttgctgtggacacaggactgtacttttacgtg

SEQ ID NO: 1962 - DNA, 1434 bp, synthetic construct
  source 1..1434: mol_type = other DNA
atggccttaccagtgaccgccttgctcctgccgctggccttgctgctccacgccgccaggccggacatccagatgacacagactacatcctccctgtctgcctctctgggagacagagtcaccatcagttgcagggcaagtcaggacattagtaaatatttaaattggtatcagcagaaaccagatggaactgttaaactcctgatctaccatacatcaagattacactcaggagtcccatcaaggttcagtggcagtgggtctggaacagattattctctcaccattagcaacctggagcaagaagatattgccacttacttttgccaacagggtaatacgcttccgtacacgttcggaggggggaccaagctggagatcacaggtggcggtggctcgggcggtggtgggtcgggtggcggcggatctgaggtgaaactgcaggagtcaggacctggcctggtggcgccctcacagagcctgtccgtcacatgcactgtctcaggggtctcattacccgactatggtgtaagctggattcgccagcctccacgaaagggtctggagtggctgggagtaatatggggtagtgaaaccacatactataattcagctctcaaatccagactgaccatcatcaaggacaactccaagagccaagttttcttaaaaatgaacagtctgcaaactgatgacacagccatttactactgtgccaaacattattactacggtggtagctatgctatggactactggggtcaaggaacctcagtcaccgtctcctcaacgcgtggaatgaggactgaggatcttcccaaagctgtcgtctttctcgaaccccaatggtatcgggtgctcgaaaaagactctgtgacactgaaatgccaaggggcctactctcccgaggacaactccacacagtggtttcataatgagtccctcatcagctctcaggccagctcttatttcattgatgccgctacagtggacgactccggcgagtatcggtgtcagaccaatctgtctacactgtctgaccccgtgcagcttgaggtccacattggatggttgctcttgcaagccccacgctgggttttcaaagaggaagatccaatccatctgcggtgccacagctggaaaaacaccgctctccacaaagtcacatacctgcaaaatggcaaaggacgcaaatacttccatcacaattccgatttttacattccgaaggctaccctgaaagacagcggcagctatttctgccggggactcgtcggctccaagaatgtgtcctccgaaaccgtgaatatcacgattacccaaggactggctgtgcctacaatctctagcttctttccgcctggataccaagtctccttctgtcttgtgatggtcctcctgtttgctgtggacacaggactgtacttttacgtg

SEQ ID NO: 1963 - DNA, 1434 bp, synthetic construct
  source 1..1434: mol_type = other DNA
atggccttaccagtgaccgccttgctcctgccgctggccttgctgctccacgccgccaggccggagatcgtgatgacccagagccctgccaccctgtctctgagccctggcgaaagagccaccctgagctgtagagccagccaggacatcagcaagtacctgaactggtatcagcagaagcccggccaggcccccagactgctgatctaccacaccagcagactgcacagcggcatccccgccagattttctggctctggcagcggcaccgactacaccctgacaatcagcagcctccagcccgaggacttcgccgtgtacttctgtcagcaaggcaacaccctgccctacaccttcggccagggcaccaagctggaaatcaagggcggaggcggaagtggaggcggaggatctggcggcggaggctctcaggtgcaactccaggaatctggccctggcctcgtgaagcccagcgagacactgagcctgacctgtaccgtgtccggcgtgtccctgcctgactatggcgtgtcctggatcagacagccccctggcaagggcctggaatggatcggagtgatttggggcagcgaaaccacctactacaacagctccctgaagtccagagtgaccatctccaaggacaactccaagaaccaggtgtccctgaagctgagcagcgtgacagccgccgacaccgccgtgtattactgcgccaagcactactactacggcggcagctacgctatggactactggggccagggaaccctcgtgaccgtgtctagtacgcgtggaatgaggactgaggatcttcccaaagctgtcgtctttctcgaaccccaatggtatcgggtgctcgaaaaagactctgtgacactgaaatgccaaggggcctactctcccgaggacaactccacacagtggtttcataatgagtccctcatcagctctcaggccagctcttatttcattgatgccgctacagtggacgactccggcgagtatcggtgtcagaccaatctgtctacactgtctgaccccgtgcagcttgaggtccacattggatggttgctcttgcaagccccacgctgggttttcaaagaggaagatccaatccatctgcggtgccacagctggaaaaacaccgctctccacaaagtcacatacctgcaaaatggcaaaggacgcaaatacttccatcacaattccgatttttacattccgaaggctaccctgaaagacagcggcagctatttctgccggggactcgtcggctccaagaatgtgtcctccgaaaccgtgaatatcacgattacccaaggactggctgtgcctacaatctctagcttctttccgcctggataccaagtctccttctgtcttgtgatggtcctcctgtttgctgtggacacaggactgtacttttacgtg

SEQ ID NO: 1964 - DNA, 1440 bp, synthetic construct
  source 1..1440: mol_type = other DNA
atggccttaccagtgaccgccttgctcctgccgctggccttgctgctccacgccgccaggccggagatcgtgctgacacagagccctgccaccctgtctctgagccctggcgaaagagccaccctgagctgtagagccagccagagcgtgtccagctacctggcctggtatcagcagaagcccggccaggctccccggctgctgatctacgatgccagcaatagagccaccggcatccccgccagattttccggctctggcagcggcaccgacttcaccctgaccatcagctccctggaacccgaggacttcgccgtgtactactgccagcagcggagcaactggcccatcacattcggccagggcacccggctggaaatcaaaggcggaggcggaagtggaggcggaggatctggcggcggaggctctgaagtgcagctggtggaatcaggcggcggactggtgcagcctggcagaagcctgagactgagctgtgccgccagcggcttcaccttcaacgactacgccatgcactgggtgcgccaggcccctggaaaaggactggaatgggtgtccacaatcagctggaacagcggcagcatcggctacgccgatagcgtgaagggccggttcaccatcagccgggacaacgccaagaagtccctgtacctccagatgaacagcctgcgggccgaggacacagccctgtactattgcgccaaggacatccagtacggcaactactactacggcatggacgtgtggggccagggaaccaccgtgaccgtgtcatctacgcgtggaatgaggactgaggatcttcccaaagctgtcgtctttctcgaaccccaatggtatcgggtgctcgaaaaagactctgtgacactgaaatgccaaggggcctactctcccgaggacaactccacacagtggtttcataatgagtccctcatcagctctcaggccagctcttatttcattgatgccgctacagtggacgactccggcgagtatcggtgtcagaccaatctgtctacactgtctgaccccgtgcagcttgaggtccacattggatggttgctcttgcaagccccacgctgggttttcaaagaggaagatccaatccatctgcggtgccacagctggaaaaacaccgctctccacaaagtcacatacctgcaaaatggcaaaggacgcaaatacttccatcacaattccgatttttacattccgaaggctaccctgaaagacagcggcagctatttctgccggggactcgtcggctccaagaatgtgtcctccgaaaccgtgaatatcacgattacccaaggactggctgtgcctacaatctctagcttctttccgcctggataccaagtctccttctgtcttgtgatggtcctcctgtttgctgtggacacaggactgtacttttacgtg

SEQ ID NO: 1965 - DNA, 1449 bp, synthetic construct
  source 1..1449: mol_type = other DNA
atggccttaccagtgaccgccttgctcctgccgctggccttgctgctccacgccgccaggccggacatcgtgatgacccagacccccctgagcctgcctgtgacacctggcgagcctgccagcatctcctgcagaagcagcaagagcctgctgcacagcaacggcatcacctacctgtactggtatctgcagaaacccggccagagcccccaactgctgatctaccagatgagcaacctggtgtccggcgtgcccgacagattttctggcagcggctccggcaccgacttcaccctgaagatcagccgggtggaagccgaggacgtgggcgtgtactactgcgcccagaacctggaactgccctacacctttggcggcggaacaaaggtggaaatcaagcggggcggaggcggaagtggaggcggaggatctggcggcggaggctctcaggtgcaactggtgcagagcggagccgaagtgaaaaagcccggcagcagcgtgaaggtgtcctgcaaggccagcggctacgccttcagctactcctggatcaactgggtgcgccaggcccctggacagggcctggaatggatgggcagaatcttccccggcgacggcgacaccgactacaacggcaagttcaagggcagagtgaccatcaccgccgacaagagcaccagcaccgcctacatggaactgagcagcctgcggagcgaggataccgccgtgtactattgtgccagaaacgtgttcgacggctactggctggtgtactggggccagggaacacttgtgaccgtgtccagcacgcgtggaatgaggactgaggatcttcccaaagctgtcgtctttctcgaaccccaatggtatcgggtgctcgaaaaagactctgtgacactgaaatgccaaggggcctactctcccgaggacaactccacacagtggtttcataatgagtccctcatcagctctcaggccagctcttatttcattgatgccgctacagtggacgactccggcgagtatcggtgtcagaccaatctgtctacactgtctgaccccgtgcagcttgaggtccacattggatggttgctcttgcaagccccacgctgggttttcaaagaggaagatccaatccatctgcggtgccacagctggaaaaacaccgctctccacaaagtcacatacctgcaaaatggcaaaggacgcaaatacttccatcacaattccgatttttacattccgaaggctaccctgaaagacagcggcagctatttctgccggggactcgtcggctccaagaatgtgtcctccgaaaccgtgaatatcacgattacccaaggactggctgtgcctacaatctctagcttctttccgcctggataccaagtctccttctgtcttgtgatggtcctcctgtttgctgtggacacaggactgtacttttacgtg

SEQ ID NO: 1966 - DNA, 1452 bp, synthetic construct
  source 1..1452: mol_type = other DNA
atggccttaccagtgaccgccttgctcctgccgctggccttgctgctccacgccgccaggccggacatccagatgacccagagccccagcagcctgtctgccagcgtgggcgacagagtgaccatcacctgtcggagcagccagagcatcgtgcactccgtgggcaacaccttcctggaatggtatcagcagaagcccggcaaggcccccaagctgctgatctacaaggtgtccaacagattcagcggcgtgcccagcaggtttagcggctctggcagcggcaccgacttcaccctgaccatctctagcctccagcccgaggacttcgccacctactactgttttcaaggcagccagttcccctacaccttcggccagggaacaaaggtggaaatcaagcggggcggaggcggaagtggaggcggaggatctggcggcggaggctctgaagtgcaactggtggaaagcggaggcggcctggtgcagcctggcggatctctgagactgagctgtgccgccagcggctacgagttcagccggtcctggatgaactgggtgcgccaggcccctggcaagggactggaatgggtgggaagaatctaccccggcgacggcgacaccaactacagcggcaagttcaagggccggttcaccatcagcgccgacaccagcaagaacaccgcctacctccagatgaacagcctgcgggccgaggataccgccgtgtactactgtgccagagatggcagctcctgggactggtacttcgacgtgtggggacagggaacccttgtgaccgtgtccagcacgcgtggaatgaggactgaggatcttcccaaagctgtcgtctttctcgaaccccaatggtatcgggtgctcgaaaaagactctgtgacactgaaatgccaaggggcctactctcccgaggacaactccacacagtggtttcataatgagtccctcatcagctctcaggccagctcttatttcattgatgccgctacagtggacgactccggcgagtatcggtgtcagaccaatctgtctacactgtctgaccccgtgcagcttgaggtccacattggatggttgctcttgcaagccccacgctgggttttcaaagaggaagatccaatccatctgcggtgccacagctggaaaaacaccgctctccacaaagtcacatacctgcaaaatggcaaaggacgcaaatacttccatcacaattccgatttttacattccgaaggctaccctgaaagacagcggcagctatttctgccggggactcgtcggctccaagaatgtgtcctccgaaaccgtgaatatcacgattacccaaggactggctgtgcctacaatctctagcttctttccgcctggataccaagtctccttctgtcttgtgatggtcctcctgtttgctgtggacacaggactgtacttttacgtg

SEQ ID NO: 1967 - DNA, 1434 bp, synthetic construct
  source 1..1434: mol_type = other DNA
atggccttaccagtgaccgccttgctcctgccgctggccttgctgctccacgccgccaggccggagatcgtgctgacacagagccctggcaccctgagcctgtctccaggcgaaagagccacactgagctgtcgggcctctcagagcgtgggaggctacctggcttggtatcagcagaagccaggccaggcccccagactgctgatctacgacgccagcaatcgggccacaggcatccccgccagattttctggcagcggctccggcaccgacttcaccctgacaatcagcagcctggaacccgaggacttcgccgtgtactactgccagcagcggaacaactggccccccatgtacacattcggccagggcaccaagctggaaatcaagagaggcggaggcggaagtggaggcggaggatctggcggcggaggctctcaggtgcaactggtgcagagcggagccgaagtgaagaaacccggcagcagcgtgaaggtgtcctgcaaggcttccggcggcaccttcagcagctacgccatttcttgggtgcgccaggctcctggacagggcctggaatggatgggcggcatcatccctatcctgggcaccgccaactacgcccagaaattccagggcagagtgaccatcaccgccgacgagagcaccagcaccgcctacatggaactgagcagcctgcggagcgaggacacagccgtgtattattgcgccagatggggcggaggggccttcgacatttggggccagggaacaatggtcaccgtgtccagcacgcgtggaatgaggactgaggatcttcccaaagctgtcgtctttctcgaaccccaatggtatcgggtgctcgaaaaagactctgtgacactgaaatgccaaggggcctactctcccgaggacaactccacacagtggtttcataatgagtccctcatcagctctcaggccagctcttatttcattgatgccgctacagtggacgactccggcgagtatcggtgtcagaccaatctgtctacactgtctgaccccgtgcagcttgaggtccacattggatggttgctcttgcaagccccacgctgggttttcaaagaggaagatccaatccatctgcggtgccacagctggaaaaacaccgctctccacaaagtcacatacctgcaaaatggcaaaggacgcaaatacttccatcacaattccgatttttacattccgaaggctaccctgaaagacagcggcagctatttctgccggggactcgtcggctccaagaatgtgtcctccgaaaccgtgaatatcacgattacccaaggactggctgtgcctacaatctctagcttctttccgcctggataccaagtctccttctgtcttgtgatggtcctcctgtttgctgtggacacaggactgtacttttacgtg

SEQ ID NO: 1968 - DNA, 1425 bp, synthetic construct
  source 1..1425: mol_type = other DNA
atggccttaccagtgaccgccttgctcctgccgctggccttgctgctccacgccgccaggccggacatccagatgacccagagccccgccaccatcgagaacacaagcctgtctgccagcgtgggcgacagagtgaccatcacctgtagagccagccagggcatcagctcttggctgacctggtatcagcagaagcccgagaaggcccccaagagcctgatctacgccgccagctctctgcagtctggcgtgcccagcagattttccggcagcggctctggcaccgacttcaccctgacaatcagcagcctgcagcccgaggacttcgccacctactactgccagcagtacgacagctaccccatcaccttcggccagggcacccggctggaaatcaagggcggaggcggaagtggaggcggaggatctggcggcggaggctctcaggtgcaactgcagcagtggggagccggactgctgaagcctagcgagacactgagcctgacctgcgccgtgtacggcggcagcttcagcgcctactattggagctggatcagacagccccctggcaagggcctggaatggatcggcgacatcaatcacggcggaggcaccaactacaaccccagcctgaagtcccgcgtgaccatctccgtggacaccagcaagaaccagttctccctgaagctgaacagcgtgacagccgccgacacagccgtgtactactgtgccagcctgaccgcctattggggccagggatctcttgtgaccgtgtccagcacgcgtggaatgaggactgaggatcttcccaaagctgtcgtctttctcgaaccccaatggtatcgggtgctcgaaaaagactctgtgacactgaaatgccaaggggcctactctcccgaggacaactccacacagtggtttcataatgagtccctcatcagctctcaggccagctcttatttcattgatgccgctacagtggacgactccggcgagtatcggtgtcagaccaatctgtctacactgtctgaccccgtgcagcttgaggtccacattggatggttgctcttgcaagccccacgctgggttttcaaagaggaagatccaatccatctgcggtgccacagctggaaaaacaccgctctccacaaagtcacatacctgcaaaatggcaaaggacgcaaatacttccatcacaattccgatttttacattccgaaggctaccctgaaagacagcggcagctatttctgccggggactcgtcggctccaagaatgtgtcctccgaaaccgtgaatatcacgattacccaaggactggctgtgcctacaatctctagcttctttccgcctggataccaagtctccttctgtcttgtgatggtcctcctgtttgctgtggacacaggactgtacttttacgtg

SEQ ID NO: 1969 - DNA, 1437 bp, synthetic construct
  source 1..1437: mol_type = other DNA
atggccttaccagtgaccgccttgctcctgccgctggccttgctgctccacgccgccaggccggagatcgtgctgacccagagccctgatagcctggccgtgtctctgggcgagagagccaccatcaactgcaaggccagccagagcgtggacttcgacggcgacagctacctgaactggtatcagcagaagcccggccagccccccaaggtgctgatctatgccgccagcacactgcagagcggcgtgcccagcagattttctggcagcggctccggcaccgacttcaccctgaccatcaacagcctggaagccgaggacgccgccacctactactgccagcagagcaacgaggacccctggacctttggcggcggaacaaaggtggaaatcaagggcggaggcggaagtggaggcggaggatctggcggcggaggctctcaggtgcaactggtgcagtccggcgctgaagtgaagaaacctggggccagcgtgaaggtgtcctgcaaggtgtccggctacacctttaccgactactacattacctgggtgcgccaggcccctggacaggccctggaatggatgggctggatctaccccggcagcggcaacaccaagtacagccagaagttccagggcagattcgtgttcagcgtggacaccagcgccagcaccgcctacctgcaactgtctagcctgaaggccgaagataccgccgtgtactactgcgccaactacggcaactattggttcgcctattggggccagggaacccttgtgaccgtgtcctctacgcgtggaatgaggactgaggatcttcccaaagctgtcgtctttctcgaaccccaatggtatcgggtgctcgaaaaagactctgtgacactgaaatgccaaggggcctactctcccgaggacaactccacacagtggtttcataatgagtccctcatcagctctcaggccagctcttatttcattgatgccgctacagtggacgactccggcgagtatcggtgtcagaccaatctgtctacactgtctgaccccgtgcagcttgaggtccacattggatggttgctcttgcaagccccacgctgggttttcaaagaggaagatccaatccatctgcggtgccacagctggaaaaacaccgctctccacaaagtcacatacctgcaaaatggcaaaggacgcaaatacttccatcacaattccgatttttacattccgaaggctaccctgaaagacagcggcagctatttctgccggggactcgtcggctccaagaatgtgtcctccgaaaccgtgaatatcacgattacccaaggactggctgtgcctacaatctctagcttctttccgcctggataccaagtctccttctgtcttgtgatggtcctcctgtttgctgtggacacaggactgtacttttacgtg

SEQ ID NO: 1970 - DNA, 1431 bp, synthetic construct
  source 1..1431: mol_type = other DNA
atggccttaccagtgaccgccttgctcctgccgctggccttgctgctccacgccgccaggccggacatccagatgacccagagccccagcagcctgtctgccagcgtgggcgacagagtgaccatcacctgtagagccagccagggcatcagctcttggctggcctggtatcagcagaagcccgagaaggcccccaagagcctgatctacgccgcctctagtctccagagcggcgtgcccagcagattttctggcagcggctccggcaccgacttcaccctgacaatcagctccctccagcccgaggacttcgccacctactactgccagcagtacaacagctaccctcccacctttggcggaggcaccaaggtggaaatcaagggcggaggcggaagtggaggcggaggatctggcggcggaggctctgaagtgcaactggtgcagtctggcggagggctggtgcatcctgggggaagcctgagactgagctgtgccggctctggcttcgccttcagcagcagcaccatgcactggatcagacaggcccctggcaagggcctggaatggatcagcctgatcggaagcggagggggcatctactacggcgacagcgtgaagggccggttcaccatcagccgggacaacgccaagaacagcctgtacctccagatgaactccctgcgggccgaggacatggccgtgtactattgtgtgcggggctacttcgactgggtggactacttcgattactggggccagggcaccctcgtgaccgtgtcatctacgcgtggaatgaggactgaggatcttcccaaagctgtcgtctttctcgaaccccaatggtatcgggtgctcgaaaaagactctgtgacactgaaatgccaaggggcctactctcccgaggacaactccacacagtggtttcataatgagtccctcatcagctctcaggccagctcttatttcattgatgccgctacagtggacgactccggcgagtatcggtgtcagaccaatctgtctacactgtctgaccccgtgcagcttgaggtccacattggatggttgctcttgcaagccccacgctgggttttcaaagaggaagatccaatccatctgcggtgccacagctggaaaaacaccgctctccacaaagtcacatacctgcaaaatggcaaaggacgcaaatacttccatcacaattccgatttttacattccgaaggctaccctgaaagacagcggcagctatttctgccggggactcgtcggctccaagaatgtgtcctccgaaaccgtgaatatcacgattacccaaggactggctgtgcctacaatctctagcttctttccgcctggataccaagtctccttctgtcttgtgatggtcctcctgtttgctgtggacacaggactgtacttttacgtg

SEQ ID NO: 1971 - DNA, 1449 bp, synthetic construct
  source 1..1449: mol_type = other DNA
atggccttaccagtgaccgccttgctcctgccgctggccttgctgctccacgccgccaggccggacgtcgtgatgacccagagccctctgagcctgcctgtgacactgggacagcctgccagcatctcctgtcggagcagccagagcatcgtgcacagcgacggcaacacctacctggaatggtatcagcagcggccaggccagagccccagacggctgatctacaaggtgtccaacagattcagcggcgtgcccgacagattctccggcagcggctctggcaccgacttcaccctgaagatcagcagagtggaagccgaggacgtgggcgtgtactactgttttcaaggcagccacgccccctggacctttggcggaggaacaaaggtggaaatcaagggcggaggcggaagtggaggcggaggatctggcggcggaggctctgaagtgcaactggtggaatcaggcggcggactggtgcagcctggcggatctctgagactgagctgtgccgccagcggcttcaccttcagcagctacggaatgcactgggtgcgccaggcccctggcaaaggactggaatgggtggcctacatcaccaccagaagcagcaccatctactacgccgacagcgtgaagggccggttcaccatctccagagacaacgccaagaacagcctgtacctccagatgaactccctgcgggccgaggacaccgccgtgtactattgcaccagagagcccctgaccggctactacgctatggactattggggccagggcaccagcgtgaccgtgtctagtacgcgtggaatgaggactgaggatcttcccaaagctgtcgtctttctcgaaccccaatggtatcgggtgctcgaaaaagactctgtgacactgaaatgccaaggggcctactctcccgaggacaactccacacagtggtttcataatgagtccctcatcagctctcaggccagctcttatttcattgatgccgctacagtggacgactccggcgagtatcggtgtcagaccaatctgtctacactgtctgaccccgtgcagcttgaggtccacattggatggttgctcttgcaagccccacgctgggttttcaaagaggaagatccaatccatctgcggtgccacagctggaaaaacaccgctctccacaaagtcacatacctgcaaaatggcaaaggacgcaaatacttccatcacaattccgatttttacattccgaaggctaccctgaaagacagcggcagctatttctgccggggactcgtcggctccaagaatgtgtcctccgaaaccgtgaatatcacgattacccaaggactggctgtgcctacaatctctagcttctttccgcctggataccaagtctccttctgtcttgtgatggtcctcctgtttgctgtggacacaggactgtacttttacgtg

SEQ ID NO: 1972 - DNA, 1419 bp, synthetic construct
  source 1..1419: mol_type = other DNA
atggccttaccagtgaccgccttgctcctgccgctggccttgctgctccacgccgccaggccgcagatcgtgctgacacagagccctgccctgatgagcgccagccctggcgagaaagtgaccatgacctgtagcgccagcagcagcgtgcgctacatgtactggtatcagcagaagcccagaagcagccccaagccctggattcacctgaccagcaatctggcctctggcgtgcccgctagattttccggctctggcagcggcaccagctacagcctgaccatcagcagcatggaagccgaggacgccgccacctactactgccagcagtggtccagccaccccttcacatttggctccggcaccaagctggaaatcaagggcggaggcggaagtggaggcggaggatctggcggcggaggctctgatgtgcaactccaggaaagcggccctggccttgtgaagcctagccagagcctgtccctgacctgtaccgtgaccggcttcagcatcaccagcgactactcttggaactggatcagacagttccctggcaacaaactggaatggatgggctacatcagctactccggccacacctcctacaaccccagcctggaaagccggatctccatcaccagagacaccagcaagaaccagttcttcttgcaactgaacagcgtgaccaccgaggataccgccacatattactgtaccagaggcaactgggacgtggtgtactggggccagggcacacttgtgaccgtgtctgctacgcgtggaatgaggactgaggatcttcccaaagctgtcgtctttctcgaaccccaatggtatcgggtgctcgaaaaagactctgtgacactgaaatgccaaggggcctactctcccgaggacaactccacacagtggtttcataatgagtccctcatcagctctcaggccagctcttatttcattgatgccgctacagtggacgactccggcgagtatcggtgtcagaccaatctgtctacactgtctgaccccgtgcagcttgaggtccacattggatggttgctcttgcaagccccacgctgggttttcaaagaggaagatccaatccatctgcggtgccacagctggaaaaacaccgctctccacaaagtcacatacctgcaaaatggcaaaggacgcaaatacttccatcacaattccgatttttacattccgaaggctaccctgaaagacagcggcagctatttctgccggggactcgtcggctccaagaatgtgtcctccgaaaccgtgaatatcacgattacccaaggactggctgtgcctacaatctctagcttctttccgcctggataccaagtctccttctgtcttgtgatggtcctcctgtttgctgtggacacaggactgtacttttacgtg

SEQ ID NO: 1973 - DNA, 1446 bp, synthetic construct
  source 1..1446: mol_type = other DNA
atggccttaccagtgaccgccttgctcctgccgctggccttgctgctccacgccgccaggccggagatcgtgctgacacagagccctggaagcctggccgtgtctcctggcgagcgcgtgacaatgagctgcaagagcagccagagcgtgttcttcagcagctcccagaagaactacctggcctggtatcagcagatccccggccagagccccagactgctgatctactgggccagcaccagagaaagcggcgtgcccgatagattcaccggcagcggctctggcaccgacttcaccctgacaatcagcagcgtgcagcccgaggacctggctatctactactgccaccagtacctgagcagccggaccttcggccagggcaccaagctggaaatcaagagaggcggaggcggaagtggaggcggaggatctggcggcggaggctctcaggtgcaactgcagcagcctggcgctgaggtcgtgaagccaggcgcttccgtgaagatgtcctgcaaggccagcggctacaccttcaccagctactacatccactggatcaagcagacccctggacagggcctggaatgggtgggagtgatctaccccggcaacgacgacatcagctacaaccagaagttccagggcaaggccaccctgaccgccgacaagtctagcaccaccgcctacatgcaactgtccagcctgaccagcgaggacagcgccgtgtactactgcgccagagaagtgcggctgcggtacttcgatgtgtggggccagggaaccaccgtgaccgtgtcatctacgcgtggaatgaggactgaggatcttcccaaagctgtcgtctttctcgaaccccaatggtatcgggtgctcgaaaaagactctgtgacactgaaatgccaaggggcctactctcccgaggacaactccacacagtggtttcataatgagtccctcatcagctctcaggccagctcttatttcattgatgccgctacagtggacgactccggcgagtatcggtgtcagaccaatctgtctacactgtctgaccccgtgcagcttgaggtccacattggatggttgctcttgcaagccccacgctgggttttcaaagaggaagatccaatccatctgcggtgccacagctggaaaaacaccgctctccacaaagtcacatacctgcaaaatggcaaaggacgcaaatacttccatcacaattccgatttttacattccgaaggctaccctgaaagacagcggcagctatttctgccggggactcgtcggctccaagaatgtgtcctccgaaaccgtgaatatcacgattacccaaggactggctgtgcctacaatctctagcttctttccgcctggataccaagtctccttctgtcttgtgatggtcctcctgtttgctgtggacacaggactgtacttttacgtg

SEQ ID NO: 1974 - DNA, 1458 bp, synthetic construct
  source 1..1458: mol_type = other DNA
atggccttaccagtgaccgccttgctcctgccgctggccttgctgctccacgccgccaggccggacatcgtgatgacacagtcaccagatagcctcaccgtctccctgggggagcggaccaccattaattgtaaatccagccaaagcgtgctggactcaagcaagaacaagaatagcctcgcctggtatcagcagaagcccggtcagcctccaaagctgctgctttcttgggcctccaccagagagtccgggattcctgataggtttagtggttcaggctccggcacagattttactctgaccattgattctctccagccagaggattctgcaacttattactgccagcaaagcgcccactttcctataacttttggccagggaacccgacttgaaatcaagggcggaggcggaagtggaggcggaggatctggcggcggaggctctcaggtgcagctggtgcagagcggtgccgaagtgaagaaaccaggtgcatccgttaaagtttcatgtaaggctagtggatataccttcaccaattacggaatgaactgggtgaaacaggcccctggccagggactgaagtggatggggtggattaacacctacaccggggagccgacttatgcagacgactttaaggggcgggtcacgatgacctccgacacctccaccagtaccgcctacctggagctgcacaaccttaggtcagacgataccgccgtgtattactgtgcccgatggtcttggtccgacggatactatgtctacttcgactattggggccaggggaccacagttaccgtgtcctctacgcgtggaatgaggactgaggatcttcccaaagctgtcgtctttctcgaaccccaatggtatcgggtgctcgaaaaagactctgtgacactgaaatgccaaggggcctactctcccgaggacaactccacacagtggtttcataatgagtccctcatcagctctcaggccagctcttatttcattgatgccgctacagtggacgactccggcgagtatcggtgtcagaccaatctgtctacactgtctgaccccgtgcagcttgaggtccacattggatggttgctcttgcaagccccacgctgggttttcaaagaggaagatccaatccatctgcggtgccacagctggaaaaacaccgctctccacaaagtcacatacctgcaaaatggcaaaggacgcaaatacttccatcacaattccgatttttacattccgaaggctaccctgaaagacagcggcagctatttctgccggggactcgtcggctccaagaatgtgtcctccgaaaccgtgaatatcacgattacccaaggactggctgtgcctacaatctctagcttctttccgcctggataccaagtctccttctgtcttgtgatggtcctcctgtttgctgtggacacaggactgtacttttacgtg

SEQ ID NO: 1975 - DNA, 1458 bp, synthetic construct
  source 1..1458: mol_type = other DNA
atggccttaccagtgaccgccttgctcctgccgctggccttgctgctccacgccgccaggccggatgtgctgctgacccagagccctctgagcctgcctgtgacactgggacagcctgccagcatctcctgtcggagcagccagaccatcgtgcacagcaacggcaacacctacctggaatggttccagcagcggccaggccagagccccagactgctgatctaccaggtgtccaacagattcagcggcgtgcccgacagattctccggcagcggctctggcaccgacttcaccctgaagatcagccgggtggaagccgaggacgtgggcgtgtactactgttttcaaggcagccacgtgccccggacctttggcggaggaacaaaggtggaaatcaagagaggcggaggcggaagtggaggcggaggatctggcggcggaggctctcagatccaactggtgcagagcggcagcgagctgaagaaacctggggccagcgtgaaggtgtcctgcaaggccagcggctacacctttaccaactacggcatgaactgggtgcgccaggcccctggacagggcctgaaatggatgggctggatcaacaccaacaccggcgagcctaagtacgccgaagagttcaagggcagattcgccctgagcctggacaccagcgtgtccacagcctacctccagatcaacagcctgaaggccgaggataccgccgtgtacttctgcgccagaggctacggcaactacgccagaggggcttggctggcctattggggccagggaacactcgtgaccgtgtcctctacgcgtggaatgaggactgaggatcttcccaaagctgtcgtctttctcgaaccccaatggtatcgggtgctcgaaaaagactctgtgacactgaaatgccaaggggcctactctcccgaggacaactccacacagtggtttcataatgagtccctcatcagctctcaggccagctcttatttcattgatgccgctacagtggacgactccggcgagtatcggtgtcagaccaatctgtctacactgtctgaccccgtgcagcttgaggtccacattggatggttgctcttgcaagccccacgctgggttttcaaagaggaagatccaatccatctgcggtgccacagctggaaaaacaccgctctccacaaagtcacatacctgcaaaatggcaaaggacgcaaatacttccatcacaattccgatttttacattccgaaggctaccctgaaagacagcggcagctatttctgccggggactcgtcggctccaagaatgtgtcctccgaaaccgtgaatatcacgattacccaaggactggctgtgcctacaatctctagcttctttccgcctggataccaagtctccttctgtcttgtgatggtcctcctgtttgctgtggacacaggactgtacttttacgtg

SEQ ID NO: 1976 - DNA, 1443 bp, synthetic construct
  source 1..1443: mol_type = other DNA
atggccttaccagtgaccgccttgctcctgccgctggccttgctgctccacgccgccaggccggaccacatcgtgctgacccagagccctagcagcctgtctgccagcctgggcgacagagtgaccatcagctgtagagccagccaggacatcagcacctacctgaactggtatcagcagaaacccgacggcaccgtgaagctgctgatcttctacaccagcagactgcacgccggggtgcccagcagattttctggcagcggctctggcacccaccacagcctgaccatctccaacctggaacaggaagatattgctacctacttctgtcagcaaggcaacagcctgcccttcaccttcggcagcggcaccaagctggaaatcaagagaggcggaggcggaagtggaggcggaggatctggcggcggaggctctcaggtgcagctgaaagagagcggccctgagctggaaaagcctggggccagcgtgaagattagctgcaaggccagcggctacagcttcaccgcctacagcatgaactgggtcaagcagaacaacggcatgagcctggaatggatcggcagcatcgacccctactacggcgacaccaaatacgcccagaagttcaagggcaaggccaccctgaccgtggataaggccagcagcaccgcctacctccagctgaagtctctgaccagcgaggacagcgccgtgtactactgcgccagacggatgattaccaccggcgactggtacttcgacgtgtggggagccggaaccaccgtgacagtgtctagcacgcgtggaatgaggactgaggatcttcccaaagctgtcgtctttctcgaaccccaatggtatcgggtgctcgaaaaagactctgtgacactgaaatgccaaggggcctactctcccgaggacaactccacacagtggtttcataatgagtccctcatcagctctcaggccagctcttatttcattgatgccgctacagtggacgactccggcgagtatcggtgtcagaccaatctgtctacactgtctgaccccgtgcagcttgaggtccacattggatggttgctcttgcaagccccacgctgggttttcaaagaggaagatccaatccatctgcggtgccacagctggaaaaacaccgctctccacaaagtcacatacctgcaaaatggcaaaggacgcaaatacttccatcacaattccgatttttacattccgaaggctaccctgaaagacagcggcagctatttctgccggggactcgtcggctccaagaatgtgtcctccgaaaccgtgaatatcacgattacccaaggactggctgtgcctacaatctctagcttctttccgcctggataccaagtctccttctgtcttgtgatggtcctcctgtttgctgtggacacaggactgtacttttacgtg

SEQ ID NO: 1977 - DNA, 1443 bp, synthetic construct; identical to SEQ ID NO: 1976
  source 1..1443: mol_type = other DNA

SEQ ID NO: 1978 - DNA, 1443 bp, synthetic construct
  source 1..1443: mol_type = other DNA
atggccttaccagtgaccgccttgctcctgccgctggccttgctgctccacgccgccaggccggacatcgtgatgacccagagccccgatagcctggccgtgtctctgggagagagagccaccatcaactgccgggccagcaagagcgtgtccaccagcggctacagcttcatgcactggtatcagcagaagcccggccagccccccaagctgctgatctacctggcctccaacctggaaagcggcgtgcccgatagattcagcggcagcggctctggcaccgacttcaccctgaccatcagttctcttcaggccgaggacgtggccgtgtactactgccagcacagcagagaggtgccctggacattcggccagggcacaaaggtggaaatcaagcggggcggaggcggaagtggaggcggaggatctggcggcggaggctctcaggtgcagctggtgcagtctggggccgaagtgaagaaacctggggccagcgtgaaggtgtcctgcaaggccagcggatacacctttaccaactacggcatgaactgggtgcgccaggcccctggacagggcctggaatggatgggctggatcaacacctacaccggcgagcccacatacgccgacgccttcaagggcagattcgccttcagcctggacaccagcacctccaccgcctacctccagatcaacagcctgcggagcgacgacaccgccgtgtattattgcgccagagattacggcgactacgggatggactattggggccagggaaccaccgtgaccgtgtcctctacgcgtggaatgaggactgaggatcttcccaaagctgtcgtctttctcgaaccccaatggtatcgggtgctcgaaaaagactctgtgacactgaaatgccaaggggcctactctcccgaggacaactccacacagtggtttcataatgagtccctcatcagctctcaggccagctcttatttcattgatgccgctacagtggacgactccggcgagtatcggtgtcagaccaatctgtctacactgtctgaccccgtgcagcttgaggtccacattggatggttgctcttgcaagccccacgctgggttttcaaagaggaagatccaatccatctgcggtgccacagctggaaaaacaccgctctccacaaagtcacatacctgcaaaatggcaaaggacgcaaatacttccatcacaattccgatttttacattccgaaggctaccctgaaagacagcggcagctatttctgccggggactcgtcggctccaagaatgtgtcctccgaaaccgtgaatatcacgattacccaaggactggctgtgcctacaatctctagcttctttccgcctggataccaagtctccttctgtcttgtgatggtcctcctgtttgctgtggacacaggactgtacttttacgtg

SEQ ID NO: 1979 - DNA, 1431 bp, synthetic construct
  source 1..1431: mol_type = other DNA
atggccttaccagtgaccgccttgctcctgccgctggccttgctgctccacgccgccaggccggacatcgtgatgacccagacccccctgaccctgagcgtgacaatcggacagcctgccagcatctcctgcaagagcagccagagcctgctggacagcgacggcaagacctacctgaactggctgctgcagaggccaggccagagccccgagagactgatctacctggtgtccaagctggactccggcgtgcccgatagattcacaggcagcggctccggcaccgacttcaccctgaagatcagccgggtggaagccgaggacctgggcgtgtactgttgttggcagggcacccacttcccttacaccttcggcggagggaccaaggtggaaatcaagggcggcggaggcggaagtggaggcggaggatctggcggcggaggctctcaggtgcaactgcagcagcctggcgctgaacttgtgcggccaggcgcctctgtgaagctgagctgtaaagccagcggctacaccttcaccagctactggatgaactgggtcaagcagcgcccaggccagggcctggaatggatcggaatgatcgaccccagcgacagcgagacacactacaaccacatcttcaaggacaaggccaccctgaccgtggacaagtccagcagcacagcctacctgcaactgtccagcctgaccagcgaggacagcgccgtgtactactgcgcccggaacctgtatctgtggggccagggaacaagcgtgaccgtgtctagcacgcgtggaatgaggactgaggatcttcccaaagctgtcgtctttctcgaaccccaatggtatcgggtgctcgaaaaagactctgtgacactgaaatgccaaggggcctactctcccgaggacaactccacacagtggtttcataatgagtccctcatcagctctcaggccagctcttatttcattgatgccgctacagtggacgactccggcgagtatcggtgtcagaccaatctgtctacactgtctgaccccgtgcagcttgaggtccacattggatggttgctcttgcaagccccacgctgggttttcaaagaggaagatccaatccatctgcggtgccacagctggaaaaacaccgctctccacaaagtcacatacctgcaaaatggcaaaggacgcaaatacttccatcacaattccgatttttacattccgaaggctaccctgaaagacagcggcagctatttctgccggggactcgtcggctccaagaatgtgtcctccgaaaccgtgaatatcacgattacccaaggactggctgtgcctacaatctctagcttctttccgcctggataccaagtctccttctgtcttgtgatggtcctcctgtttgctgtggacacaggactgtacttttacgtg

SEQ ID NO: 1980 - DNA, 1440 bp, synthetic construct
  source 1..1440: mol_type = other DNA
atggccttaccagtgaccgccttgctcctgccgctggccttgctgctccacgccgccaggccggacatccagttgacccagtcccccagctcactcagcgccagtgtgggggaccgggtgaccattacctgtaaagccagtcagagtgtggactatgagggggatagcttcctgaattggtatcagcagaagcctggcaaagccccaaagctgctgatctacgctgcatctaatctggagtcaggcgtgccttctaggttctccggtagtgggtctgggaccgatttcacattgaccatttcatccctccaacccgaggatttcgctacatattactgtcagcagtccaatgaggaccctctcacctttggccagggcaccaaagttgaaattaagagaggcggaggcggaagtggaggcggaggatctggcggcggaggctctgaagtccaacttgtggagtctggagggggcctggtgcagcccggcggctctctcagactgtcttgtgcggcaagcggctacaccttcagctcttactggatagaatgggtgaggcaggcacctggaaagggactggagtggattggagagattctgccaggagggggagatacaaattacaatgaaatcttcaaggggcgggccaccttttcagcggataccagcaagaatacagcttacctgcagatgaatagcctccgggcagaagataccgctgtttattattgcacgagacgggtgccaataagactggactattgggggcaagggactcttgtcaccgtcagttcaacgcgtggaatgaggactgaggatcttcccaaagctgtcgtctttctcgaaccccaatggtatcgggtgctcgaaaaagactctgtgacactgaaatgccaaggggcctactctcccgaggacaactccacacagtggtttcataatgagtccctcatcagctctcaggccagctcttatttcattgatgccgctacagtggacgactccggcgagtatcggtgtcagaccaatctgtctacactgtctgaccccgtgcagcttgaggtccacattggatggttgctcttgcaagccccacgctgggttttcaaagaggaagatccaatccatctgcggtgccacagctggaaaaacaccgctctccacaaagtcacatacctgcaaaatggcaaaggacgcaaatacttccatcacaattccgatttttacattccgaaggctaccctgaaagacagcggcagctatttctgccggggactcgtcggctccaagaatgtgtcctccgaaaccgtgaatatcacgattacccaaggactggctgtgcctacaatctctagcttctttccgcctggataccaagtctccttctgtcttgtgatggtcctcctgtttgctgtggacacaggactgtacttttacgtg

SEQ ID NO: 1981 - DNA, 1464 bp, synthetic construct
  source 1..1464: mol_type = other DNA
atggccttaccagtgaccgccttgctcctgccgctggccttgctgctccacgccgccaggccggacatcgtgatgagccagagccctagcagcctggccgtgtccgtgggcgagaaagtgaccatgagctgcaagagcagccagtccctgctgcacagcagcaaccagaagaactacctggcctggtatcagcagaagcccggccagtcccccaaggtgctgatctactgggccagcaccagagaaagcggcgtgcccgatagattcaccggcagcggctctggcaccgacttcaccctgaccatcaccagcgtgaagtccgaggacctggctgtgtactactgccagcagtattacagctacccctggaccttcggcggaggcacccggctggaaatcaaaagaggcggaggcggaagtggaggcggaggatctggcggcggaggctctgaagtgcaactccagcagagcgtggccgagcttgtgaagcctggcgcttccgtgaagatgtcctgcaaggtgtccggctacaccctgacagaccacaccatccactggatgaagcagcggcctgagcagggcctggaatggatcggctacatctaccccagggacggcatcaccggctacaacgagaagttcaagggcaaggccacactgaccgccgacaccagcagcagcacagcctacatgcaactgaacagcctgaccagcgaggacagcgccgtgtacttctgtgccagatggggctacagctacagaaactacgcctactactacgactactggggccagggcacaaccctgaccgtgtctagtacgcgtggaatgaggactgaggatcttcccaaagctgtcgtctttctcgaaccccaatggtatcgggtgctcgaaaaagactctgtgacactgaaatgccaaggggcctactctcccgaggacaactccacacagtggtttcataatgagtccctcatcagctctcaggccagctcttatttcattgatgccgctacagtggacgactccggcgagtatcggtgtcagaccaatctgtctacactgtctgaccccgtgcagcttgaggtccacattggatggttgctcttgcaagccccacgctgggttttcaaagaggaagatccaatccatctgcggtgccacagctggaaaaacaccgctctccacaaagtcacatacctgcaaaatggcaaaggacgcaaatacttccatcacaattccgatttttacattccgaaggctaccctgaaagacagcggcagctatttctgccggggactcgtcggctccaagaatgtgtcctccgaaaccgtgaatatcacgattacccaaggactggctgtgcctacaatctctagcttctttccgcctggataccaagtctccttctgtcttgtgatggtcctcctgtttgctgtggacacaggactgtacttttacgtg

SEQ ID NO: 1982 - DNA, 1455 bp, synthetic construct
  source 1..1455: mol_type = other DNA
atggccttaccagtgaccgccttgctcctgccgctggccttgctgctccacgccgccaggccggagatcgtgctgacacagagccctggcaccctgagcctgtctccaggcgaaagagccacactgagctgtcgggccagccagagcgtgtccagctcttacctggcctggtatcagcagaagcccggccaggctccccggctgctgatctacggaacaagcagcagagccaccggcatccccgacagattttctggcagcggctccggcaccgacttcaccctgacaatcagcagactggaacccgaggacttcgccgtgtactactgccagcagtacggcagcagccccttcacctttggcggaggcaccaaggtggaaatcaagagaggcggaggcggaagtggaggcggaggatctggcggcggaggctctcaggtgcaactccaggaatctggccccggactggctaagcccagcgagacactgagcctgacctgtaccgtgtccggcgacagcatcaccagctactactggtcctggatcagacagccccctggcaagggcctggaatggatcggctacatctactacagcggcagcaccaactacaaccccagcctgaagtccagagtgaccatcagcgtggacaccagcaagaaccagttctccctgaagctgagcagcgtgacagccgccgacaccgccgtgtattattgcgccagagatcagcggagaatcgccgctgccggcacccacttttacggcatggatgtgtggggccagggcaccaccgtgaccgtgtcatctacgcgtggaatgaggactgaggatcttcccaaagctgtcgtctttctcgaaccccaatggtatcgggtgctcgaaaaagactctgtgacactgaaatgccaaggggcctactctcccgaggacaactccacacagtggtttcataatgagtccctcatcagctctcaggccagctcttatttcattgatgccgctacagtggacgactccggcgagtatcggtgtcagaccaatctgtctacactgtctgaccccgtgcagcttgaggtccacattggatggttgctcttgcaagccccacgctgggttttcaaagaggaagatccaatccatctgcggtgccacagctggaaaaacaccgctctccacaaagtcacatacctgcaaaatggcaaaggacgcaaatacttccatcacaattccgatttttacattccgaaggctaccctgaaagacagcggcagctatttctgccggggactcgtcggctccaagaatgtgtcctccgaaaccgtgaatatcacgattacccaaggactggctgtgcctacaatctctagcttctttccgcctggataccaagtctccttctgtcttgtgatggtcctcctgtttgctgtggacacaggactgtacttttacgtg

SEQ ID NO: 1983 - DNA, 1425 bp, synthetic construct
  source 1..1425: mol_type = other DNA
atggccttaccagtgaccgccttgctcctgccgctggccttgctgctccacgccgccaggccggacatccagatgacccagagccccagcagcctgtctgccagcgtgggcgacagagtgaccatcacctgtagagccagccagagcatcagcctgtggctgaactggtatcagcagaagcccggcaaggcccccaagctgctgatctacgccgccagcacactccagagcggcgtgccaagcagattttccggcagcggctccggcaccgacttcaccctgacaatcagctccctccagcccgaggacttcgccacctactactgccagcagtactacaccagcccctacaccttcggccagggcaccaaggtggaaatcaagagaggcggaggcggaagtggaggcggaggatctggcggcggaggctctcaggtgcaactgctggaatctggcggcggactggtgcagcctggcggatctctgagactgagctgtgccgccagcggcttcaccttcagcagctacgccatgagctgggtgcgccaggcccctggaaaaggactggaatgggtgtccgtgatccggtccagcggcagcagcacctattacgccgatagcgtgaagggccggttcaccatcagccgggacaacagcaagaacaccctgtacctccagatgaacagcctgcgggccgaggacaccgccgtgtactattgtgctaggggaggcggctacttcgactactggggccagggaacactcgtgaccgtgtcctctacgcgtggaatgaggactgaggatcttcccaaagctgtcgtctttctcgaaccccaatggtatcgggtgctcgaaaaagactctgtgacactgaaatgccaaggggcctactctcccgaggacaactccacacagtggtttcataatgagtccctcatcagctctcaggccagctcttatttcattgatgccgctacagtggacgactccggcgagtatcggtgtcagaccaatctgtctacactgtctgaccccgtgcagcttgaggtccacattggatggttgctcttgcaagccccacgctgggttttcaaagaggaagatccaatccatctgcggtgccacagctggaaaaacaccgctctccacaaagtcacatacctgcaaaatggcaaaggacgcaaatacttccatcacaattccgatttttacattccgaaggctaccctgaaagacagcggcagctatttctgccggggactcgtcggctccaagaatgtgtcctccgaaaccgtgaatatcacgattacccaaggactggctgtgcctacaatctctagcttctttccgcctggataccaagtctccttctgtcttgtgatggtcctcctgtttgctgtggacacaggactgtacttttacgtg

SEQ ID NO: 1984 - DNA, 1434 bp, synthetic construct
  source 1..1434: mol_type = other DNA
atggccttaccagtgaccgccttgctcctgccgctggccttgctgctccacgccgccaggccggacatccagatgacccagagccccagcagcctgtctgccagcgtgggcgacagagtgaccatcacctgtagagccagccagagcatcagcagctacctgaactggtatcagcagaagcccggcaaggcccccaaactgctgatctacgccgtgtccacactccagagcggcgtgcccagcagattttctggcagcggctccggcaccgacttcaccctgacaatcagctccctccagcccgaggacttcgccacctactactgtcagcagagcggcaccttccctcccaccacatttggacagggcaccaaggtggaaatcaagagaggcggaggcggaagtggaggcggaggatctggcggcggaggctctcaggtgcaactgctggaatctggcggcggactggtgcagcctggcggatctctgagactgagctgtgccgccagcggcttcaccttcagcagccacggaatgcactgggtgcgccaggcccctggaaagggactggaatgggtgtccgtgatctccggcagcggcagcaataccggctacgccgatagcgtgaagggccggttcaccatcagccgggacaacagcaagaacaccctgtacctccagatgaacagcctgcgggccgaggacaccgccgtgtactattgtgccagacagtggggcagctacgccttcgattcttggggccagggcaccctcgtgaccgtgtcatctacgcgtggaatgaggactgaggatcttcccaaagctgtcgtctttctcgaaccccaatggtatcgggtgctcgaaaaagactctgtgacactgaaatgccaaggggcctactctcccgaggacaactccacacagtggtttcataatgagtccctcatcagctctcaggccagctcttatttcattgatgccgctacagtggacgactccggcgagtatcggtgtcagaccaatctgtctacactgtctgaccccgtgcagcttgaggtccacattggatggttgctcttgcaagccccacgctgggttttcaaagaggaagatccaatccatctgcggtgccacagctggaaaaacaccgctctccacaaagtcacatacctgcaaaatggcaaaggacgcaaatacttccatcacaattccgatttttacattccgaaggctaccctgaaagacagcggcagctatttctgccggggactcgtcggctccaagaatgtgtcctccgaaaccgtgaatatcacgattacccaaggactggctgtgcctacaatctctagcttctttccgcctggataccaagtctccttctgtcttgtgatggtcctcctgtttgctgtggacacaggactgtacttttacgtg

SEQ ID NO: 1985 - DNA, 1410 bp, synthetic construct
  source 1..1410: mol_type = other DNA
atggccttaccagtgaccgccttgctcctgccgctggccttgctgctccacgccgccaggccgatgacccagagccccaagttcctgctggtgtctgccggcgacagagtgaccctgacatgcaaggccagccagagcgtgaacaacgacgtgtactggtatcagcaggaacccggccagtcccccaagctgctgatctactgggccagcaccagagaaagcggcgtgcccgatagattcaccggcagcggctctggcaccgacttcaccctgacaatcagcagcgtgcaggccgaggacctggccgtgtactactgcaagcagagctacaacctgtacaccttcggcggaggcaccaagctggaaatcaagagaggcggcggaggatctggcggaggcggatctgggggcggaggctctgaatctggaagaggactggtgcagcctggcggcagcagaaagctgtcttgtgccgccagcggcttcaccttcagcaccagcggaatgcactgggtgcgccaggcccctgagaagggactggaatgggtggcctacatcagctccggcagcaccaccatctaccacgccgataccgtgaagggccggttcaccatcagccgggacaaccccaagaataccctgttcctccagatgaccagcctgcggagcgaggacaccgccatgtactattgctgcgccagaagcggccagttcggcaactacttcgactactggggccagggcaccaccctgaccgtgtcatctacgcgtggaatgaggactgaggatcttcccaaagctgtcgtctttctcgaaccccaatggtatcgggtgctcgaaaaagactctgtgacactgaaatgccaaggggcctactctcccgaggacaactccacacagtggtttcataatgagtccctcatcagctctcaggccagctcttatttcattgatgccgctacagtggacgactccggcgagtatcggtgtcagaccaatctgtctacactgtctgaccccgtgcagcttgaggtccacattggatggttgctcttgcaagccccacgctgggttttcaaagaggaagatccaatccatctgcggtgccacagctggaaaaacaccgctctccacaaagtcacatacctgcaaaatggcaaaggacgcaaatacttccatcacaattccgatttttacattccgaaggctaccctgaaagacagcggcagctatttctgccggggactcgtcggctccaagaatgtgtcctccgaaaccgtgaatatcacgattacccaaggactggctgtgcctacaatctctagcttctttccgcctggataccaagtctccttctgtcttgtgatggtcctcctgtttgctgtggacacaggactgtacttttacgtg

SEQ ID NO: 1986 - DNA, 1425 bp, synthetic construct
  source 1..1425: mol_type = other DNA
atggccttaccagtgaccgccttgctcctgccgctggccttgctgctccacgccgccaggccgcagagcccatctagcctggctgtgtctgccggcgagaaagtgaccatgagctgcaagagcagccagagcctgctgaacagccggacccggaagaactacctggcctggtatcagcagaagcccggccagagccccaagctgctgatctactgggccagcaccagagaaagcggcgtgcccgatagattcaccggctctggcagcggcaccgacttcaccctgacaatcagcagcgtgcaggccgaggacctggccgtgtactactgcaagcagagcaacctgtacaccttcggcggaggcaccaagctggaaatcaagggcggaggcggaagtggaggcggaggatctggcggcggaggctctcaggtgcagctggaagagtctggacccgagcttgtgaagcctggggccagcgtgaagctgtcctgtaaagccagcggctacaccttcaccgagtacatcatccactgggtcaagcagcggagcggccagggcctggaatggatcggctggttttaccctggctccggcagcatcaagtacaacgagaagttcaaggacaaggccaccctgaccgccgacaagtccagcagcaccgtgtacatggaactgagcggcctgaccagcgaggacagcgccgtgtatttctgcgccagacacgacggctacagctacttcgactattggggccagggcaccacactgaccgtgtcctctacgcgtggaatgaggactgaggatcttcccaaagctgtcgtctttctcgaaccccaatggtatcgggtgctcgaaaaagactctgtgacactgaaatgccaaggggcctactctcccgaggacaactccacacagtggtttcataatgagtccctcatcagctctcaggccagctcttatttcattgatgccgctacagtggacgactccggcgagtatcggtgtcagaccaatctgtctacactgtctgaccccgtgcagcttgaggtccacattggatggttgctcttgcaagccccacgctgggttttcaaagaggaagatccaatccatctgcggtgccacagctggaaaaacaccgctctccacaaagtcacatacctgcaaaatggcaaaggacgcaaatacttccatcacaattccgatttttacattccgaaggctaccctgaaagacagcggcagctatttctgccggggactcgtcggctccaagaatgtgtcctccgaaaccgtgaatatcacgattacccaaggactggctgtgcctacaatctctagcttctttccgcctggataccaagtctccttctgtcttgtgatggtcctcctgtttgctgtggacacaggactgtacttttacgtg

SEQ ID NO: 1987 - DNA, 1434 bp, synthetic construct
  source 1..1434: mol_type = other DNA
atggccttaccagtgaccgccttgctcctgccgctggccttgctgctccacgccgccaggccggacatccagatgacccagagccccagcagcctgtctgcctctctgggcgagagagtgtccctgacctgtcgggccacacaggaactgagcggctacctgtcttggctgcagcagaagcccgacggcaccatcaagcggctgatctacgccgccagcaccctggatagcggcgtgcccaagagattcagcggcaacagaagcggcagcgactacagcctgaccatcagctccctggaaagcgaggacttcgccgactactactgcctgcagtacgccatctacccctacaccttcggcggaggcaccaagctggaaatcaagggcggaggcggaagtggaggcggaggatctggcggcggaggctctgaggtgcaactgcagcagtctggccccgagcttgtgaagcctggcgcctccgtgaagatgagctgcaaggccagcggctacacctttaccagctacttcatccactgggtcaagcagaaacccggccagggcctggaatggatcggcttcatcaacccttacaacgacggcagcaagtacaacgagaagttcaagggcaaggccaccctgaccagcgacaagagcagcagcaccgcctacatggaactgtccagcctgacatccgaggacagcgccgtgtactactgcaccagggacgacggctactacggctacgccatggactactggggccagggaacaagcgtcaccgtgtcctctacgcgtggaatgaggactgaggatcttcccaaagctgtcgtctttctcgaaccccaatggtatcgggtgctcgaaaaagactctgtgacactgaaatgccaaggggcctactctcccgaggacaactccacacagtggtttcataatgagtccctcatcagctctcaggccagctcttatttcattgatgccgctacagtggacgactccggcgagtatcggtgtcagaccaatctgtctacactgtctgaccccgtgcagcttgaggtccacattggatggttgctcttgcaagccccacgctgggttttcaaagaggaagatccaatccatctgcggtgccacagctggaaaaacaccgctctccacaaagtcacatacctgcaaaatggcaaaggacgcaaatacttccatcacaattccgatttttacattccgaaggctaccctgaaagacagcggcagctatttctgccggggactcgtcggctccaagaatgtgtcctccgaaaccgtgaatatcacgattacccaaggactggctgtgcctacaatctctagcttctttccgcctggataccaagtctccttctgtcttgtgatggtcctcctgtttgctgtggacacaggactgtacttttacgtg

SEQ ID NO: 1988 - DNA, 1449 bp, synthetic construct
  source 1..1449: mol_type = other DNA
atggccttaccagtgaccgccttgctcctgccgctggccttgctgctccacgccgccaggccggacaccatcgtgctgacacagagccctgcttccctggccgtgtccctgggacagagagccaccatctcttgcagagccagcgagagcgtggacagctacggcaacagcttcatgcactggtatcagcagaagcccggccagccccccaagctgctgatctacctggcctccaacctggaaagcggcgtgcccgccagattttctggcagcggcagcagaaccgacttcaccctgaccatcgaccccgtggaagccgatgatgccgccacctactactgccagcagaacaactacgacccctggaccttcggcggaggcaccaagctggaaatcaagggcggaggcggaagtggaggcggaggatctggcggcggaggctctgaagtgcaactccagcagagcggccctgagcttgtgaagcctggcgcttccgtgaagatgagctgcaaggccagcggctacaccttcaccagctacgtgatgcactgggtcaagcagaaacctggacagggcctggaatggatcggctacatcaacccctacaacgacggcaccaagtacaacgagaagttcaagggcaaggccaccctgacaagcgacaccagcagcagcaccgcctacatggaactgaacagcctgaccagcgaggacagcgccgtgtacttctgcgccagacccatctacttcgacaacgactacttcgattactggggccagggcaccaccctgaaggtgtcctctacgcgtggaatgaggactgaggatcttcccaaagctgtcgtctttctcgaaccccaatggtatcgggtgctcgaaaaagactctgtgacactgaaatgccaaggggcctactctcccgaggacaactccacacagtggtttcataatgagtccctcatcagctctcaggccagctcttatttcattgatgccgctacagtggacgactccggcgagtatcggtgtcagaccaatctgtctacactgtctgaccccgtgcagcttgaggtccacattggatggttgctcttgcaagccccacgctgggttttcaaagaggaagatccaatccatctgcggtgccacagctggaaaaacaccgctctccacaaagtcacatacctgcaaaatggcaaaggacgcaaatacttccatcacaattccgatttttacattccgaaggctaccctgaaagacagcggcagctatttctgccggggactcgtcggctccaagaatgtgtcctccgaaaccgtgaatatcacgattacccaaggactggctgtgcctacaatctctagcttctttccgcctggataccaagtctccttctgtcttgtgatggtcctcctgtttgctgtggacacaggactgtacttttacgtg

SEQ ID NO: 1989 - DNA, 1431 bp, synthetic construct
  source 1..1431: mol_type = other DNA
atggccttaccagtgaccgccttgctcctgccgctggccttgctgctccacgccgccaggccggacatccagatgacccagagccccagcagcctgtctgccagcgtgggcgacagagtgaccatcacatgcaaggccagccaggacgtgggaatcgccgtggcctggtatcagcagaaacccggcaaggtgcccaagctgctgatctactgggccagcaccagacacaccggcgtgcccgatagattttccggcagcggctccggcaccgacttcaccctgacaatcagctccctccagcccgaggacgtggcaacctactactgccagcagtacagcagctacccctacaccttcggccagggcaccaaggtggaaatcaagggcggaggcggaagtggaggcggaggatctggcggcggaggctctgaagtgcaactggtggaatcaggcggcggactggtgcagcctggcggatctctgagactgagctgtgccgccagcggcttcgacttcagccggtactggatgagctgggtgcgccaggcccctggcaaaggactggaatggatcggcgagatcaaccccgacagcagcaccatcaactacgcccccagcctgaaggacaagttcatcatcagccgggacaacgccaagaacagcctgtacctccagatgaactccctgcgggccgaggacaccgccgtgtactattgcgccagacccgacggcaactactggtacttcgacgtgtggggccagggaaccctcgtgaccgtgtcatctacgcgtggaatgaggactgaggatcttcccaaagctgtcgtctttctcgaaccccaatggtatcgggtgctcgaaaaagactctgtgacactgaaatgccaaggggcctactctcccgaggacaactccacacagtggtttcataatgagtccctcatcagctctcaggccagctcttatttcattgatgccgctacagtggacgactccggcgagtatcggtgtcagaccaatctgtctacactgtctgaccccgtgcagcttgaggtccacattggatggttgctcttgcaagccccacgctgggttttcaaagaggaagatccaatccatctgcggtgccacagctggaaaaacaccgctctccacaaagtcacatacctgcaaaatggcaaaggacgcaaatacttccatcacaattccgatttttacattccgaaggctaccctgaaagacagcggcagctatttctgccggggactcgtcggctccaagaatgtgtcctccgaaaccgtgaatatcacgattacccaaggactggctgtgcctacaatctctagcttctttccgcctggataccaagtctccttctgtcttgtgatggtcctcctgtttgctgtggacacaggactgtacttttacgtg

SEQ ID NO: 1990 - DNA, 1434 bp, synthetic construct
  source 1..1434: mol_type = other DNA
atggccttaccagtgaccgccttgctcctgccgctggccttgctgctccacgccgccaggccggacatcgtgatgacccagagccagaagagcatgagcaccagcgtgggcgacagagtgagcatcacctgcaaggccagccaggacgtgatcaccggcgtggcctggtaccagcagaagcccggccagagccccaagctgctgatctacagcgccagctacagatacaccggcgtgcccgacagattcaccggcagcggcagcggcaccgacttcaccttcaccatcagcaacgtgcaggccgaggacctggccgtgtactactgccagcagcactacagcacccccctgaccttcggcgccggcaccaagctggagctgaagggcggaggcggaagtggaggcggaggatctggcggcggaggctctcaggtgcagctgcagcagcccggcgccgagctggtgagacccggcgccagcgtgaagctgagctgcaaggccagcggctacagcttcaccacctactggatgaactgggtgaagcagagacccggccagggcctggagtggatcggcatgatccaccccagcgacagcgagaccagactgaaccagaagttcaaggacaaggccaccctgaccgtggacaagagcagcagcaccgcctacatgcagctgagcagccccaccagcgaggacagcgccgtgtactactgcgccagaagcaccatgatcgccaccagagccatggactactggggccagggcaccagcgtgaccgtgagcagcacgcgtggaatgaggactgaggatcttcccaaagctgtcgtctttctcgaaccccaatggtatcgggtgctcgaaaaagactctgtgacactgaaatgccaaggggcctactctcccgaggacaactccacacagtggtttcataatgagtccctcatcagctctcaggccagctcttatttcattgatgccgctacagtggacgactccggcgagtatcggtgtcagaccaatctgtctacactgtctgaccccgtgcagcttgaggtccacattggatggttgctcttgcaagccccacgctgggttttcaaagaggaagatccaatccatctgcggtgccacagctggaaaaacaccgctctccacaaagtcacatacctgcaaaatggcaaaggacgcaaatacttccatcacaattccgatttttacattccgaaggctaccctgaaagacagcggcagctatttctgccggggactcgtcggctccaagaatgtgtcctccgaaaccgtgaatatcacgattacccaaggactggctgtgcctacaatctctagcttctttccgcctggataccaagtctccttctgtcttgtgatggtcctcctgtttgctgtggacacaggactgtacttttacgtg

SEQ ID NO: 1991 - DNA, 1452 bp, synthetic construct
  source 1..1452: mol_type = other DNA
atggccttaccagtgaccgccttgctcctgccgctggccttgctgctccacgccgccaggccgcagagcgtgctgacacagcctccatccgtgtctggcgctccaggccagagagtgaccatctcctgtaccggcagcggcagcaacatcggagccccctacgacgtgtcctggtatcagcaactgcctggcaccgcccccaagctgctgatctaccacaacaacaagcggcccagcggcgtgcccgatagattcagcggctctaagagcggcaccagcgccagcctggctatcactggactccaggccgaggacgaggccgactactactgtgccacagtggaagccggcctgagcggctctgtgtttggcggcggaacaaagctgaccgtgctgggagctggcggaggcggaagtggaggcggaggatctggcggcggaggctctcaggtgcaactggtgcagagcggagccgaagtgaagaaacctggggccagcgtgaaggtgtcctgcaaggtgtccggctacaccctgaccgagctgagcattcactgggtgcgccaggcccctggcaagggactggaatggatgggcggcttcgaccccgaagagaacgagatcgtgtacgcccagcggttccagggcagagtgacaatgaccgaggacaccagcaccgacaccgcctacatggaactgagcagcctgcggagcgaggataccgccgtgtactactgcgccatcgtgggcagcttcagccctctgacactgggcctgtggggccagggaactatggtcaccgtgtccagcacgcgtggaatgaggactgaggatcttcccaaagctgtcgtctttctcgaaccccaatggtatcgggtgctcgaaaaagactctgtgacactgaaatgccaaggggcctactctcccgaggacaactccacacagtggtttcataatgagtccctcatcagctctcaggccagctcttatttcattgatgccgctacagtggacgactccggcgagtatcggtgtcagaccaatctgtctacactgtctgaccccgtgcagcttgaggtccacattggatggttgctcttgcaagccccacgctgggttttcaaagaggaagatccaatccatctgcggtgccacagctggaaaaacaccgctctccacaaagtcacatacctgcaaaatggcaaaggacgcaaatacttccatcacaattccgatttttacattccgaaggctaccctgaaagacagcggcagctatttctgccggggactcgtcggctccaagaatgtgtcctccgaaaccgtgaatatcacgattacccaaggactggctgtgcctacaatctctagcttctttccgcctggataccaagtctccttctgtcttgtgatggtcctcctgtttgctgtggacacaggactgtacttttacgtg

SEQ ID NO: 1992 - DNA, 1452 bp, synthetic construct
  source 1..1452: mol_type = other DNA
atggccttaccagtgaccgccttgctcctgccgctggccttgctgctccacgccgccaggccgcagagcgtgctgacacagcctccatccgtgtctggcgctccaggccagagagtgaccatctcctgtaccggcagcggcagcaacatcggagccccctacgacgtgtcctggtatcagcaactgcctggcaccgcccccaagctgctgatctaccacaacaacaagcggcccagcggcgtgcccgatagattcagcggctctaagagcggcaccagcgccagcctggctatcactggactccaggccgaggacgaggccgactactactgccagagctacgacagcagcagcatcagcaccatcttcggcggaggcaccaagctgacagtgctgggagctggcggaggcggaagtggaggcggaggatctggcggcggaggctctcaggtgcaactggtgcagagcggagccgaagtgaagaaacctggggccagcgtgaaggtgtcctgcaaggtgtccggctacaccctgaccgagctgagcattcactgggtgcgccaggcccctggcaagggactggaatggatgggcggcttcgaccccgaagagaacgagatcgtgtacgcccagcggttccagggcagagtgacaatgaccgaggacaccagcaccgacaccgcctacatggaactgagcagcctgcggagcgaggataccgccgtgtactactgtgccatcgtgggcagcttcagcggaatcgcctacagaccttggggccagggcacaatggtcaccgtgtctagcacgcgtggaatgaggactgaggatcttcccaaagctgtcgtctttctcgaaccccaatggtatcgggtgctcgaaaaagactctgtgacactgaaatgccaaggggcctactctcccgaggacaactccacacagtggtttcataatgagtccctcatcagctctcaggccagctcttatttcattgatgccgctacagtggacgactccggcgagtatcggtgtcagaccaatctgtctacactgtctgaccccgtgcagcttgaggtccacattggatggttgctcttgcaagccccacgctgggttttcaaagaggaagatccaatccatctgcggtgccacagctggaaaaacaccgctctccacaaagtcacatacctgcaaaatggcaaaggacgcaaatacttccatcacaattccgatttttacattccgaaggctaccctgaaagacagcggcagctatttctgccggggactcgtcggctccaagaatgtgtcctccgaaaccgtgaatatcacgattacccaaggactggctgtgcctacaatctctagcttctttccgcctggataccaagtctccttctgtcttgtgatggtcctcctgtttgctgtggacacaggactgtacttttacgtg

SEQ ID NO: 1993 - DNA, 1446 bp, synthetic construct
  source 1..1446: mol_type = other DNA
atggccttaccagtgaccgccttgctcctgccgctggccttgctgctccacgccgccaggccggacatccagatgacccagagccccagcagcctgtctgccagcgtgggcgacagagtgaccatcacctgtagcgccagcagcagcgtgtcctacatgtactggtatcagcagaagcccggcaaggcccccaagctgctgatctacctgaccagcaatctggcctccggcgtgcccagcagattttctggcagcggctccggcaccgacttcaccctgacaatcagctccctccagcccgaggacttcgccacctactactgtcagcagtggcggagcaaccccttcaccttcggccagggcaccaagctggaaatcaagagaggcggaggcggaagtggaggcggaggatctggcggcggaggctctcagatcaccctgaaagagtccggccccaccctcgtgaagcctacccagaccctgacactgacctgcaccttcagcggcttcagcctgagcacaagcggcatgggcgtgggctggatcagacagcctcctggaaaggccctggaatggctggcccacatttggtgggacgacgtgaagcggtacagccccagcctgaagtcccggctgaccattaccaaggacaccagcaagaaccaggtggtgctgaccatgacaaacatggaccccgtggacaccgccacatattactgcgcccggatcgtgtccttcgacaacgacgtggtgtccgctatggactactggggccagggaaccctcgtgaccgtgtctagtacgcgtggaatgaggactgaggatcttcccaaagctgtcgtctttctcgaaccccaatggtatcgggtgctcgaaaaagactctgtgacactgaaatgccaaggggcctactctcccgaggacaactccacacagtggtttcataatgagtccctcatcagctctcaggccagctcttatttcattgatgccgctacagtggacgactccggcgagtatcggtgtcagaccaatctgtctacactgtctgaccccgtgcagcttgaggtccacattggatggttgctcttgcaagccccacgctgggttttcaaagaggaagatccaatccatctgcggtgccacagctggaaaaacaccgctctccacaaagtcacatacctgcaaaatggcaaaggacgcaaatacttccatcacaattccgatttttacattccgaaggctaccctgaaagacagcggcagctatttctgccggggactcgtcggctccaagaatgtgtcctccgaaaccgtgaatatcacgattacccaaggactggctgtgcctacaatctctagcttctttccgcctggataccaagtctccttctgtcttgtgatggtcctcctgtttgctgtggacacaggactgtacttttacgtg

SEQ ID NO: 1994 - DNA, 1431 bp, synthetic construct
  source 1..1431: mol_type = other DNA
atggccttaccagtgaccgccttgctcctgccgctggccttgctgctccacgccgccaggccggagatcgtgatgacccagagccctgccaccctgtccgtgtctccaggcgaaagagccaccctgagctgcaaggcttcccagagcgtgtccaacgacgtcgtgtggtatcagcagaagcccggccaggcccccagactgctgatctactacgccagcaacagatacaccggcatccccgccagattcagcggctctggcagcggcaccgagttcaccctgacaatcagcagcctccagagcgaggacttcgccgtgtactactgtcagcaggactacaccagcccctggaccttcggccagggcaccaagctggaaatcaagagaggcggaggcggaagtggaggcggaggatctggcggcggaggctctcaggtgcaactggtgcagagcggagccgaagtgaagaaacctggggccagcgtgaaggtgtcctgcaaggccagcggctacacctttaccaactacggcatgaactgggtgcgccaggctcctggacagggcctggaatggatgggctggatcaacacctacaccggcgagcccacctacgccgacgacttcaagggcagagtgaccatgaccaccgacaccagcacctccaccgcctacatggaactgcggagcctgagaagcgacgacaccgccgtgtattattgcgcccggatcggcgacagcagccccagcgattattggggccagggaaccctcgtgaccgtgtcctctacgcgtggaatgaggactgaggatcttcccaaagctgtcgtctttctcgaaccccaatggtatcgggtgctcgaaaaagactctgtgacactgaaatgccaaggggcctactctcccgaggacaactccacacagtggtttcataatgagtccctcatcagctctcaggccagctcttatttcattgatgccgctacagtggacgactccggcgagtatcggtgtcagaccaatctgtctacactgtctgaccccgtgcagcttgaggtccacattggatggttgctcttgcaagccccacgctgggttttcaaagaggaagatccaatccatctgcggtgccacagctggaaaaacaccgctctccacaaagtcacatacctgcaaaatggcaaaggacgcaaatacttccatcacaattccgatttttacattccgaaggctaccctgaaagacagcggcagctatttctgccggggactcgtcggctccaagaatgtgtcctccgaaaccgtgaatatcacgattacccaaggactggctgtgcctacaatctctagcttctttccgcctggataccaagtctccttctgtcttgtgatggtcctcctgtttgctgtggacacaggactgtacttttacgtg

SEQ ID NO: 1995 - DNA, 1431 bp, synthetic construct
  source 1..1431: mol_type = other DNA
atggccttaccagtgaccgccttgctcctgccgctggccttgctgctccacgccgccaggccggacatcctgctgacccagagccccgtgatcctgtccgtgtctcctggcgagagagtgtccttcagctgtcgggccagccagagcatcggcaccaacatccactggtatcagcagcggaccaacggcagccccagactgctgattaagtacgccagcgagtccatcagcggcatccccagcagattttccggcagcggctccggcaccgacttcaccctgagcatcaacagcgtggaaagcgaggacattgccgactactactgccagcagaacaacaactggcccaccaccttcggagccggcaccaagctggaactgaagggcggaggcggaagtggaggcggaggatctggcggcggaggctctcaggtgcagctgaagcagagcggacctggcctggtgcagcctagccagagcctgtccatcacctgtaccgtgtccggcttcagcctgaccaactacggcgtgcactgggtgcgccagagccctggaaaaggactggaatggctgggagtgatttggagcggcggcaacaccgactacaacacccccttcaccagcagactgtctatcaacaaggacaacagcaagagccaggtgttcttcaagatgaacagcctccagagcaacgacaccgccatctactactgtgctagagccctgacctactatgactacgagttcgcctactggggccagggcacactcgtgacagtgtctgctacgcgtggaatgaggactgaggatcttcccaaagctgtcgtctttctcgaaccccaatggtatcgggtgctcgaaaaagactctgtgacactgaaatgccaaggggcctactctcccgaggacaactccacacagtggtttcataatgagtccctcatcagctctcaggccagctcttatttcattgatgccgctacagtggacgactccggcgagtatcggtgtcagaccaatctgtctacactgtctgaccccgtgcagcttgaggtccacattggatggttgctcttgcaagccccacgctgggttttcaaagaggaagatccaatccatctgcggtgccacagctggaaaaacaccgctctccacaaagtcacatacctgcaaaatggcaaaggacgcaaatacttccatcacaattccgatttttacattccgaaggctaccctgaaagacagcggcagctatttctgccggggactcgtcggctccaagaatgtgtcctccgaaaccgtgaatatcacgattacccaaggactggctgtgcctacaatctctagcttctttccgcctggataccaagtctccttctgtcttgtgatggtcctcctgtttgctgtggacacaggactgtacttttacgtg

SEQ ID NO: 1996 - DNA, 1431 bp, synthetic construct
  source 1..1431: mol_type = other DNA
atggccttaccagtgaccgccttgctcctgccgctggccttgctgctccacgccgccaggccggagatccagctggtgcagagcggagccgaagtgaagaagcctggcgagagcctgcggatcagctgcaagggcagcggcttcaacatcgaggactactacatccactgggtgcgccagatgcccggcaagggcctggaatggatgggcagaatcgaccccgagaacgacgagactaagtacggccccatcttccagggccacgtgaccatcagcgccgacaccagcatcaacaccgtgtacctccagtggtccagcctgaaggccagcgacaccgccatgtactactgcgcctttagaggcggcgtgtactggggccagggcaccacagtgacagtgtctagcggcggaggcggaagtggaggcggaggatctggcggcggaggctctgatgtcgtgatgacccagagccccgacagcctggctgtgtctctgggagagagagccaccatcaactgcaagtccagccagtccctgctggacagcgacggcaagacctacctgaactggctccagcagaagcccggccagccccccaagagactgatctccctggtgtccaagctggactccggcgtgcccgatagattttccggctctggcagcggcaccgacttcaccctgacaatcagctcccttcaggccgaggacgtggccgtgtactattgctggcagggcacacacttccccggcacctttggcggaggcaccaaggtggaaatcaagacgcgtggaatgaggactgaggatcttcccaaagctgtcgtctttctcgaaccccaatggtatcgggtgctcgaaaaagactctgtgacactgaaatgccaaggggcctactctcccgaggacaactccacacagtggtttcataatgagtccctcatcagctctcaggccagctcttatttcattgatgccgctacagtggacgactccggcgagtatcggtgtcagaccaatctgtctacactgtctgaccccgtgcagcttgaggtccacattggatggttgctcttgcaagccccacgctgggttttcaaagaggaagatccaatccatctgcggtgccacagctggaaaaacaccgctctccacaaagtcacatacctgcaaaatggcaaaggacgcaaatacttccatcacaattccgatttttacattccgaaggctaccctgaaagacagcggcagctatttctgccggggactcgtcggctccaagaatgtgtcctccgaaaccgtgaatatcacgattacccaaggactggctgtgcctacaatctctagcttctttccgcctggataccaagtctccttctgtcttgtgatggtcctcctgtttgctgtggacacaggactgtacttttacgtg

SEQ ID NO: 1997 - DNA, 1455 bp, synthetic construct
  source 1..1455: mol_type = other DNA
atggccttaccagtgaccgccttgctcctgccgctggccttgctgctccacgccgccaggccggagctgcagatgacccagagccctagcagcctgtctgccagcgtgggcgacagagtgaccatcacctgtagagccagccagagcatcagcagctacctgaactggtatcagcagaagcccggccagccccccaaactgctgatctactgggccagcaccagagaaagcggcgtgcccgatagattcagcggcagcgagagcggcaccaactacaccctgaccatcagctccctgcagcccgaggacttcgccacctacttttgccagcagagcgacagcctgcccatcacctttggacagggcacccggctggacattcagggcggaggcggaagtggaggcggaggatctggcggcggaggctctgaggtgcaactgctggaatctgggggcggagtggtgcagcctggcagaagcctgagactgagctgtgccgccagcggcttcaccttcagctcctacggaatgcactgggtgcgccaggcccctggcaaaggactggaatgggtggccgtgatctcctacgacggcagcaacaagtactacgccgacagcgtgaagggccggttcaccatcagccgggacaacagcaagaacaccctgtacctgcagatgaacagcctgcgggccgaggacaccgccgtgtactactgcgccaaggatatgggctggggcagcggctggcggccttactactactacggcatggacgtgtggggccagggcaccaccgtgacagtgtcatctacgcgtggaatgaggactgaggatcttcccaaagctgtcgtctttctcgaaccccaatggtatcgggtgctcgaaaaagactctgtgacactgaaatgccaaggggcctactctcccgaggacaactccacacagtggtttcataatgagtccctcatcagctctcaggccagctcttatttcattgatgccgctacagtggacgactccggcgagtatcggtgtcagaccaatctgtctacactgtctgaccccgtgcagcttgaggtccacattggatggttgctcttgcaagccccacgctgggttttcaaagaggaagatccaatccatctgcggtgccacagctggaaaaacaccgctctccacaaagtcacatacctgcaaaatggcaaaggacgcaaatacttccatcacaattccgatttttacattccgaaggctaccctgaaagacagcggcagctatttctgccggggactcgtcggctccaagaatgtgtcctccgaaaccgtgaatatcacgattacccaaggactggctgtgcctacaatctctagcttctttccgcctggataccaagtctccttctgtcttgtgatggtcctcctgtttgctgtggacacaggactgtacttttacgtg

SEQ ID NO: 1998 - DNA, 1452 bp, synthetic construct
  source 1..1452: mol_type = other DNA
atggccttaccagtgaccgccttgctcctgccgctggccttgctgctccacgccgccaggccggagcttgtgatgacccagagccccagcagcctgacagtgacagccggcgagaaagtgaccatgagctgcaagagcagccagagcctgctgaacagcggcaaccagaagaactacctgacctggtatcagcagaagcccggccagccccccaagctgctgatctactgggccagcaccagagaaagcggcgtgcccgatagattcaccggctctggcagcggcaccgacttcaccctgacaatcagcagcgtgcaggccgaggacctggccgtgtactactgccagaacgactacagctaccccctgaccttcggagccggcaccaagctggaaatcaagggcggaggcggaagtggaggcggaggatctggcggcggaggctctgaagtgcagctgctggaacagtctggcgccgaacttgtgcggcctggcaccagcgtgaagatcagctgtaaagccagcggctacgccttcaccaactactggctgggctgggtcaagcagaggcctggacacggcctggaatggatcggcgacatctttcccggctccggcaacatccactacaacgagaagttcaagggcaaggccaccctgaccgccgacaagtctagcagcaccgcctacatgcagctgtccagcctgacctttgaggacagcgccgtgtatttctgtgcccggctgcggaactgggacgagcccatggattattggggccagggcaccaccgtgaccgtgtctagtacgcgtggaatgaggactgaggatcttcccaaagctgtcgtctttctcgaaccccaatggtatcgggtgctcgaaaaagactctgtgacactgaaatgccaaggggcctactctcccgaggacaactccacacagtggtttcataatgagtccctcatcagctctcaggccagctcttatttcattgatgccgctacagtggacgactccggcgagtatcggtgtcagaccaatctgtctacactgtctgaccccgtgcagcttgaggtccacattggatggttgctcttgcaagccccacgctgggttttcaaagaggaagatccaatccatctgcggtgccacagctggaaaaacaccgctctccacaaagtcacatacctgcaaaatggcaaaggacgcaaatacttccatcacaattccgatttttacattccgaaggctaccctgaaagacagcggcagctatttctgccggggactcgtcggctccaagaatgtgtcctccgaaaccgtgaatatcacgattacccaaggactggctgtgcctacaatctctagcttctttccgcctggataccaagtctccttctgtcttgtgatggtcctcctgtttgctgtggacacaggactgtacttttacgtg

SEQ ID NO: 1999 - DNA, 1446 bp, synthetic construct
  source 1..1446: mol_type = other DNA
atggccttaccagtgaccgccttgctcctgccgctggccttgctgctccacgccgccaggccggacatccaaatgacacagagtccttctagtttgagtgcgagcgtgggggacagggtgaccattacctgcagggccagccagagcataagctcataccttaattggtaccagcaaaaaccaggtaaggcccctaagctcctgatctacgcggcctcttcacttcaatctggggtcccttcccgcttcagtggctccggcagcggcaccgacttcacgctcactatatcaagtctgcagcctgaggatctcgccacctattactgtcaacaaagttattccacccctttcacctttggaccgggcacgaaagtggatattaagggcggaggcggaagtggaggcggaggatctggcggcggaggctctgtgcacgaggtccagcttgtgcagtccggggcagaggtcaagaagcctggttctagcgtaaaagtgagttgcaaagcctcaggtgggacattttcatcctacgcgatcagttgggttagacaggctcctggtcaagggctggaatggatgggcggaattattccaatcttcggaacagcgaattacgcgcagaagttccagggtagagtaaccatcactgctgacaagtccacctccaccgcatacatggaattgtctagtctccggagcgaggatacggcggtgtattattgtgctacgttcgccctgtttggcttccgcgaacaggctttcgacatctgggggcagggcacgacagtcacggttagtagtacgcgtggaatgaggactgaggatcttcccaaagctgtcgtctttctcgaaccccaatggtatcgggtgctcgaaaaagactctgtgacactgaaatgccaaggggcctactctcccgaggacaactccacacagtggtttcataatgagtccctcatcagctctcaggccagctcttatttcattgatgccgctacagtggacgactccggcgagtatcggtgtcagaccaatctgtctacactgtctgaccccgtgcagcttgaggtccacattggatggttgctcttgcaagccccacgctgggttttcaaagaggaagatccaatccatctgcggtgccacagctggaaaaacaccgctctccacaaagtcacatacctgcaaaatggcaaaggacgcaaatacttccatcacaattccgatttttacattccgaaggctaccctgaaagacagcggcagctatttctgccggggactcgtcggctccaagaatgtgtcctccgaaaccgtgaatatcacgattacccaaggactggctgtgcctacaatctctagcttctttccgcctggataccaagtctccttctgtcttgtgatggtcctcctgtttgctgtggacacaggactgtacttttacgtg

SEQ ID NO: 2000 - DNA, 1428 bp, synthetic construct
  source 1..1428: mol_type = other DNA
atggccttaccagtgaccgccttgctcctgccgctggccttgctgctccacgccgccaggccgtacatccacgtgacacagagccctagcagcctgtccgtgtccatcggcgatagagtgaccatcaactgccagacctctcaaggcgtgggcagcgacctgcactggtatcagcacaaacctggcagagcccctaagctgctgatccaccatgccagctctgtggaagatggcgtgcccagcagattttccggcaccggatttcacaccagcttcaacctgacaatcaacgacctccaggccgacgacatcggcacctactactgtcaagtgctccagagcttcggcagaggcagcagactggatacaaaaggcggaggcggaagtggaggcggaggatctggcggcggaggctctagggcacacctggtgcagtctggcaccgccatgaagaaacctggcgcttccgtcagagtgtcctgtcagacaagcggctacaccttcacagcccacatcctgttctggttcagacaggccccaggcagaggactggaatgggtcggatggatcaagccccagtacggggccgtgaatttcggcggaggcttcagagacagagtgaccctgaccagggacgtgtaccgggaaatcgcctacatggacatccggggcctgaagcctgatgacaccgccgtgtactactgcgccagggatagaagctacggcgacagctcttgggctctcgatgcttggggacagggcacaacagtggtggtgtctgctacgcgtggaatgaggactgaggatcttcccaaagctgtcgtctttctcgaaccccaatggtatcgggtgctcgaaaaagactctgtgacactgaaatgccaaggggcctactctcccgaggacaactccacacagtggtttcataatgagtccctcatcagctctcaggccagctcttatttcattgatgccgctacagtggacgactccggcgagtatcggtgtcagaccaatctgtctacactgtctgaccccgtgcagcttgaggtccacattggatggttgctcttgcaagccccacgctgggttttcaaagaggaagatccaatccatctgcggtgccacagctggaaaaacaccgctctccacaaagtcacatacctgcaaaatggcaaaggacgcaaatacttccatcacaattccgatttttacattccgaaggctaccctgaaagacagcggcagctatttctgccggggactcgtcggctccaagaatgtgtcctccgaaaccgtgaatatcacgattacccaaggactggctgtgcctacaatctctagcttctttccgcctggataccaagtctccttctgtcttgtgatggtcctcctgtttgctgtggacacaggactgtacttttacgtg

SEQ ID NO: 2001 - DNA, 1443 bp, synthetic construct
  source 1..1443: mol_type = other DNA
atggccttaccagtgaccgccttgctcctgccgctggccttgctgctccacgccgccaggccggacatcgtgctgacccagagccctctgagcctggccgtgtctctgggacagcctgccatcatcagctgcaaggccagccagagcgtgtcctttgccggcacctctctgatgcactggtatcaccagaagcccggccagcagcccagactgctgatctacagagccagcaacctggaagccggcgtgcccgatagattttccggcagcggcagcaagaccgacttcaccctgaccatcagccccgtggaagccgaagatgccgccacctactactgccagcagagcagagagtacccctacaccttcggcggaggcaccaagctggaaatcaagaggggcggaggcggaagtggaggcggaggatctggcggcggaggctctcaggtccaactggtgcagagcggagccgaggtcgtgaagcctggcgcttccgtgaagattagctgcaaagccagcggctacacctttaccggctactttatgaactgggtcaagcagagccctggccagagcctggaatggatcggcagaatccacccctacgacggcgacaccttctacaaccagaagttccagggcaaggccaccctgacagtggacaagagcagcaacaccgcccacatggaactgctgagcctgaccagcgaggacttcgccgtgtactactgcaccagatacgacggcagccgggctatggactattggggccagggcaccaccgtgaccgtgtctagtacgcgtggaatgaggactgaggatcttcccaaagctgtcgtctttctcgaaccccaatggtatcgggtgctcgaaaaagactctgtgacactgaaatgccaaggggcctactctcccgaggacaactccacacagtggtttcataatgagtccctcatcagctctcaggccagctcttatttcattgatgccgctacagtggacgactccggcgagtatcggtgtcagaccaatctgtctacactgtctgaccccgtgcagcttgaggtccacattggatggttgctcttgcaagccccacgctgggttttcaaagaggaagatccaatccatctgcggtgccacagctggaaaaacaccgctctccacaaagtcacatacctgcaaaatggcaaaggacgcaaatacttccatcacaattccgatttttacattccgaaggctaccctgaaagacagcggcagctatttctgccggggactcgtcggctccaagaatgtgtcctccgaaaccgtgaatatcacgattacccaaggactggctgtgcctacaatctctagcttctttccgcctggataccaagtctccttctgtcttgtgatggtcctcctgtttgctgtggacacaggactgtacttttacgtg

SEQ ID NO: 2002 - DNA, 1431 bp, synthetic construct
  source 1..1431: mol_type = other DNA
atggccttaccagtgaccgccttgctcctgccgctggccttgctgctccacgccgccaggccggacgttgtgatgacccagacccccctgagcctgcctgtgacacctggcgaacctgccagcatcagctgtcggagcagccagagcctggtgcacagaaacggcaacacctacctgcactggtatctccagaagcccggccagagccccaagctgctgatccacaaggtgtccaacagattcagcggcgtgcccgacagattctccggcagcggctctggcaccgacttcaccctgaagatcagccgggtggaagccgaggacctgggcgtgtacttctgtagccagagcacccatgtgccccccctgacatttggagccggcaccaagctggaactgaagggcggaggcggaagtggaggcggaggatctggcggcggaggctctgaagtgcagctggtgcagtctggcgctgaggtggaaaagcctggggccagcgtgaagattagctgcaaggccagcggcagcagcttcaccggctacaacatgaactgggtgcgccagaacatcggcaagagcctggaatggatcggagccatcgacccctactacggcggcaccagctacaaccagaagttcaagggcagagccaccctgaccgtggacaagagcaccagcaccgcctacatgcacctgaagtccctgcggagcgaggacaccgccgtgtactactgtgtgtccggcatggaatattggggccagggcaccagcgtgaccgtgtctagtacgcgtggaatgaggactgaggatcttcccaaagctgtcgtctttctcgaaccccaatggtatcgggtgctcgaaaaagactctgtgacactgaaatgccaaggggcctactctcccgaggacaactccacacagtggtttcataatgagtccctcatcagctctcaggccagctcttatttcattgatgccgctacagtggacgactccggcgagtatcggtgtcagaccaatctgtctacactgtctgaccccgtgcagcttgaggtccacattggatggttgctcttgcaagccccacgctgggttttcaaagaggaagatccaatccatctgcggtgccacagctggaaaaacaccgctctccacaaagtcacatacctgcaaaatggcaaaggacgcaaatacttccatcacaattccgatttttacattccgaaggctaccctgaaagacagcggcagctatttctgccggggactcgtcggctccaagaatgtgtcctccgaaaccgtgaatatcacgattacccaaggactggctgtgcctacaatctctagcttctttccgcctggataccaagtctccttctgtcttgtgatggtcctcctgtttgctgtggacacaggactgtacttttacgtg

SEQ ID NO: 2003 - DNA, 1425 bp, synthetic construct
  source 1..1425: mol_type = other DNA
atggccttaccagtgaccgccttgctcctgccgctggccttgctgctccacgccgccaggccggagatcgtgatgacccagacccctgccaccctgtctgtgtctgccggcgagagagtgaccattacctgcaaggccagccagagcgtgtccaacgacgtgacctggtatcagcagaagcccggccaggcccccagactgctgatctacagcgccagcaacagatacagcggcgtgcccgccagattttccggcagcggctacggcaccgagttcaccttcaccatcagcagcgtgcagagcgaggacttcgccgtgtacttctgtcagcaagactacagcagcttcggccagggcaccaagctggaaatcaagaggggcggaggcggaagtggaggcggaggatctggcggcggaggctctcaggtgcagctggtggaatctggacctggcgtggtgcagcctggcagaagcctgagaatcagctgtgccgtgtccggcttcagcgtgaccaactacggcgtgcactgggtgcgccagccacctggaaaaggactggaatggctgggcgtgatctgggctggcggcatcaccaactacaacagcgccttcatgtcccggctgaccatctccaaggacaacagcaagaacaccgtgtacctccagatgaacagcctgcgggccgaggacaccgccatgtactactgtgcttccagaggcggccactacggctacgccctggattattggggccagggaaccctcgtgaccgtgtcctctacgcgtggaatgaggactgaggatcttcccaaagctgtcgtctttctcgaaccccaatggtatcgggtgctcgaaaaagactctgtgacactgaaatgccaaggggcctactctcccgaggacaactccacacagtggtttcataatgagtccctcatcagctctcaggccagctcttatttcattgatgccgctacagtggacgactccggcgagtatcggtgtcagaccaatctgtctacactgtctgaccccgtgcagcttgaggtccacattggatggttgctcttgcaagccccacgctgggttttcaaagaggaagatccaatccatctgcggtgccacagctggaaaaacaccgctctccacaaagtcacatacctgcaaaatggcaaaggacgcaaatacttccatcacaattccgatttttacattccgaaggctaccctgaaagacagcggcagctatttctgccggggactcgtcggctccaagaatgtgtcctccgaaaccgtgaatatcacgattacccaaggactggctgtgcctacaatctctagcttctttccgcctggataccaagtctccttctgtcttgtgatggtcctcctgtttgctgtggacacaggactgtacttttacgtg

SEQ ID NO: 2004 - DNA, 1434 bp, synthetic construct
  source 1..1434: mol_type = other DNA
atggccttaccagtgaccgccttgctcctgccgctggccttgctgctccacgccgccaggccggacatccagatgacccagaccgccagcagcctgcctgcctctctgggcgacagagtgaccatctcctgtagcgccagccaggacatcagcaactacctgaactggtatcagcagaaacccgacggcaccgtgaagctgctgatcttctacagcagcaacctgcacagcggcgtgcccagcagattttctggcggcggaagcggcaccgactacagcctgaccatcagcaatctggaacccgaggacattgccacctacttttgccaccagtacagcaagctgccctggacctttggcggaggcaccaagctggaaatcaagagaggcggaggcggaagtggaggcggaggatctggcggcggaggctctgaagtgaccctggtggaaagcggcggagacttcgtgaagcctggcggctctctgaaggtgtcctgtgccgccagcggcttcgcctttagccactacgccatgagctgggtgcgccagacccctgccaagagactggaatgggtggcctacatcagcagcggcggctccggcacctactactccgatagcgtgaagggccggttcaccatcagccgggacaacgccaagaacaccctgtacctccagatgcggagcctgcggagcgaggacagcgccatgtatttctgcaccagagtgaagctgggcacctattacttcgactcttggggccagggcaccaccctgaccgtgtcatctacgcgtggaatgaggactgaggatcttcccaaagctgtcgtctttctcgaaccccaatggtatcgggtgctcgaaaaagactctgtgacactgaaatgccaaggggcctactctcccgaggacaactccacacagtggtttcataatgagtccctcatcagctctcaggccagctcttatttcattgatgccgctacagtggacgactccggcgagtatcggtgtcagaccaatctgtctacactgtctgaccccgtgcagcttgaggtccacattggatggttgctcttgcaagccccacgctgggttttcaaagaggaagatccaatccatctgcggtgccacagctggaaaaacaccgctctccacaaagtcacatacctgcaaaatggcaaaggacgcaaatacttccatcacaattccgatttttacattccgaaggctaccctgaaagacagcggcagctatttctgccggggactcgtcggctccaagaatgtgtcctccgaaaccgtgaatatcacgattacccaaggactggctgtgcctacaatctctagcttctttccgcctggataccaagtctccttctgtcttgtgatggtcctcctgtttgctgtggacacaggactgtacttttacgtg

SEQ ID NO: 2005 - DNA, 1440 bp, synthetic construct
  source 1..1440: mol_type = other DNA
atggccttaccagtgaccgccttgctcctgccgctggccttgctgctccacgccgccaggccgcagttcgtgctgacccagagcccttctgcctctgctgccctgggagcctctgccaagctgacctgtacactgagcagcgcccacaagacctacaccatcgactggtatcagcagcagaagggaaaggcccccagatacctgatccaagtgaagtccgacggcacctacacaaaggccaccggcgtgcccgatagattcagcggcagtagcagcggagccgatagatacctgattatccccagcgtgcaggccgacgacgaggccgattactactgcggcaccgattacaccggcggctacgtgttcggcggaggcacacaactgaccgtgacaggcggaggcggaagtggaggcggaggatctggcggcggaggctctgagcaactgaaagagtctggcggcggactgttcaagcccaccgataccctgaccctgacctgcaccgtgtccggcttcagcctgagctactacggcgtgaactgggtgcgccaggcccctggcaatggcctggaatggatcggcacaatcggcggcagcggcgacacctactatgcctcttgggccaagtccagaagcaccatcatcagaaacaccaacgagaacaccgtgaccctgaagatgaccagcctgacagccgccgacaccgccacctacttttgcgtcagatacgccaacatcggctacgagtatttcaacgtgtggggacccggcaccctcgtgaccgtgtcatctacgcgtggaatgaggactgaggatcttcccaaagctgtcgtctttctcgaaccccaatggtatcgggtgctcgaaaaagactctgtgacactgaaatgccaaggggcctactctcccgaggacaactccacacagtggtttcataatgagtccctcatcagctctcaggccagctcttatttcattgatgccgctacagtggacgactccggcgagtatcggtgtcagaccaatctgtctacactgtctgaccccgtgcagcttgaggtccacattggatggttgctcttgcaagccccacgctgggttttcaaagaggaagatccaatccatctgcggtgccacagctggaaaaacaccgctctccacaaagtcacatacctgcaaaatggcaaaggacgcaaatacttccatcacaattccgatttttacattccgaaggctaccctgaaagacagcggcagctatttctgccggggactcgtcggctccaagaatgtgtcctccgaaaccgtgaatatcacgattacccaaggactggctgtgcctacaatctctagcttctttccgcctggataccaagtctccttctgtcttgtgatggtcctcctgtttgctgtggacacaggactgtacttttacgtg

SEQ ID NO: 2006 - DNA, 1437 bp, synthetic construct
  source 1..1437: mol_type = other DNA
atggccttaccagtgaccgccttgctcctgccgctggccttgctgctccacgccgccaggccggacatccagatgacccagagccccagcagcctgtctgccagcgtgggcgacagagtgaccatcacctgtagagccagccagggcatcagctcttggctggcctggtatcagcagaagcccgagaaggcccccaagagcctgatctacgccgcctctagtctccagagcggcgtgcccagcagattttctggcagcggctccggcaccgacttcaccctgacaatcagctccctccagcccgaggacttcgccacctactactgccagcagtacaacagctacccccccacctttggcggaggcaccaaggtggaaatcaagggcggaggcggaagtggaggcggaggatctggcggcggaggctctgaagtgcaactggtggaatcaggcggcggactggtgcagcctggcgagtctctgagactgagctgtgtggcctccggcttcaccttcagccggtacaagatgaactgggtgcgccaggcccctggcaagggactggaatgggtgtcctacatcagccgcagcggcagagacatctactacgccgacagcgtgaagggccggttcaccatcagcagagacaacgccaagaacagcctgtacctccagatgaactccctgcgggacgaggacaccgccgtgtactactgtgccggaaccgtgaccacctattactacttcggcatggacgtgtggggccacggcaccaccgtgacagtgtcatctacgcgtggaatgaggactgaggatcttcccaaagctgtcgtctttctcgaaccccaatggtatcgggtgctcgaaaaagactctgtgacactgaaatgccaaggggcctactctcccgaggacaactccacacagtggtttcataatgagtccctcatcagctctcaggccagctcttatttcattgatgccgctacagtggacgactccggcgagtatcggtgtcagaccaatctgtctacactgtctgaccccgtgcagcttgaggtccacattggatggttgctcttgcaagccccacgctgggttttcaaagaggaagatccaatccatctgcggtgccacagctggaaaaacaccgctctccacaaagtcacatacctgcaaaatggcaaaggacgcaaatacttccatcacaattccgatttttacattccgaaggctaccctgaaagacagcggcagctatttctgccggggactcgtcggctccaagaatgtgtcctccgaaaccgtgaatatcacgattacccaaggactggctgtgcctacaatctctagcttctttccgcctggataccaagtctccttctgtcttgtgatggtcctcctgtttgctgtggacacaggactgtacttttacgtg

SEQ ID NO: 2007 - DNA, 1434 bp, synthetic construct
  source 1..1434: mol_type = other DNA
atggccttaccagtgaccgccttgctcctgccgctggccttgctgctccacgccgccaggccgcagtctgtggtcacacagccacctagcatgtctgccgctccaggccagcaagtgaccatctcttgtagcggcggcaacagcaacatcgagcggaactacgtgtcctggtatctgcaactgcctggcacagcccctaagctggtcatcttcgacaacgacagacggcccagcggcatccccgatagattttctggcagcaagagcggcaccagcgccacactgggaattaccggacttcagacaggcgacgaggccgactactactgtggcacatgggactctagcctgagaggctgggttttcggcggaggcacaaagctgacagtgcttggtggcggaggcggaagtggaggcggaggatctggcggcggaggctctgaagtgcagctcgttgagtctggcggcggactgattcaacctggcggaagcctgagactgagctgtgccgcttccggcttcaccttcagcaactacgccatgaactgggttcgacaggcccctggcaaaggactggaatgggtgtccaccatcaacggcagaggcagcagcaccatctacgccgattctgtgaagggcagattcaccatcagccgggacaacagcaagaacaccctgtacctccagatgaactccctgagagccgaggacaccgccacctattactgtgcccggtacatcagcagaggactgggcgattcttggggccagggcacactggttacagtgacgcgtggaatgaggactgaggatcttcccaaagctgtcgtctttctcgaaccccaatggtatcgggtgctcgaaaaagactctgtgacactgaaatgccaaggggcctactctcccgaggacaactccacacagtggtttcataatgagtccctcatcagctctcaggccagctcttatttcattgatgccgctacagtggacgactccggcgagtatcggtgtcagaccaatctgtctacactgtctgaccccgtgcagcttgaggtccacattggatggttgctcttgcaagccccacgctgggttttcaaagaggaagatccaatccatctgcggtgccacagctggaaaaacaccgctctccacaaagtcacatacctgcaaaatggcaaaggacgcaaatacttccatcacaattccgatttttacattccgaaggctaccctgaaagacagcggcagctatttctgccggggactcgtcggctccaagaatgtgtcctccgaaaccgtgaatatcacgattacccaaggactggctgtgcctacaatctctagcttctttccgcctggataccaagtctccttctgtcttgtgatggtcctcctgtttgctgtggacacaggactgtacttttacgtg

SEQ ID NO: 2008 - DNA, 1437 bp, synthetic construct
  source 1..1437: mol_type = other DNA
atggccttaccagtgaccgccttgctcctgccgctggccttgctgctccacgccgccaggccgcagtctgtgctgacacagcctccatctgcctctggcacacctggacagagagtgaccatcagctgtagcggcagcagaagcaacgtcggcggcaactacgtgttctggtatcagcaggtcccaggcgctacccctaagctgctgatctacagaagcaatcagcggcctagcggcgtgcccgatagatttgccggaagcaagagcggcagctctgccagccttgccatctctggactgagaagcgaggacgaggccgactactactgtgccacctgggatgatagcctgagcggcttcgtgtttggcaccggcaccaaagtgacagtgcttggtggcggaggcggaagtggaggcggaggatctggcggcggaggctctgaagttcagctggttgaatctggcggcggactggttaagcctggcggatctctgagactgtcttgtgccgccagcggcttcaccttcagcgattactacatgagctggatcagacaggcccctggcaaaggactggaatgggtgtcctacatcagcagcagcggctccaccatctactacgccgatagcgtgaagggcagattcaccatcagccgggacaacgccaagaacagcctgtacctccagatgaactccctgagagccgaggacaccgccgtgtactattgcgccagaggctacggcaaagcctacgatcaatggggccagggcacactggtcaccgtttcttctacgcgtggaatgaggactgaggatcttcccaaagctgtcgtctttctcgaaccccaatggtatcgggtgctcgaaaaagactctgtgacactgaaatgccaaggggcctactctcccgaggacaactccacacagtggtttcataatgagtccctcatcagctctcaggccagctcttatttcattgatgccgctacagtggacgactccggcgagtatcggtgtcagaccaatctgtctacactgtctgaccccgtgcagcttgaggtccacattggatggttgctcttgcaagccccacgctgggttttcaaagaggaagatccaatccatctgcggtgccacagctggaaaaacaccgctctccacaaagtcacatacctgcaaaatggcaaaggacgcaaatacttccatcacaattccgatttttacattccgaaggctaccctgaaagacagcggcagctatttctgccggggactcgtcggctccaagaatgtgtcctccgaaaccgtgaatatcacgattacccaaggactggctgtgcctacaatctctagcttctttccgcctggataccaagtctccttctgtcttgtgatggtcctcctgtttgctgtggacacaggactgtacttttacgtg

SEQ ID NO: 2009 - DNA, 1434 bp, synthetic construct
  source 1..1434: mol_type = other DNA
atggccttaccagtgaccgccttgctcctgccgctggccttgctgctccacgccgccaggccggacatccagatgacccagagccccagcagcctgtctgccagcgtgggcgacagagtgaccatcacctgtagagccagccaggacgtgaacaccgccgtggcctggtatcagcagaagcctggcaaggcccccaagctgctgatctacagcgccagcttcctggaaagcggcgtgcccagcagattcagcggaagcagaagcggcaccgacttcaccctgaccatcagctccctccagcccgaggacttcgccacctactactgccagcagcactacaccacccctcccaccttcggccagaccaaggtggaaatcaagagaggcggaggcggaagtggaggcggaggatctggcggcggaggctctgaagtgcaactggtggaatctggcggcggactggtgcagcctggcggatctctgagactgagctgtgccgccagcggcttcaacatcaaggacacctacatccactgggtgcgccaggcccctggaaagggactggaatgggtggcccggatctaccccaccaacggctacaccagatacgccgacagcgtgaagggccggttcaccatcagcgccgacaccagcaagaataccgcctacctccagatgaacagcctgcgggccgaggataccgccgtgtactactgctcaagatggggaggcgacggcttctacgctatggacgtgtggggccagggcacccttgtgaccgtgtcatctacgcgtggaatgaggactgaggatcttcccaaagctgtcgtctttctcgaaccccaatggtatcgggtgctcgaaaaagactctgtgacactgaaatgccaaggggcctactctcccgaggacaactccacacagtggtttcataatgagtccctcatcagctctcaggccagctcttatttcattgatgccgctacagtggacgactccggcgagtatcggtgtcagaccaatctgtctacactgtctgaccccgtgcagcttgaggtccacattggatggttgctcttgcaagccccacgctgggttttcaaagaggaagatccaatccatctgcggtgccacagctggaaaaacaccgctctccacaaagtcacatacctgcaaaatggcaaaggacgcaaatacttccatcacaattccgatttttacattccgaaggctaccctgaaagacagcggcagctatttctgccggggactcgtcggctccaagaatgtgtcctccgaaaccgtgaatatcacgattacccaaggactggctgtgcctacaatctctagcttctttccgcctggataccaagtctccttctgtcttgtgatggtcctcctgtttgctgtggacacaggactgtacttttacgtg

SEQ ID NO: 2010 - DNA, 1473 bp, synthetic construct
  source 1..1473: mol_type = other DNA
atggccttaccagtgaccgccttgctcctgccgctggccttgctgctccacgccgccaggccgcagtctgccctgacacagcctcctagcgcctctggctctcccggccagagcatcaccatcagctgtaccggcaccagcaacaacttcgtgtcctggtatcagcagcacgccggcaaggcccccaagctcgtgatctacgacgtgaacaagcggcccagcggcgtgcccgatagattcagcggcagcaagagcggcaacaccgccagcctgacagtgtctggcctccagaccgatgacgaggccgtgtactactgcggcagcctcgtgggcaactgggacgtgatctttggcggaggcaccaagctgaccgtgctgggcggaggcggaagtggaggcggaggatctggcggcggaggctctcagccccagctccaggaatctggccccacactggtggaagccagcgagacactgagcctgacctgtgccgtgtccggcgattctaccgccgcctgcaatagcttctggggctgggtgcgccagcctcctggaaagggactggaatgggtgggaagcctgagccactgcgccagctattggaaccggggctggacctaccacaaccccagcctgaagtccagactgaccctggccctggacacccccaagaacctggtgttcctgaagctgaacagcgtgacagccgccgacaccgccacctactactgtgccagatttggcggcgaggtgctgcggtacaccgactggcctaaacctgcctgggtggacctgtggggcagaggaacactcgtgaccgtgtccagcacgcgtggaatgaggactgaggatcttcccaaagctgtcgtctttctcgaaccccaatggtatcgggtgctcgaaaaagactctgtgacactgaaatgccaaggggcctactctcccgaggacaactccacacagtggtttcataatgagtccctcatcagctctcaggccagctcttatttcattgatgccgctacagtggacgactccggcgagtatcggtgtcagaccaatctgtctacactgtctgaccccgtgcagcttgaggtccacattggatggttgctcttgcaagccccacgctgggttttcaaagaggaagatccaatccatctgcggtgccacagctggaaaaacaccgctctccacaaagtcacatacctgcaaaatggcaaaggacgcaaatacttccatcacaattccgatttttacattccgaaggctaccctgaaagacagcggcagctatttctgccggggactcgtcggctccaagaatgtgtcctccgaaaccgtgaatatcacgattacccaaggactggctgtgcctacaatctctagcttctttccgcctggataccaagtctccttctgtcttgtgatggtcctcctgtttgctgtggacacaggactgtacttttacgtg

SEQ ID NO: 2011 - DNA, 1458 bp, synthetic construct
  source 1..1458: mol_type = other DNA
atggccttaccagtgaccgccttgctcctgccgctggccttgctgctccacgccgccaggccggagctggtgctgacacagagccctggcaccctgtctctgtctgccggcgaaagagccaccctgagctgtagagccagccagagcgtgtcctctggcagcctggcttggtatcagcagaagccaggccaggcccccagactgctgatctacggcgcttctaccagagccaccggcatccccgatagattcagcggctctggctccggcaccgacttcaccctgacaatcggcagactggaacccgaggacctggccgtgtactactgccagcagtacggcaccagcccctacacattcggccagggcaccaagctggaaatcggcggaggcggaagtggaggcggaggatctggcggcggaggctctctggaacagagcggagccgaagtgaagaaacccggcagcagcgtgcaggtgtcctgcaaagcaagcggcggcaccttctctatgtacggcttcaactgggtgcgccaggctcctggacacggcctggaatggatgggcggcatcatccccatcttcggcacctccaactacgcccagaaattccggggcagagtgaccttcaccgccgaccaggccacaagcaccgcctacatggaactgaccaacctgcggagcgacgacaccgccgtgtattattgcgccagagacttcggccccgactgggaggatggcgacagctacgatggcagcggcagaggcttcttcgacttctggggccagggaacccttgtgaccgtgtcctcaacgcgtggaatgaggactgaggatcttcccaaagctgtcgtctttctcgaaccccaatggtatcgggtgctcgaaaaagactctgtgacactgaaatgccaaggggcctactctcccgaggacaactccacacagtggtttcataatgagtccctcatcagctctcaggccagctcttatttcattgatgccgctacagtggacgactccggcgagtatcggtgtcagaccaatctgtctacactgtctgaccccgtgcagcttgaggtccacattggatggttgctcttgcaagccccacgctgggttttcaaagaggaagatccaatccatctgcggtgccacagctggaaaaacaccgctctccacaaagtcacatacctgcaaaatggcaaaggacgcaaatacttccatcacaattccgatttttacattccgaaggctaccctgaaagacagcggcagctatttctgccggggactcgtcggctccaagaatgtgtcctccgaaaccgtgaatatcacgattacccaaggactggctgtgcctacaatctctagcttctttccgcctggataccaagtctccttctgtcttgtgatggtcctcctgtttgctgtggacacaggactgtacttttacgtg

SEQ ID NO: 2012 - DNA, 1398 bp, synthetic construct
  source 1..1398: mol_type = other DNA
atggccttaccagtgaccgccttgctcctgccgctggccttgctgctccacgccgccaggccggacatccagatgacccagagccccagcagcctgtctgccagcgtgggcgacagagtgaccatcacctgtcaggccagccaggacatcaacaactacctgaactggtatcagcagaagcccggcaaggcccccaagctgctgatctacgacgccagcaatctgcagaccggcgtgcccagcagattttccggctctggcagcggcaccgacttcaccttcaccatcgaggacattgccacctactactgccagcagtacaccttcggccctggcaccaaggtggacatcaaaggcggaggcggaagtggaggcggaggatctggcggcggaggctctgaagtgcaactgctggaatctggcggcggactggtgcagcctggcggatctctgagactgagctgtgccgccagcggcttcacctttagctggtacagcatgacctgggtgcgccaggcccctggcaaaggactggaatgggtgtccagcatcgtgccctggggcgatttcacccagtacgccgatagcgtgaagggccggttcaccatcagccgggacaacagcaagaacaccctgtacctgcagatgaacagcctgcgggccgaggacaccgccgtgtactattgtgccaagggacctggctggggcagcttcgatctgtggggcagaggaacccttgtgaccgtgtccagcacgcgtggaatgaggactgaggatcttcccaaagctgtcgtctttctcgaaccccaatggtatcgggtgctcgaaaaagactctgtgacactgaaatgccaaggggcctactctcccgaggacaactccacacagtggtttcataatgagtccctcatcagctctcaggccagctcttatttcattgatgccgctacagtggacgactccggcgagtatcggtgtcagaccaatctgtctacactgtctgaccccgtgcagcttgaggtccacattggatggttgctcttgcaagccccacgctgggttttcaaagaggaagatccaatccatctgcggtgccacagctggaaaaacaccgctctccacaaagtcacatacctgcaaaatggcaaaggacgcaaatacttccatcacaattccgatttttacattccgaaggctaccctgaaagacagcggcagctatttctgccggggactcgtcggctccaagaatgtgtcctccgaaaccgtgaatatcacgattacccaaggactggctgtgcctacaatctctagcttctttccgcctggataccaagtctccttctgtcttgtgatggtcctcctgtttgctgtggacacaggactgtacttttacgtg

SEQ ID NO: 2013 - DNA, 1428 bp, synthetic construct
  source 1..1428: mol_type = other DNA
atggccttaccagtgaccgccttgctcctgccgctggccttgctgctccacgccgccaggccggacatccagatgacccagagccccagcagcctgtctgccagcgtgggcgacagagtgaccatcacctgtaccgccagcctgagcgtgtccagcacctacctgcactggtatcagcagaagcccggcagcagccccaagctgtggatctacagcaccagcaacctggcctccggcgtgcccagcagattttctggcagcggctctggcaccagctacaccctgaccatcagctccctccagcccgaggacttcgccacctactactgccaccagtaccacagaagccccctgacctttggcggaggcaccaaggtggaaatcaagagaggcggaggcggaagtggaggcggaggatctggcggcggaggctctgaagtgcaactggtggaatctggcggcggactggtgcagcctggcggatctctgagactgagctgtgccgccagcggcttcagcctgaccaaatacggcgtgcactgggtgcgccaggcccctggaaaaggactggaatgggtgggagtgaagtgggctggcggctccaccgactacaacagcgccctgatgagccggttcaccatcagcaaggacaacgccaagaacagcctgtacctccagatgaactccctgcgggccgaggacaccgccgtgtactactgtgccagagatcaccgggacgctatggactactggggccagggaacactcgtgaccgtgtcctctacgcgtggaatgaggactgaggatcttcccaaagctgtcgtctttctcgaaccccaatggtatcgggtgctcgaaaaagactctgtgacactgaaatgccaaggggcctactctcccgaggacaactccacacagtggtttcataatgagtccctcatcagctctcaggccagctcttatttcattgatgccgctacagtggacgactccggcgagtatcggtgtcagaccaatctgtctacactgtctgaccccgtgcagcttgaggtccacattggatggttgctcttgcaagccccacgctgggttttcaaagaggaagatccaatccatctgcggtgccacagctggaaaaacaccgctctccacaaagtcacatacctgcaaaatggcaaaggacgcaaatacttccatcacaattccgatttttacattccgaaggctaccctgaaagacagcggcagctatttctgccggggactcgtcggctccaagaatgtgtcctccgaaaccgtgaatatcacgattacccaaggactggctgtgcctacaatctctagcttctttccgcctggataccaagtctccttctgtcttgtgatggtcctcctgtttgctgtggacacaggactgtacttttacgtg

SEQ ID NO: 2014 - DNA, 1440 bp, synthetic construct
  source 1..1440: mol_type = other DNA
atggccttaccagtgaccgccttgctcctgccgctggccttgctgctccacgccgccaggccggacatccagatgacccagagccccagcagcctgtctgccagcgtgggcgacagagtgaccatcacatgcaaggccagccaggacgtgggaacagccgtggcctggtatcagcagaagcctggcaaggcccccaagctgctgatctacagcgccagctacagatccaccggcgtgcccagcagattttccggctctggcagcggcaccgacttcaccctgaccatctctagcctccagcccgaggacttcgccacctactactgccagcaccactactccgccccctggacatttggcggaggcaccaaggtggaaatcaagggcggaggcggaagtggaggcggaggatctggcggcggaggctctgaagtgcaactggtggaatcaggcggcggactggtgcagcctggcggatctctgagactgagctgtgccgccagcggcttcaccttcagcagaaacggcatgagctgggtgcgccaggcccctggaaaaggactggaatgggtggcaaccgtgtccagcggcggcagctacatctactacgccgacagcgtgaagggccggttcaccatctccagagacaacgccaagaacagcctgtacctccagatgaactccctgcgggccgaggacaccgccgtgtactattgtgccagacagggcaccaccgccctggctaccagattcttcgatgtgtggggccagggcaccctcgtgaccgtgtcatctacgcgtggaatgaggactgaggatcttcccaaagctgtcgtctttctcgaaccccaatggtatcgggtgctcgaaaaagactctgtgacactgaaatgccaaggggcctactctcccgaggacaactccacacagtggtttcataatgagtccctcatcagctctcaggccagctcttatttcattgatgccgctacagtggacgactccggcgagtatcggtgtcagaccaatctgtctacactgtctgaccccgtgcagcttgaggtccacattggatggttgctcttgcaagccccacgctgggttttcaaagaggaagatccaatccatctgcggtgccacagctggaaaaacaccgctctccacaaagtcacatacctgcaaaatggcaaaggacgcaaatacttccatcacaattccgatttttacattccgaaggctaccctgaaagacagcggcagctatttctgccggggactcgtcggctccaagaatgtgtcctccgaaaccgtgaatatcacgattacccaaggactggctgtgcctacaatctctagcttctttccgcctggataccaagtctccttctgtcttgtgatggtcctcctgtttgctgtggacacaggactgtacttttacgtg

SEQ ID NO: 2015 - DNA, 1428 bp, synthetic construct
  source 1..1428: mol_type = other DNA
atggccttaccagtgaccgccttgctcctgccgctggccttgctgctccacgccgccaggccggacatccagatgacccagagcttcagcagcctgagcgccagcgtgggcgacagagtgaccatcacctgtagagccagccaggacatcagcaactacctgaactggtatcagcagaagcccggcaaggcccccaagctgctgatctactacaccagcagactgcacagcggcgtgcccagcagattttctggcagcggctccggcaccgactacaccctgacaatcagctccctgcagcccgaggacttcgctacctacttctgtcagcaaggcaacaccctgccctggacctttggcggaggcaccaagctggaaatcaagagaggcggaggcggaagtggaggcggaggatctggcggcggaggctctgaagtgcaactggtgcagtccggcggagggctggtgcagagcggaggatctctgagactgagctgcagagccagcggctacaccttcacccggtactggatgctgtgggtgcgccagaggccaggcaagggactggaatgggtggccgagatcaacccccggaacgaccggaccaactacaacgagaagttcaagacccggttcaccatcagcgtggacagaagcaagaacaccctgtacctgcagatggacagcctgcgggccgaggataccgccgtgtacttttgtgctctgggaggcggctacgctatggactactggggccagggaacccttgtgaccgtgtcctctacgcgtggaatgaggactgaggatcttcccaaagctgtcgtctttctcgaaccccaatggtatcgggtgctcgaaaaagactctgtgacactgaaatgccaaggggcctactctcccgaggacaactccacacagtggtttcataatgagtccctcatcagctctcaggccagctcttatttcattgatgccgctacagtggacgactccggcgagtatcggtgtcagaccaatctgtctacactgtctgaccccgtgcagcttgaggtccacattggatggttgctcttgcaagccccacgctgggttttcaaagaggaagatccaatccatctgcggtgccacagctggaaaaacaccgctctccacaaagtcacatacctgcaaaatggcaaaggacgcaaatacttccatcacaattccgatttttacattccgaaggctaccctgaaagacagcggcagctatttctgccggggactcgtcggctccaagaatgtgtcctccgaaaccgtgaatatcacgattacccaaggactggctgtgcctacaatctctagcttctttccgcctggataccaagtctccttctgtcttgtgatggtcctcctgtttgctgtggacacaggactgtacttttacgtg

SEQ ID NO: 2016 - DNA, 1428 bp, synthetic construct
  source 1..1428: mol_type = other DNA
atggccttaccagtgaccgccttgctcctgccgctggccttgctgctccacgccgccaggccggacatccagatgacccagagcccccctagcctgtctgcctctgtgggcggcaaagtgaccatcacatgcaaggccagccaggacatcgaccgctacatggcctggtatcaggacaagcccggcaagggacccaagctgctgatccacgataccagcaccctccagcccggcatccccagcagattttctggcagcggctccggcagagactacagcttcagcatcagcaacctggaacccgaggacattgccacctactactgcctccagtacgacaacctgtggaccttcggcggaggcaccaagctggaaatcaagagaggcggaggcggaagtggaggcggaggatctggcggcggaggctctcaggtgcaactggtgcagagcggagccgagcttgtgaagcctggcgcttccgtgaagatgagctgcaaagccagcggctacatcttcaccaactacaacatccactgggtcaagaagtccccaggccagggcctggaatggatcggagccatctaccccggaaacggcgacgccccttacagccagaagttccaggacagagccaccctgaccgccgacaccagcagcagcaccacctacatggaactgagcagcctgaccagcgaggacagcgccgtgtactattgcgtgcgggccaactgggatgtggccttcgcctattggggccagggcacactggtgtccgtgtcctctacgcgtggaatgaggactgaggatcttcccaaagctgtcgtctttctcgaaccccaatggtatcgggtgctcgaaaaagactctgtgacactgaaatgccaaggggcctactctcccgaggacaactccacacagtggtttcataatgagtccctcatcagctctcaggccagctcttatttcattgatgccgctacagtggacgactccggcgagtatcggtgtcagaccaatctgtctacactgtctgaccccgtgcagcttgaggtccacattggatggttgctcttgcaagccccacgctgggttttcaaagaggaagatccaatccatctgcggtgccacagctggaaaaacaccgctctccacaaagtcacatacctgcaaaatggcaaaggacgcaaatacttccatcacaattccgatttttacattccgaaggctaccctgaaagacagcggcagctatttctgccggggactcgtcggctccaagaatgtgtcctccgaaaccgtgaatatcacgattacccaaggactggctgtgcctacaatctctagcttctttccgcctggataccaagtctccttctgtcttgtgatggtcctcctgtttgctgtggacacaggactgtacttttacgtg

SEQ ID NO: 2017 - DNA, 1431 bp, synthetic construct
  source 1..1431: mol_type = other DNA
atggccttaccagtgaccgccttgctcctgccgctggccttgctgctccacgccgccaggccggacatccagatgacccagagccctgccagcctgtctgcctctgtgggcgagacagtgaccatcacctgtcgggtgtccggcaacatccacaactacctggcctggtatcagcagaagcagggcaagagcccccaactgctggtgtacaacgccaagaccctggccgatggcgtgcccagcagattttctggctctggcagcggcacccagtacagcctgaagatcaacagcctccagcccgaggacttcggcagctactactgccagcacttctggtccaacccctacaccttcggcggaggcaccaagctggaaatcaagggcggaggcggaagtggaggcggaggatctggcggcggaggctctcaggtgcaactccagcagtctggcgcttccgtgaaggtgtcctgcaaggccagcgaactcgtgcggcctggcacaggctacgccttcaccaattacctgatcgagtgggtcaagcagaggcccggacagggcctggaatggatcggagtgattaacccaggcagcggcggcaccaactacaacgagaagttcaagggcaaggccaccctgaccgccgacaagagcagcagcacagcctacatgcaactgagcagcctgaccagcgacgacagcgccgtgtacttctgcgcccggtacagaagctacgactggtacttcgacgtgtggggagccggcaccaccgtgacagtgtcatctacgcgtggaatgaggactgaggatcttcccaaagctgtcgtctttctcgaaccccaatggtatcgggtgctcgaaaaagactctgtgacactgaaatgccaaggggcctactctcccgaggacaactccacacagtggtttcataatgagtccctcatcagctctcaggccagctcttatttcattgatgccgctacagtggacgactccggcgagtatcggtgtcagaccaatctgtctacactgtctgaccccgtgcagcttgaggtccacattggatggttgctcttgcaagccccacgctgggttttcaaagaggaagatccaatccatctgcggtgccacagctggaaaaacaccgctctccacaaagtcacatacctgcaaaatggcaaaggacgcaaatacttccatcacaattccgatttttacattccgaaggctaccctgaaagacagcggcagctatttctgccggggactcgtcggctccaagaatgtgtcctccgaaaccgtgaatatcacgattacccaaggactggctgtgcctacaatctctagcttctttccgcctggataccaagtctccttctgtcttgtgatggtcctcctgtttgctgtggacacaggactgtacttttacgtg

SEQ ID NO: 2018 - DNA, 1431 bp, synthetic construct
  source 1..1431: mol_type = other DNA
atggccttaccagtgaccgccttgctcctgccgctggccttgctgctccacgccgccaggccggacatccagatgacacagtctccggcgtcactgtccgcctccgtgggggagactgtgactattatttgtagggcatcagttaacatctactcttatttggcctggtaccagcagaagcaaggcaagagtcctcagctgctggtgtataatgcgaagatcctggcagagggcgtgccgagccggttctccggcagcggctcaggtacccaattttccctcaagatcaattcactgcagccagaggactttggcagttactattgtcaacaccactacggcacattcactttcgggtccggtacaaaattggagattaagcgaggcggaggcggaagtggaggcggaggatctggcggcggaggctctcaggtacagttgaaagaaagcgggcctggactggtagcgccttcccaatctctctccatcacgtgcaccatctctggcttctccctgacttcctatggagttcactgggtgaggcagccccccggcaagggactggaatggctggtcgtcatctggtccgacgggtccacaacctacaactccgctctgaaaagtcggctctctatttctaaagataatagcaagagccaggtgtttctgaaaatgaactctctgcagaccgatgatacggccatttactactgcgcttcacactatggctcaaccttggcattcgcttcctggggccacggaacactggtgaccgtttccgcagccacgcgtggaatgaggactgaggatcttcccaaagctgtcgtctttctcgaaccccaatggtatcgggtgctcgaaaaagactctgtgacactgaaatgccaaggggcctactctcccgaggacaactccacacagtggtttcataatgagtccctcatcagctctcaggccagctcttatttcattgatgccgctacagtggacgactccggcgagtatcggtgtcagaccaatctgtctacactgtctgaccccgtgcagcttgaggtccacattggatggttgctcttgcaagccccacgctgggttttcaaagaggaagatccaatccatctgcggtgccacagctggaaaaacaccgctctccacaaagtcacatacctgcaaaatggcaaaggacgcaaatacttccatcacaattccgatttttacattccgaaggctaccctgaaagacagcggcagctatttctgccggggactcgtcggctccaagaatgtgtcctccgaaaccgtgaatatcacgattacccaaggactggctgtgcctacaatctctagcttctttccgcctggataccaagtctccttctgtcttgtgatggtcctcctgtttgctgtggacacaggactgtacttttacgtg

SEQ ID NO: 2019 - DNA, 1455 bp, synthetic construct
  source 1..1455: mol_type = other DNA
atggccttaccagtgaccgccttgctcctgccgctggccttgctgctccacgccgccaggccggacattgtgatgacccagtctcacaaattcatgtccacatcagtaggagacagggtcagcgtcacctgcaaggccagtcagaatgtgggtaataatgtagcctggtatcaacagaaaccagggcaatctcctaaagtactgatttactcggcatcctaccggtacagtggagtccctgatcgcttcacaggcagtggatctgggacagatttcactctcaccatcagtaatgtgcagtctgaagacttggcagagtatttctgtcagcaatataacacctatccattcacgttcggctcggggacaaagttggaaataaaaggcggaggcggaagtggaggcggaggatctggcggcggaggctctgaggtacagctggaggaaagcggtggaggactggtgcaacctggagggtctatgaagctctcttgcgtagcttctgggttcacgttctccaattactggatgaactgggtgcggcagtcccccgagaaaggcctggaatgggtagcagaaattcggttcaagtcccataactatgctacacactttgccgagtctgtcaaaggccggttcactattagtcgagacgacagcaagtcttcagtctacctgcagatgaataacttgcgggcagaggacacaggtatctactactgcaccaggagaatcggcaactccgactatgactggtggtactttgacgtctggggagcaggcaccagcgtgacggtgagttcagcctcaacgcgtggaatgaggactgaggatcttcccaaagctgtcgtctttctcgaaccccaatggtatcgggtgctcgaaaaagactctgtgacactgaaatgccaaggggcctactctcccgaggacaactccacacagtggtttcataatgagtccctcatcagctctcaggccagctcttatttcattgatgccgctacagtggacgactccggcgagtatcggtgtcagaccaatctgtctacactgtctgaccccgtgcagcttgaggtccacattggatggttgctcttgcaagccccacgctgggttttcaaagaggaagatccaatccatctgcggtgccacagctggaaaaacaccgctctccacaaagtcacatacctgcaaaatggcaaaggacgcaaatacttccatcacaattccgatttttacattccgaaggctaccctgaaagacagcggcagctatttctgccggggactcgtcggctccaagaatgtgtcctccgaaaccgtgaatatcacgattacccaaggactggctgtgcctacaatctctagcttctttccgcctggataccaagtctccttctgtcttgtgatggtcctcctgtttgctgtggacacaggactgtacttttacgtg

SEQ ID NO: 2020 - DNA, 1431 bp, synthetic construct
  source 1..1431: mol_type = other DNA
atggccttaccagtgaccgccttgctcctgccgctggccttgctgctccacgccgccaggccggacatccagatgacccagagcagcagcagcttcagcgtgtccctgggcgacagagtgaccatcacatgcaaggccagcgaggacatctacatccggctggcctggtatcagcagaagcccggcaacgcccccagactgctgattagcgccgccacctctctggaaaccggcatccccagcagattctccggctctggcagcggcgaggactacaccctgacaatcaccagcctccagaccgaggacgtggcaacctactactgccagcagtattggaccaccccctggacctttggcggaggcaccaagctggaaatcaagagaggcggaggcggaagtggaggcggaggatctggcggcggaggctctgatgtgcagctccaggaatctggccccggactcgtgaagcctagccagagcctgagcctgacatgcaccgtgaccggctacagcatcaccatcgactacacctggaactggatcagacagttccccggcaacaaactggaatggatgggctacatcacctacagcggcagcaccgactacaaccccagcctgaagtccagaagctccatcaccagagacacctctatgaaccagttcttcttgcagctgaacagcgtgaccaccgaggacaccgccacctactattgcgccagactgggcagaagatacgccctggactattggggccagggcaccagcgtgacagtgtcctctacgcgtggaatgaggactgaggatcttcccaaagctgtcgtctttctcgaaccccaatggtatcgggtgctcgaaaaagactctgtgacactgaaatgccaaggggcctactctcccgaggacaactccacacagtggtttcataatgagtccctcatcagctctcaggccagctcttatttcattgatgccgctacagtggacgactccggcgagtatcggtgtcagaccaatctgtctacactgtctgaccccgtgcagcttgaggtccacattggatggttgctcttgcaagccccacgctgggttttcaaagaggaagatccaatccatctgcggtgccacagctggaaaaacaccgctctccacaaagtcacatacctgcaaaatggcaaaggacgcaaatacttccatcacaattccgatttttacattccgaaggctaccctgaaagacagcggcagctatttctgccggggactcgtcggctccaagaatgtgtcctccgaaaccgtgaatatcacgattacccaaggactggctgtgcctacaatctctagcttctttccgcctggataccaagtctccttctgtcttgtgatggtcctcctgtttgctgtggacacaggactgtacttttacgtg

SEQ ID NO: 2021 - DNA, 1428 bp, synthetic construct
  source 1..1428: mol_type = other DNA
atggccttaccagtgaccgccttgctcctgccgctggccttgctgctccacgccgccaggccggatgtgcagctccaggaaagcggccctggcctcgtgaagcctagccagagcctgagcctgacatgcaccgtgaccggctacagcatcaccagcgactacacctggaactggatcagacagttccccggcaacaagctggaatggatgggctacatcacctacagcggcagcaccagctacaaccccagcctgaagtcccggaactccatcaccagagacaccagcaagaaccagttcttcttgcagctgaacagcgtgaccaccgaggacaccgccacctactactgcgccagactgggcagacggtacaccatggactattggggccagggcacctccgtgaccgtgtctagcggaggcggaggaagtggcggcggaggatctgggggaggcggaagcgatatccagatgacccagtccagcagcagcttcagcgtgtccctgggcgacagagtgaccatcacctgtatggcctccgaggacatctacatccggctggcctggtatcagcagaagcccggcaacgcccccagactgctgattagcgccgccacctctctggaaaccggcgtgccaagcagattcagcggctctggcagcggcaaggactacaccctgagcatcacctccttgcagaccgaggacgtgggcacctactattgccagcagtattggagcagcccctggacctttggcggaggcacaaagctggaaatcaacacgcgtggaatgaggactgaggatcttcccaaagctgtcgtctttctcgaaccccaatggtatcgggtgctcgaaaaagactctgtgacactgaaatgccaaggggcctactctcccgaggacaactccacacagtggtttcataatgagtccctcatcagctctcaggccagctcttatttcattgatgccgctacagtggacgactccggcgagtatcggtgtcagaccaatctgtctacactgtctgaccccgtgcagcttgaggtccacattggatggttgctcttgcaagccccacgctgggttttcaaagaggaagatccaatccatctgcggtgccacagctggaaaaacaccgctctccacaaagtcacatacctgcaaaatggcaaaggacgcaaatacttccatcacaattccgatttttacattccgaaggctaccctgaaagacagcggcagctatttctgccggggactcgtcggctccaagaatgtgtcctccgaaaccgtgaatatcacgattacccaaggactggctgtgcctacaatctctagcttctttccgcctggataccaagtctccttctgtcttgtgatggtcctcctgtttgctgtggacacaggactgtacttttacgtg

SEQ ID NO: 2022 - DNA, 1428 bp, synthetic construct
  source 1..1428: mol_type = other DNA
atggccttaccagtgaccgccttgctcctgccgctggccttgctgctccacgccgccaggccggacatccagatgacccagagcagcagcagcttcagcgtgagcctgggcgacagagtgaccatcacctgcatggccagcgaggacatctacatcagactggcctggtaccagcagaagcccggcaacgcccccagactgctgatcagcgccgccaccagcctggagaccggcgtgcccagcagattcagcggcagcggcagcggcaaggactacaccctgagcatcaccagcctgcagaccgaggacgtgggcacctactactgccagcagtactggagcagcccctggaccttcggcggcggcaccaagctggagatcaacggcggaggcggaagtggaggcggaggatctggcggcggaggctctgacgtgcagctgcaggagagcggccccggcctggtgaagcccagccagagcctgagcctgacctgcaccgtgaccggctacagcatcaccagcgactacacctggaactggatcagacagttccccggcaacaagctggagtggatgggctacatcacctacagcggcagcaccagctacaaccccagcctgaagagcagaaacagcatcaccagagacaccagcaagaaccagttcttcctgcagctgaacagcgtgaccaccgaggacaccgccacctactactgcgccagactgggcagaagatacacaatggactactggggccagggcaccagcgtgaccgtgagcagcacgcgtggaatgaggactgaggatcttcccaaagctgtcgtctttctcgaaccccaatggtatcgggtgctcgaaaaagactctgtgacactgaaatgccaaggggcctactctcccgaggacaactccacacagtggtttcataatgagtccctcatcagctctcaggccagctcttatttcattgatgccgctacagtggacgactccggcgagtatcggtgtcagaccaatctgtctacactgtctgaccccgtgcagcttgaggtccacattggatggttgctcttgcaagccccacgctgggttttcaaagaggaagatccaatccatctgcggtgccacagctggaaaaacaccgctctccacaaagtcacatacctgcaaaatggcaaaggacgcaaatacttccatcacaattccgatttttacattccgaaggctaccctgaaagacagcggcagctatttctgccggggactcgtcggctccaagaatgtgtcctccgaaaccgtgaatatcacgattacccaaggactggctgtgcctacaatctctagcttctttccgcctggataccaagtctccttctgtcttgtgatggtcctcctgtttgctgtggacacaggactgtacttttacgtg

SEQ ID NO: 2023 - DNA, 1434 bp, synthetic construct
  source 1..1434: mol_type = other DNA
atggccttaccagtgaccgccttgctcctgccgctggccttgctgctccacgccgccaggccggaccagatcgtgctgacccagtcccccgctattatgtccgcatcaccgggcgaaaaagtgacgatctcctgtagcgcttcatctagcgtctcctacatgtattggtatcaacagaaacctgggtctagcccaaagccgtggatctacagaaccagtaaccttgccagtggggtgccagcccgcttcagcggtagtggcagtggaacttcctatagcctcacaataagcaacatggaggctgaagatgccgctgcctattactgccagcagtaccacagttacccaaccacgttcggcgggggaactaagctcgaagtaaaaggcggaggcggaagtggaggcggaggatctggcggcggaggctctgaggtgcagctggtggaatctgggggcggcctggtccaacctaagggatcactcaagctctcttgtgcggccagcggattctctttcaatacctatgctatgaattgggtgagacaggcgcccggaaagggcctcgaatggatagcccatatccggtcaaaatcaaacaatttcgcaacctactatgcggactccgtgaaggaccgattttccatctcccgagatgcctccgagaatattctgttcctgcagatgaataacctcaagacagaggacaccgccatgtactactgtgtgcgccagggcggtgactttcccatggattactgggggcaggggaccagcgtgaccgtgagctctacgcgtggaatgaggactgaggatcttcccaaagctgtcgtctttctcgaaccccaatggtatcgggtgctcgaaaaagactctgtgacactgaaatgccaaggggcctactctcccgaggacaactccacacagtggtttcataatgagtccctcatcagctctcaggccagctcttatttcattgatgccgctacagtggacgactccggcgagtatcggtgtcagaccaatctgtctacactgtctgaccccgtgcagcttgaggtccacattggatggttgctcttgcaagccccacgctgggttttcaaagaggaagatccaatccatctgcggtgccacagctggaaaaacaccgctctccacaaagtcacatacctgcaaaatggcaaaggacgcaaatacttccatcacaattccgatttttacattccgaaggctaccctgaaagacagcggcagctatttctgccggggactcgtcggctccaagaatgtgtcctccgaaaccgtgaatatcacgattacccaaggactggctgtgcctacaatctctagcttctttccgcctggataccaagtctccttctgtcttgtgatggtcctcctgtttgctgtggacacaggactgtacttttacgtg

SEQ ID NO: 2024 - DNA, 1437 bp, synthetic construct
  source 1..1437: mol_type = other DNA
atggccttaccagtgaccgccttgctcctgccgctggccttgctgctccacgccgccaggccggacatccagatgacccagagccccagcagcctgtctgccagcgtgggcgacagagtgaccatcacctgtagagccagccagagcatcagcagctacctgaactggtatcagcagaagcccggcaaggcccccaaactgctgatctacgacgccagcaacctggaaaccggcgtgcccagcagattttccggcagcggctctggcaccgacttcaccttcaccatcagctccctccagcccgaggacattgccacctactactgccagcagtacgacaacctgcccctgacctttggcggaggcaccaaggtggacatcaagagaggcggaggcggaagtggaggcggaggatctggcggcggaggctctcaggtgcaactggtggaatctggcggcggagtggtgcagcctggcagaagcctgagactgagctgtgccgccagcggcttcacctttagcagctacgccatgcactgggtgcgccaggcccctggaaaaggcctggaatgggtggccgtgatctcctacgacggctccaacaagtattacgccgacagcgtgaagggccggttcaccatctccagagacaacagcaagaacaccctgtacctccagatgaacagcctgcgggccgaggacaccgccgtgtactattgtgccagggctcacaacagcagctcttggagcttcgactactggggccagggcaccctcgtgaccgtgtcatctacgcgtggaatgaggactgaggatcttcccaaagctgtcgtctttctcgaaccccaatggtatcgggtgctcgaaaaagactctgtgacactgaaatgccaaggggcctactctcccgaggacaactccacacagtggtttcataatgagtccctcatcagctctcaggccagctcttatttcattgatgccgctacagtggacgactccggcgagtatcggtgtcagaccaatctgtctacactgtctgaccccgtgcagcttgaggtccacattggatggttgctcttgcaagccccacgctgggttttcaaagaggaagatccaatccatctgcggtgccacagctggaaaaacaccgctctccacaaagtcacatacctgcaaaatggcaaaggacgcaaatacttccatcacaattccgatttttacattccgaaggctaccctgaaagacagcggcagctatttctgccggggactcgtcggctccaagaatgtgtcctccgaaaccgtgaatatcacgattacccaaggactggctgtgcctacaatctctagcttctttccgcctggataccaagtctccttctgtcttgtgatggtcctcctgtttgctgtggacacaggactgtacttttacgtg

SEQ ID NO: 2025 - DNA, 1464 bp, synthetic construct
  source 1..1464: mol_type = other DNA
atggccttaccagtgaccgccttgctcctgccgctggccttgctgctccacgccgccaggccggacgtcgtgatgacccagagccctctgagcctgcctgtgtccctgggcgatcaggccagcatctcctgcagatccagccagagactggtgcacagcaacggcaacacctacctgcactggtatctgcagaagcccggccagagccccaagctgctgatctaccgggtgtccaacagattccccggcgtgcccgatagattcagcggctctggcagcggcaccgacttcaccctgaagatcagccgggtggaagccgaggacctgggcatctatttctgcagccagagcacccacgtgccctacacctttggcggaggcaccaagctggaaatcaagcggggcggaggcggaagtggaggcggaggatctggcggcggaggctctgaagtgcggctgcagcagtctggccccgacctgattaagcctggggccagcgtgaagatgagctgcaaggccagcggctacaccttcaccggctacgtgatgcactgggtcaagcagaggccaggccagggcctggaatggatcggcttcatcaacccctacaacgacgacatccagagcaacgagcggttccggggcaaggccaccctgaccagcgataagagcagcaccaccgcctacatggaactgagcagcctgacctccgaggacagcgccgtgtactactgtgctaggggagccggctacaacttcgacggggcctacagattcttcgacttttggggccagggcaccacactgaccgtgtcctctacgcgtggaatgaggactgaggatcttcccaaagctgtcgtctttctcgaaccccaatggtatcgggtgctcgaaaaagactctgtgacactgaaatgccaaggggcctactctcccgaggacaactccacacagtggtttcataatgagtccctcatcagctctcaggccagctcttatttcattgatgccgctacagtggacgactccggcgagtatcggtgtcagaccaatctgtctacactgtctgaccccgtgcagcttgaggtccacattggatggttgctcttgcaagccccacgctgggttttcaaagaggaagatccaatccatctgcggtgccacagctggaaaaacaccgctctccacaaagtcacatacctgcaaaatggcaaaggacgcaaatacttccatcacaattccgatttttacattccgaaggctaccctgaaagacagcggcagctatttctgccggggactcgtcggctccaagaatgtgtcctccgaaaccgtgaatatcacgattacccaaggactggctgtgcctacaatctctagcttctttccgcctggataccaagtctccttctgtcttgtgatggtcctcctgtttgctgtggacacaggactgtacttttacgtg

SEQ ID NO: 2026 - DNA, 1437 bp, synthetic construct
  source 1..1437: mol_type = other DNA
atggccttaccagtgaccgccttgctcctgccgctggccttgctgctccacgccgccaggccgagctacgagctgacccagcctcctagcgtgtccgtgtctcctggacagaccgccaccatctcttgcagcggcgatcaactgggcgggaagtacggccactggtatcagaagaagcccggccagagccccgtgctggtgctgtaccaggacagaaaacggcctgccggcatccccgagagattcagcggaagcagcagcggcaacaccatcaccctgaccatcagcggcacccaggccgtggatgaggccgactactactgccaggcttgggacaccaatctgggcggcgtgttcggcggaggcaccaaagtgacagtgctgggacagggcggaggcggaagtggaggcggaggatctggcggcggaggctctcaggtgcaactggtggaaagcggagccgaagtgaagaaacctggggccagcgtgaaggtgtcctgcaaggccagcggctacacctttaccggctactacatgcactgggtgcgccaggctccaggccagggactggaatggatgggccggatcaaccccaatagcggcggcaccaactacgcccagaaattccagggcagagtgaccatgaccagagacaccagcatcagcaccgcctacatggaactgagccggctgagaagcgacgacaccgccgtgtactactgcgccagccctagaggcagaggcagcgccttcgatatttggggccagggcacactcgtgaccgtgtcctctacgcgtggaatgaggactgaggatcttcccaaagctgtcgtctttctcgaaccccaatggtatcgggtgctcgaaaaagactctgtgacactgaaatgccaaggggcctactctcccgaggacaactccacacagtggtttcataatgagtccctcatcagctctcaggccagctcttatttcattgatgccgctacagtggacgactccggcgagtatcggtgtcagaccaatctgtctacactgtctgaccccgtgcagcttgaggtccacattggatggttgctcttgcaagccccacgctgggttttcaaagaggaagatccaatccatctgcggtgccacagctggaaaaacaccgctctccacaaagtcacatacctgcaaaatggcaaaggacgcaaatacttccatcacaattccgatttttacattccgaaggctaccctgaaagacagcggcagctatttctgccggggactcgtcggctccaagaatgtgtcctccgaaaccgtgaatatcacgattacccaaggactggctgtgcctacaatctctagcttctttccgcctggataccaagtctccttctgtcttgtgatggtcctcctgtttgctgtggacacaggactgtacttttacgtg

SEQ ID NO: 2027 - DNA, 1446 bp, synthetic construct
  source 1..1446: mol_type = other DNA
atggccttaccagtgaccgccttgctcctgccgctggccttgctgctccacgccgccaggccgaacttcatgctgacccagccccacagcgtgtccgagagccctggcaagaccgtgaccatctcctgcaccagaagcagcggctctatcgccagcaaatacgtgcagtggtatcagcagaggcccggcagcagccctaccaccgtgatctacgaggacaaccagaggcctagcggcgtgcccgatagattcagcggcagcatcgacaccagcagcaacagcgccagcctgaccatcagcggcctgagaacagaggacgaggccgactactactgccacagctacgacagcaacaaccactccgtgttcggcggaggcaccaaagtgacagtgctgggacagggcggaggcggaagtggaggcggaggatctggcggcggaggctctgaagtgcaactggtggaaagcgggggaggcgtggtgcagccaggcggatctctgagactgagctgtgccgccagcggcttcaccttcagcagctacgccatgagctgggtgcgccaggcccctggaaaaggcctggaatgggtgtccgccatctctggctctggcggcagcacctactacgccgatagcgtgaagggccggttcagcatcagccgggacaacagcaagaacaccctgtacctccagatgaacagcctgcgggccgaggacaccgccgtgtactactgtgccagaaccagaagctccggggccttcgacatctggggccagggaacactcgtgaccgtgtcctctacgcgtggaatgaggactgaggatcttcccaaagctgtcgtctttctcgaaccccaatggtatcgggtgctcgaaaaagactctgtgacactgaaatgccaaggggcctactctcccgaggacaactccacacagtggtttcataatgagtccctcatcagctctcaggccagctcttatttcattgatgccgctacagtggacgactccggcgagtatcggtgtcagaccaatctgtctacactgtctgaccccgtgcagcttgaggtccacattggatggttgctcttgcaagccccacgctgggttttcaaagaggaagatccaatccatctgcggtgccacagctggaaaaacaccgctctccacaaagtcacatacctgcaaaatggcaaaggacgcaaatacttccatcacaattccgatttttacattccgaaggctaccctgaaagacagcggcagctatttctgccggggactcgtcggctccaagaatgtgtcctccgaaaccgtgaatatcacgattacccaaggactggctgtgcctacaatctctagcttctttccgcctggataccaagtctccttctgtcttgtgatggtcctcctgtttgctgtggacacaggactgtacttttacgtg

SEQ ID NO: 2028 - DNA, 1434 bp, synthetic construct
  source 1..1434: mol_type = other DNA
atggccttaccagtgaccgccttgctcctgccgctggccttgctgctccacgccgccaggccggacatccagatgaaccagagccccagcagcctgagcgccagcctgggcgataccatcaccatcacctgtcacgccagccagaacatcaacgtgtggctgagctggtatcagcagaagcccggcaacatccccaagctgctgatctacaaggccagcaacctgcacaccggcgtgcccagcagattttctggcagcggctctggcaccggcttcaccattaccatcagctccctccagcccgaggacattgccacctactactgccagcagggccagagctacccctggacatttggcggaggcaccaagctggaaatcaagagaggcggaggcggaagtggaggcggaggatctggcggcggaggctctgaagtgcaactccagcagagcggcccagagcttgtgaagcctggcgcttccgtgaagattagctgcaaagccagcggctacagcttcaccggctacttcatgaactgggtcaagcagagccacggcaagagcctggagtacatcggcagattcaacccctacaacggcgagacactgtacaaccagaagttcaagggcaaggccaccctgaccgtggacaagagcagcagcaccgtgcacatggaactgctgagcgtgaccagcgaggacagcgccgtgtactactgtggcagaagcggcaacgacgacgctatggactattggggccagggcaccagcgtgaccgtgtctagtgctacgcgtggaatgaggactgaggatcttcccaaagctgtcgtctttctcgaaccccaatggtatcgggtgctcgaaaaagactctgtgacactgaaatgccaaggggcctactctcccgaggacaactccacacagtggtttcataatgagtccctcatcagctctcaggccagctcttatttcattgatgccgctacagtggacgactccggcgagtatcggtgtcagaccaatctgtctacactgtctgaccccgtgcagcttgaggtccacattggatggttgctcttgcaagccccacgctgggttttcaaagaggaagatccaatccatctgcggtgccacagctggaaaaacaccgctctccacaaagtcacatacctgcaaaatggcaaaggacgcaaatacttccatcacaattccgatttttacattccgaaggctaccctgaaagacagcggcagctatttctgccggggactcgtcggctccaagaatgtgtcctccgaaaccgtgaatatcacgattacccaaggactggctgtgcctacaatctctagcttctttccgcctggataccaagtctccttctgtcttgtgatggtcctcctgtttgctgtggacacaggactgtacttttacgtg

SEQ ID NO: 2029 - DNA, 1425 bp, synthetic construct
  source 1..1425: mol_type = other DNA
atggccttaccagtgaccgccttgctcctgccgctggccttgctgctccacgccgccaggccggacatcctgctgacacagagccccgccatcctgtccgtgtctccaggcgagagagtgtcctttagctgccgggccagccagaacatcggcaccagcatccactggtatcagcagcggaccaacggcagccccagactgctgattaagtacgccagcgagtccgtgtccggcatccccagcagattttctggcagcggctccggcaccgacttcaccctgagcatcaacagcgtggaaagcgaggacattgccgactactactgccagcacaccaatagctggcccaccacctttggcggaggcaccaagctggaaatcaagagaggcggaggcggaagtggaggcggaggatctggcggcggaggctctcaggtgcaactccagcagtccgacgccgagcttgtgaagcctggcgcttccgtgaagattagctgcaaggccagcggctacaccttcaccgaccacgccattcactgggtcaagcagaagcccgagcagggcctggaatggatcggctacttcagccccggcaacggcgacatcaagtacaacgagaagttcaagggcaaggccaccctgaccgccgacaagagcagcagcacagcctacatgcaactgaacagcctgaccagcgaggactccgccgtgtacttctgcaagcggagctacggcaactacgactactggggccagggcaccacactgaccgtgtctagtacgcgtggaatgaggactgaggatcttcccaaagctgtcgtctttctcgaaccccaatggtatcgggtgctcgaaaaagactctgtgacactgaaatgccaaggggcctactctcccgaggacaactccacacagtggtttcataatgagtccctcatcagctctcaggccagctcttatttcattgatgccgctacagtggacgactccggcgagtatcggtgtcagaccaatctgtctacactgtctgaccccgtgcagcttgaggtccacattggatggttgctcttgcaagccccacgctgggttttcaaagaggaagatccaatccatctgcggtgccacagctggaaaaacaccgctctccacaaagtcacatacctgcaaaatggcaaaggacgcaaatacttccatcacaattccgatttttacattccgaaggctaccctgaaagacagcggcagctatttctgccggggactcgtcggctccaagaatgtgtcctccgaaaccgtgaatatcacgattacccaaggactggctgtgcctacaatctctagcttctttccgcctggataccaagtctccttctgtcttgtgatggtcctcctgtttgctgtggacacaggactgtacttttacgtg

SEQ ID NO: 2030 - DNA, 1440 bp, synthetic construct
  source 1..1440: mol_type = other DNA
atggccttaccagtgaccgccttgctcctgccgctggccttgctgctccacgccgccaggccggacatcgtgatgacccagagccccgatagcctggccgtgtctctgggagagagagccaccatcaactgcaagagcagccagagcctgctgaacagcggcgaccagaagaactacctgacctggtatcagcagaagcccggccagccccccaagctgctgatctactgggccagcaccagagaaagcggcgtgcccgatagattcagcggcagcggaagtggcaccgacttcaccctgaccatcagttctcttcaggccgaggacgtggccgtgtactactgccagaacgactacagctaccccctgaccttcggccagggcaccaaggtggaaatcaagggcggaggcggaagtggaggcggaggatctggcggcggaggctctcaggtgcagctggtgcagtctggggccgaagtgaagaaaaccggcagcagcgtgaaggtgtcctgcaaggccagcggctacacctttaccgaccacgccattcacgtgtggcggcaggctccaggacaggccctggaatggatgggccacttcagccccggcaacaccgacatcaagtacaacgacaagttcaagggcagagtgaccctgaccgtggaccgcagcatgagcaccgcctacatggaactgagcagcctgcggagcgaggacaccgccatgtactattgcaagaccagcaccttctttttcgactactggggccagggaacaatggtcaccgtgtccagcacgcgtggaatgaggactgaggatcttcccaaagctgtcgtctttctcgaaccccaatggtatcgggtgctcgaaaaagactctgtgacactgaaatgccaaggggcctactctcccgaggacaactccacacagtggtttcataatgagtccctcatcagctctcaggccagctcttatttcattgatgccgctacagtggacgactccggcgagtatcggtgtcagaccaatctgtctacactgtctgaccccgtgcagcttgaggtccacattggatggttgctcttgcaagccccacgctgggttttcaaagaggaagatccaatccatctgcggtgccacagctggaaaaacaccgctctccacaaagtcacatacctgcaaaatggcaaaggacgcaaatacttccatcacaattccgatttttacattccgaaggctaccctgaaagacagcggcagctatttctgccggggactcgtcggctccaagaatgtgtcctccgaaaccgtgaatatcacgattacccaaggactggctgtgcctacaatctctagcttctttccgcctggataccaagtctccttctgtcttgtgatggtcctcctgtttgctgtggacacaggactgtacttttacgtg

SEQ ID NO: 2031 - DNA, 1437 bp, synthetic construct
  source 1..1437: mol_type = other DNA
atggccttaccagtgaccgccttgctcctgccgctggccttgctgctccacgccgccaggccggacatccagatgacccagagccccagcagcctgtctgccagcgtgggcgacagagtgaccatcacatgcaaggccagccaggacgtgtccattgccgtggcctggtatcagcagaagcccggcaaggcccccaaggtgctgatctacagcgccagctacagatacaccggcgtgcccgacagattcagcggctctggcagcggcaccgacttcaccttcaccatcagctccctccagcccgaggatattgccgtgtactactgccagcagcactacatcacccccctgacctttggcggaggcaccaaggtggaaatcaagggcggaggcggaagtggaggcggaggatctggcggcggaggctctcagatccaactggtgcagagcggccacgaagtgaagaaacctggggccagcgtgaaggtgtcctgcaaagccagcggctacacctttaccaactacggcatgaactgggtgcgccaggcccctggacagggcctggaatggatgggctggatcaacaccaagaccggcgagcccacctacgccgaagagttcaagggcagattcgtgttcagcctggaaaccagcgcctccaccgcctacctccagatcagctctctgaaggccgaggacaccgccatgtacttttgcggcagaggcggctacggcagcagctactggtacttcgatgtgtggggccagggcaccaccgtgaccgtgtcatctacgcgtggaatgaggactgaggatcttcccaaagctgtcgtctttctcgaaccccaatggtatcgggtgctcgaaaaagactctgtgacactgaaatgccaaggggcctactctcccgaggacaactccacacagtggtttcataatgagtccctcatcagctctcaggccagctcttatttcattgatgccgctacagtggacgactccggcgagtatcggtgtcagaccaatctgtctacactgtctgaccccgtgcagcttgaggtccacattggatggttgctcttgcaagccccacgctgggttttcaaagaggaagatccaatccatctgcggtgccacagctggaaaaacaccgctctccacaaagtcacatacctgcaaaatggcaaaggacgcaaatacttccatcacaattccgatttttacattccgaaggctaccctgaaagacagcggcagctatttctgccggggactcgtcggctccaagaatgtgtcctccgaaaccgtgaatatcacgattacccaaggactggctgtgcctacaatctctagcttctttccgcctggataccaagtctccttctgtcttgtgatggtcctcctgtttgctgtggacacaggactgtacttttacgtg

SEQ ID NO: 2032 - DNA, 1446 bp, synthetic construct
  source 1..1446: mol_type = other DNA
atggccttaccagtgaccgccttgctcctgccgctggccttgctgctccacgccgccaggccgcaggctgtcgtgacacagcctcctagcgcctctggcacaccaggccagagagtgaccatctcctgtagcggcagcagcagcaacatcggcagcaacaccgtgaactggtatcagcaggtgcccggcaccgctcccaagctgctgatctacagcaacaaccagcggcccagcggcgtgcccgatagattttctggcagcaagagcggcaccagcgccagcctggctatctctggactccagtccgaggacgaggccgactactattgcgccgcctgggacgatagcctgaacggctgggtgttcggcggaggcaccaagctgacagtgctgggcggaggcggaagtggaggcggaggatctggcggcggaggctctcagatgcaactggtgcagagcggagccgaagtgaaagagcctggcgagagcctgcggatctcctgcaagggcagcggctacagcttcaccaatttctggatctcttgggtgcgccagatgcccggcaagggcctggaatggatgggcagagtggaccccggctactcctacagcacctacagccctagcttccagggccacgtgaccatcagcgccgacaagagcaccagcaccgcctacctccagtggaacagcctgaaggccagcgacaccgccatgtactactgcgccagagtgcagtacagcggctattacgattggttcgacccctggggccagggcacactcgtgacagtgtcaagcacgcgtggaatgaggactgaggatcttcccaaagctgtcgtctttctcgaaccccaatggtatcgggtgctcgaaaaagactctgtgacactgaaatgccaaggggcctactctcccgaggacaactccacacagtggtttcataatgagtccctcatcagctctcaggccagctcttatttcattgatgccgctacagtggacgactccggcgagtatcggtgtcagaccaatctgtctacactgtctgaccccgtgcagcttgaggtccacattggatggttgctcttgcaagccccacgctgggttttcaaagaggaagatccaatccatctgcggtgccacagctggaaaaacaccgctctccacaaagtcacatacctgcaaaatggcaaaggacgcaaatacttccatcacaattccgatttttacattccgaaggctaccctgaaagacagcggcagctatttctgccggggactcgtcggctccaagaatgtgtcctccgaaaccgtgaatatcacgattacccaaggactggctgtgcctacaatctctagcttctttccgcctggataccaagtctccttctgtcttgtgatggtcctcctgtttgctgtggacacaggactgtacttttacgtg

SEQ ID NO: 2033 - DNA, 1428 bp, synthetic construct
  source 1..1428: mol_type = other DNA
atggccttaccagtgaccgccttgctcctgccgctggccttgctgctccacgccgccaggccggacatccagatgacccagagccccagcacactgagcgccagcgtgggcgacagagtgaccatcacctgtcgggccagccagaacatcaacaagtggctggcctggtatcagcagaggcccggaaaagccccccagctgctgatctacaaggccagcagcctggaaagcggcgtgcccagcagattttctggcagcggctctggcaccgagtacaccctgaccatcagctccctccagcccgacgacttcgccacctactactgccagcagtacaacagctacgccaccttcggccagggcaccaaggtggaaatcaagagaggcggaggcggaagtggaggcggaggatctggcggcggaggctctcaggtgcagctggtgcagtctggggccgaagtgaagaagcctggcgagagcctgaagatcagctgcaagggctccggctacaacttctctaacaagtggatcggctgggtgcgccagctgcctggcagaggactggaatggatcgccatcatctaccccggctacagcgacatcacctacagccccagcttccagggccgcgtgacaatcagcgccgacaccagcatcaacaccgcctacctgcactggcacagcctgaaggccagcgacaccgccatgtactactgcgtgcggcatacagccctggctggcttcgattattggggcctgggcaccctcgtgaccgtgtctagtacgcgtggaatgaggactgaggatcttcccaaagctgtcgtctttctcgaaccccaatggtatcgggtgctcgaaaaagactctgtgacactgaaatgccaaggggcctactctcccgaggacaactccacacagtggtttcataatgagtccctcatcagctctcaggccagctcttatttcattgatgccgctacagtggacgactccggcgagtatcggtgtcagaccaatctgtctacactgtctgaccccgtgcagcttgaggtccacattggatggttgctcttgcaagccccacgctgggttttcaaagaggaagatccaatccatctgcggtgccacagctggaaaaacaccgctctccacaaagtcacatacctgcaaaatggcaaaggacgcaaatacttccatcacaattccgatttttacattccgaaggctaccctgaaagacagcggcagctatttctgccggggactcgtcggctccaagaatgtgtcctccgaaaccgtgaatatcacgattacccaaggactggctgtgcctacaatctctagcttctttccgcctggataccaagtctccttctgtcttgtgatggtcctcctgtttgctgtggacacaggactgtacttttacgtg

SEQ ID NO: 2034 - DNA, 1443 bp, synthetic construct
  source 1..1443: mol_type = other DNA
atggccttaccagtgaccgccttgctcctgccgctggccttgctgctccacgccgccaggccgcagagcgtcgtgacacagcctcctagcgtgtcagtggcccctggcaagaccgccagaatcacctgtggccggaacaacatcggcagcaagagcgtgcactggtatcagcagaagcccggccaggctcctgtgctggtggtgtacgacgacagcgacagacccagcggcatccccgagagattcagcggcagcaactccggcaataccgccaccctgaccatcagcagagtggaagccggcgacgaggccgactactactgccaagtgtgggacagcagcagcgatcacgtggtgtttggcggaggcaccaagctgacagtgctgggtggcggaggcggaagtggaggcggaggatctggcggcggaggctctgaagtgcaactggtgcagtctggcggaggggtcgtgcggcctggcggatctctgagactgtcttgtgccgccagcggcttcaccttcgacgactacggcatgagctgggtgcgccaggcccctggaaaaggcctggaatgggtgtccggcatcaactggaatggcggcagcaccggctacgccgattctgtgcggggcagattcaccatcagccgggacaacgccaagaacagcctgtacctgcagatgaactccctgcgggccgaggacaccgccctgtactattgcgccagagagcggggctacggctaccacgaccctcacgattattggggccagggcacccttgtcaccgtgtcctctacgcgtggaatgaggactgaggatcttcccaaagctgtcgtctttctcgaaccccaatggtatcgggtgctcgaaaaagactctgtgacactgaaatgccaaggggcctactctcccgaggacaactccacacagtggtttcataatgagtccctcatcagctctcaggccagctcttatttcattgatgccgctacagtggacgactccggcgagtatcggtgtcagaccaatctgtctacactgtctgaccccgtgcagcttgaggtccacattggatggttgctcttgcaagccccacgctgggttttcaaagaggaagatccaatccatctgcggtgccacagctggaaaaacaccgctctccacaaagtcacatacctgcaaaatggcaaaggacgcaaatacttccatcacaattccgatttttacattccgaaggctaccctgaaagacagcggcagctatttctgccggggactcgtcggctccaagaatgtgtcctccgaaaccgtgaatatcacgattacccaaggactggctgtgcctacaatctctagcttctttccgcctggataccaagtctccttctgtcttgtgatggtcctcctgtttgctgtggacacaggactgtacttttacgtg

SEQ ID NO: 2035 - DNA, 1440 bp, synthetic construct
  source 1..1440: mol_type = other DNA
atggccttaccagtgaccgccttgctcctgccgctggccttgctgctccacgccgccaggccggacatcgtgctgacacagagccctgcttctctggccgtgtctctgggacagagagccaccatcagctgtagagccagcgagagcgtggacaactacggcaacaccttcatgcactggtatcagcagaagcccggccagcctcctaagctgctgatctacagagccagcaacctggaaagcggcatccccgccagattttctggcagcggcagcagaaccgacttcaccctgaccatcaatcccgtggaagccgacgacgtggcaacctactactgccagcagagcaacgaggaccctcctacatttggagccggcaccaagctggaactgaaaggcggaggcggaagtggaggcggaggatctggcggcggaggctctcagattcagctggtgcagtctggccccgagctgaagaaacctggcgagacagtgaagatcagctgcaaggccagcggctacatcttcaccaattacggcatgaactgggtcaagcaggcccctggcaagagcttcaagtggatgggctggatcaacacctacaccggcgagagcacatacagcgccgacttcaagggcagattcgccttcagcctggaaaccagcgccagcacagcctacctgcacatcaacgacctgaagaacgaggacaccgccacctacttttgcgccagaagcggcggctacgaccctatggattattggggccagggcaccagcgtgaccgtttcttctacgcgtggaatgaggactgaggatcttcccaaagctgtcgtctttctcgaaccccaatggtatcgggtgctcgaaaaagactctgtgacactgaaatgccaaggggcctactctcccgaggacaactccacacagtggtttcataatgagtccctcatcagctctcaggccagctcttatttcattgatgccgctacagtggacgactccggcgagtatcggtgtcagaccaatctgtctacactgtctgaccccgtgcagcttgaggtccacattggatggttgctcttgcaagccccacgctgggttttcaaagaggaagatccaatccatctgcggtgccacagctggaaaaacaccgctctccacaaagtcacatacctgcaaaatggcaaaggacgcaaatacttccatcacaattccgatttttacattccgaaggctaccctgaaagacagcggcagctatttctgccggggactcgtcggctccaagaatgtgtcctccgaaaccgtgaatatcacgattacccaaggactggctgtgcctacaatctctagcttctttccgcctggataccaagtctccttctgtcttgtgatggtcctcctgtttgctgtggacacaggactgtacttttacgtg

SEQ ID NO: 2036 - DNA, 1434 bp, synthetic construct
  source 1..1434: mol_type = other DNA
atggccttaccagtgaccgccttgctcctgccgctggccttgctgctccacgccgccaggccggagatcgtgctgacacagagccctggcaccctgagcctgtctccaggcgaaagagccacactgagctgtcgggccagccagagcgtgtccaatacctacctggcctggtatcaccagaggcccggacaggctccccggctgctgatctatggcgcttctagcagagccaccggcatccccgatagattcagcggctctggcagcggcaccgacttcgccctgacaatcagctccctggaacccgaggacttcgccgtgtactactgccagcagtacagcaactcctggaccttcggccagggcaccaaggtggaaatcaagagaggcggaggcggaagtggaggcggaggatctggcggcggaggctctcaggtgcaactggtggaatctggcgggggagtggtgcagcctggcagaagcctgagactgtcttgtgccgccagcggcttcaccttcagcagctacgacatgcactgggtgcgccaggcccctggcaaaggactggaatgggtggccgtgatctcctacgacggcaccaacgagtattacgccgacagcgtgaagggccggttcaccatctccagagacaccagcaagaacaccctgtacctccagatgaacagcctgcgggccgaggacacagccgtgtattattgcgccagagagcggtacttcgactggtccttcgactactggggccagggaaccctggtgtccgtgtctagtacgcgtggaatgaggactgaggatcttcccaaagctgtcgtctttctcgaaccccaatggtatcgggtgctcgaaaaagactctgtgacactgaaatgccaaggggcctactctcccgaggacaactccacacagtggtttcataatgagtccctcatcagctctcaggccagctcttatttcattgatgccgctacagtggacgactccggcgagtatcggtgtcagaccaatctgtctacactgtctgaccccgtgcagcttgaggtccacattggatggttgctcttgcaagccccacgctgggttttcaaagaggaagatccaatccatctgcggtgccacagctggaaaaacaccgctctccacaaagtcacatacctgcaaaatggcaaaggacgcaaatacttccatcacaattccgatttttacattccgaaggctaccctgaaagacagcggcagctatttctgccggggactcgtcggctccaagaatgtgtcctccgaaaccgtgaatatcacgattacccaaggactggctgtgcctacaatctctagcttctttccgcctggataccaagtctccttctgtcttgtgatggtcctcctgtttgctgtggacacaggactgtacttttacgtg

SEQ ID NO: 2037 - DNA, 1431 bp, synthetic construct
  source 1..1431: mol_type = other DNA
atggccttaccagtgaccgccttgctcctgccgctggccttgctgctccacgccgccaggccggagctgacacaggaccctgctgtgtctgttgccctgggccagacagtgcggattacctgtcaaggcgacagcctgagaagcaactacgccaactggtatcagcagaagcccggacaggctcccgtgctggttatctacggccagaacaacagacccagcggcatccccgatagattcagcggctctagctctggcaataccgccagcctgacaatcactggcgctcaggctgccgatgaggccgactactactgcgatagcagagtgtccaccggcaatcacgtggtgtttggcggcggaacaaagctgacagtgctcggacaaggcggaggcggaagtggaggcggaggatctggcggcggaggctctgaagttcagctggtgcagagcggagccgaagtgaagaaacctggggcctctgtgaaggtgtcctgcaaggcttccggctacacctttaccagctacgccatgcactgggtccgacaggcacctggacaacggcttgaatggatgggctggatcaacgccggcaacggcaacaccaagtacagccagaaattccagggccgcgtgaccatcaccagagatacaagcgccagcaccgcctacatggaactgtctagcctgagatccgaggacaccgccgtgtactactgtgccagagacatcagctacggcagcttcgactattggggccagggcacactggtcaccgttagctctacgcgtggaatgaggactgaggatcttcccaaagctgtcgtctttctcgaaccccaatggtatcgggtgctcgaaaaagactctgtgacactgaaatgccaaggggcctactctcccgaggacaactccacacagtggtttcataatgagtccctcatcagctctcaggccagctcttatttcattgatgccgctacagtggacgactccggcgagtatcggtgtcagaccaatctgtctacactgtctgaccccgtgcagcttgaggtccacattggatggttgctcttgcaagccccacgctgggttttcaaagaggaagatccaatccatctgcggtgccacagctggaaaaacaccgctctccacaaagtcacatacctgcaaaatggcaaaggacgcaaatacttccatcacaattccgatttttacattccgaaggctaccctgaaagacagcggcagctatttctgccggggactcgtcggctccaagaatgtgtcctccgaaaccgtgaatatcacgattacccaaggactggctgtgcctacaatctctagcttctttccgcctggataccaagtctccttctgtcttgtgatggtcctcctgtttgctgtggacacaggactgtacttttacgtg

SEQ ID NO: 2038 - DNA, 1419 bp, synthetic construct
  source 1..1419: mol_type = other DNA
atggccttaccagtgaccgccttgctcctgccgctggccttgctgctccacgccgccaggccggacatccagatgacacagagccctagcagcctgtctgccagcgtgggagacagagtgaccatcacctgtagcgccaccagcagcatcagctacatgcactggtatcagcagaagcccggcaaggcccctaaaggctggatctacgataccagcaaactggcccacggcgtgcccagcagattttctggttctggcagcggcaccgacttcaccctgacaatatctagcctccagcctgaggacttcgccacctactactgccaccagagaagaagctaccccttcaccttcggccagggcaccaaggtggaaatcaaaggcggaggcggaagtggaggcggaggatctggcggcggaggctctgaagtgcaactggttcagagcggagccgaagtgaagaaacctggggcctctgtgaaggtgtcctgcaaggcttccggctacacctttaccaatttctggattcactgggtccgacaggctccaggccaaggactggaatggatcggagagatcgaccccagcgacagctacaccaactacaaccagaaattcaaaggccgggtcaccatcaccagagacaccagcacaagcaccgcctacctggaactgagcagcctgagaagcgaggacaccgccgtgtactactgcgccagggaaatcaccaccgtggattattggggccagggaaccctggtcaccgtgtcatctacgcgtggaatgaggactgaggatcttcccaaagctgtcgtctttctcgaaccccaatggtatcgggtgctcgaaaaagactctgtgacactgaaatgccaaggggcctactctcccgaggacaactccacacagtggtttcataatgagtccctcatcagctctcaggccagctcttatttcattgatgccgctacagtggacgactccggcgagtatcggtgtcagaccaatctgtctacactgtctgaccccgtgcagcttgaggtccacattggatggttgctcttgcaagccccacgctgggttttcaaagaggaagatccaatccatctgcggtgccacagctggaaaaacaccgctctccacaaagtcacatacctgcaaaatggcaaaggacgcaaatacttccatcacaattccgatttttacattccgaaggctaccctgaaagacagcggcagctatttctgccggggactcgtcggctccaagaatgtgtcctccgaaaccgtgaatatcacgattacccaaggactggctgtgcctacaatctctagcttctttccgcctggataccaagtctccttctgtcttgtgatggtcctcctgtttgctgtggacacaggactgtacttttacgtg

SEQ ID NO: 2039 - DNA, 1440 bp, synthetic construct
  source 1..1440: mol_type = other DNA
atggccttaccagtgaccgccttgctcctgccgctggccttgctgctccacgccgccaggccggacatccagatgacacagagccctagcagcctgtctgccagcgtgggagacagagtgaccatcacatgcaaggccagccagggcttcaacaaatacgtggcctggtatcagcagaagcccggcaaggctcctaagctgctgatctactacaccagcacactccagcctggcgtgcccagcagattttctggctctggcagcggcagagactacaccctgacaatatccagcctccagccagaggacttcgccacctactactgtctccagtacggcaacctgctgtacgcctttggacagggcaccaaggtggaaatcaagagaggcggaggcggaagtggaggcggaggatctggcggcggaggctctgaagttcagcttgtgcagagcggagccgaagtgaagaaacctggggcctctgtgaaggtgtcctgcaaagccagcggctacacctttaccagctactggatcggctgggtccgacaggctcctggacaaggactggaatggatcggcgacatctatcccggcggaggctacaccaactacaacgagaagttcaagggccgcgtgacaatcaccagagacacctctacaagcaccgcctacctggaactgagcagcctgagaagcgaggacaccgccgtgtactactgcgccagactggatggcagcagctacagaggcgctatggattcttggggccagggcacactggtcaccgtttcttctacgcgtggaatgaggactgaggatcttcccaaagctgtcgtctttctcgaaccccaatggtatcgggtgctcgaaaaagactctgtgacactgaaatgccaaggggcctactctcccgaggacaactccacacagtggtttcataatgagtccctcatcagctctcaggccagctcttatttcattgatgccgctacagtggacgactccggcgagtatcggtgtcagaccaatctgtctacactgtctgaccccgtgcagcttgaggtccacattggatggttgctcttgcaagccccacgctgggttttcaaagaggaagatccaatccatctgcggtgccacagctggaaaaacaccgctctccacaaagtcacatacctgcaaaatggcaaaggacgcaaatacttccatcacaattccgatttttacattccgaaggctaccctgaaagacagcggcagctatttctgccggggactcgtcggctccaagaatgtgtcctccgaaaccgtgaatatcacgattacccaaggactggctgtgcctacaatctctagcttctttccgcctggataccaagtctccttctgtcttgtgatggtcctcctgtttgctgtggacacaggactgtacttttacgtg

SEQ ID NO: 2040 - DNA, 1428 bp, synthetic construct
  source 1..1428: mol_type = other DNA
atggccttaccagtgaccgccttgctcctgccgctggccttgctgctccacgccgccaggccggacatccagatgacacagagccctagcagcctgtctgccagcgtgggagacagagtgaccatcacctgtagagccagccaggacatccggtactacctgaactggtatcagcagaagcccggcaaggcccctaagctgctgatctatgtggcctccagcctccagagcggagtgccttctagattttctggcagcggctccggcaccgagtttaccctgacagtgtctagcttgcagcccgaggacttcgccacctactactgcctgcaagtgtacagcacccctcggacctttggacagggcaccaaggtggaaatcaaaggcggaggcggaagtggaggcggaggatctggcggcggaggctctgaagtgcagcttgttgaatctggcggcggactggctaagcctggcggatctctgagactgtcttgtgccgccagcggcttccggttcaccttcaacaactactacatggactgggtccgacaggcccctggacaaggacttgaatgggtgtccagaatcagcagcagcggcgaccctacttggtacgccgattctgtgaagggcagattcaccatcagcagagagaacgccaagaacaccctgttcctccagatgaactccctgagagccgaggacaccgccgtgtactattgtgcctctctgaccaccggcagcgattcttggggacagggcgtgctggttaccgtgtcatctacgcgtggaatgaggactgaggatcttcccaaagctgtcgtctttctcgaaccccaatggtatcgggtgctcgaaaaagactctgtgacactgaaatgccaaggggcctactctcccgaggacaactccacacagtggtttcataatgagtccctcatcagctctcaggccagctcttatttcattgatgccgctacagtggacgactccggcgagtatcggtgtcagaccaatctgtctacactgtctgaccccgtgcagcttgaggtccacattggatggttgctcttgcaagccccacgctgggttttcaaagaggaagatccaatccatctgcggtgccacagctggaaaaacaccgctctccacaaagtcacatacctgcaaaatggcaaaggacgcaaatacttccatcacaattccgatttttacattccgaaggctaccctgaaagacagcggcagctatttctgccggggactcgtcggctccaagaatgtgtcctccgaaaccgtgaatatcacgattacccaaggactggctgtgcctacaatctctagcttctttccgcctggataccaagtctccttctgtcttgtgatggtcctcctgtttgctgtggacacaggactgtacttttacgtg

SEQ ID NO: 2041 - DNA, 1431 bp, synthetic construct
  source 1..1431: mol_type = other DNA
atggccttaccagtgaccgccttgctcctgccgctggccttgctgctccacgccgccaggccggagatcgtgatgacacagagccccgccacactgagtgtgtctccaggcgaaagagccacactgtcctgtagagccagccagagcgtgtccagaaacctggcctggtatcagcagaagcctggacaggctccccggctgttgatctacggcgcttctacaagagccaccggcattcccgccagattttctggctctggcagcggcaccgagttcaccctgacaatcggaagcctccagagcgaggacttcgccgtgtactactgccagcagtacaagacctggcctcggacctttggacagggcaccaacgtggaaatcaaaggcggaggcggaagtggaggcggaggatctggcggcggaggctctcaagttcagctgcaacaatggggagccggcctgctgaagcctagcgaaacactgtctctgacctgcgccgtgttcggcggctctttcagcggctactactggtcctggatcagacagcctcctggcaaaggactggaatggatcggcgagatcaaccaccggggcaacaccaacgacaaccccagcctgaaaagcagagtgaccatcagcgtggacaccagcaagaaccagttcgccctgaagctgagcagcgtgacagccgctgataccgccgtgtattattgcgccagagagcggggctacacctacggcaatttcgatcactggggccagggcaccctggtcacagtttcttctacgcgtggaatgaggactgaggatcttcccaaagctgtcgtctttctcgaaccccaatggtatcgggtgctcgaaaaagactctgtgacactgaaatgccaaggggcctactctcccgaggacaactccacacagtggtttcataatgagtccctcatcagctctcaggccagctcttatttcattgatgccgctacagtggacgactccggcgagtatcggtgtcagaccaatctgtctacactgtctgaccccgtgcagcttgaggtccacattggatggttgctcttgcaagccccacgctgggttttcaaagaggaagatccaatccatctgcggtgccacagctggaaaaacaccgctctccacaaagtcacatacctgcaaaatggcaaaggacgcaaatacttccatcacaattccgatttttacattccgaaggctaccctgaaagacagcggcagctatttctgccggggactcgtcggctccaagaatgtgtcctccgaaaccgtgaatatcacgattacccaaggactggctgtgcctacaatctctagcttctttccgcctggataccaagtctccttctgtcttgtgatggtcctcctgtttgctgtggacacaggactgtacttttacgtg

SEQ ID NO: 2042 - DNA, 1449 bp, synthetic construct
  source 1..1449: mol_type = other DNA
atggccttaccagtgaccgccttgctcctgccgctggccttgctgctccacgccgccaggccggacatccagatgacccagagccccagcagcctgtctgccagcgtgggcgacagagtgaccatcacatgcaaggccagcaagaacatcagaagctacctggcctggtatcagcagaagcccggcaaggcccccaagctgctgatctacagcggcagcacactgcacagcggcgtgcccagcagattttccggctctggcagcggcaccgacttcaccctgaccatctctagcctccagcccgaggacttcgccacctactactgccagcagcaccacgagtaccccctgacattcggccagggcaccaaggtggaaatcaagagaggcggaggcggaagtggaggcggaggatctggcggcggaggctctcaggtgcaactccaggaatctggccccggactcgtgaagcccagcgagacactgagcctgacctgtaccgtgtccggctacaccatcaccagcggctacgactggtcctggatcagacagcctcctggcaagggcctggaatggatcggctacatcaactacggcggctccaccaactacaagcccagcctgggaagccgcgtgacaatcagcgtggacacctccaagaaccagttcagcctgaagctgagcagcgtgacagccgccgataccgccgtgtactactgcgcccggtacaacgagtacaagagctacatctacgattggtacttcgacttctggggccagggaaccctcgtgaccgtgtctagtacgcgtggaatgaggactgaggatcttcccaaagctgtcgtctttctcgaaccccaatggtatcgggtgctcgaaaaagactctgtgacactgaaatgccaaggggcctactctcccgaggacaactccacacagtggtttcataatgagtccctcatcagctctcaggccagctcttatttcattgatgccgctacagtggacgactccggcgagtatcggtgtcagaccaatctgtctacactgtctgaccccgtgcagcttgaggtccacattggatggttgctcttgcaagccccacgctgggttttcaaagaggaagatccaatccatctgcggtgccacagctggaaaaacaccgctctccacaaagtcacatacctgcaaaatggcaaaggacgcaaatacttccatcacaattccgatttttacattccgaaggctaccctgaaagacagcggcagctatttctgccggggactcgtcggctccaagaatgtgtcctccgaaaccgtgaatatcacgattacccaaggactggctgtgcctacaatctctagcttctttccgcctggataccaagtctccttctgtcttgtgatggtcctcctgtttgctgtggacacaggactgtacttttacgtg

SEQ ID NO: 2043 - DNA, 1455 bp, synthetic construct
  source 1..1455: mol_type = other DNA
atggccttaccagtgaccgccttgctcctgccgctggccttgctgctccacgccgccaggccgcagtctgtggtcacacagcctccatccgtgtctgctgcccctggacagaaagtgaccatctcctgtagcggcagcagcagcaacatcggcaacaactacgtgtcctggtatcagcagctccccggcacagctcccaaactgctgatctacgacaacaacaagcggcccagcggcatccccgatagattttctggcagcaagagcggcaccagcgccacactgggaattaccggacttcagacaggcgacgaggccgactactactgtggcacatgggatggcagcctgtacaccatgcttttcggcggaggcaccaagctgacagtgcttggcggaggcggaagtggaggcggaggatctggcggcggaggctctgaagtgcaactggtggaatctggcggcggactggttaagcctggcggatctctgagactgtcttgtgccgccagcggcttcaccttcagcaatgcctggatgagctgggttcgacaggcccctggaaaaggactggaatgggtcggattcatccggtccaaagcctacggcggcaccacagaatatgccgcctctgtgaagggcagattcaccatcagccgggacgacagcaagtctatcgcctacctccagatgaacaacctgaaaaccgaggacaccgccgtgtactactgcgccagagatggcctgtacagcagctcttggtacgacagcgattactggggccagggcacactggtcacagtgtcatctacgcgtggaatgaggactgaggatcttcccaaagctgtcgtctttctcgaaccccaatggtatcgggtgctcgaaaaagactctgtgacactgaaatgccaaggggcctactctcccgaggacaactccacacagtggtttcataatgagtccctcatcagctctcaggccagctcttatttcattgatgccgctacagtggacgactccggcgagtatcggtgtcagaccaatctgtctacactgtctgaccccgtgcagcttgaggtccacattggatggttgctcttgcaagccccacgctgggttttcaaagaggaagatccaatccatctgcggtgccacagctggaaaaacaccgctctccacaaagtcacatacctgcaaaatggcaaaggacgcaaatacttccatcacaattccgatttttacattccgaaggctaccctgaaagacagcggcagctatttctgccggggactcgtcggctccaagaatgtgtcctccgaaaccgtgaatatcacgattacccaaggactggctgtgcctacaatctctagcttctttccgcctggataccaagtctccttctgtcttgtgatggtcctcctgtttgctgtggacacaggactgtacttttacgtg

SEQ ID NO: 2044 - DNA, 1470 bp, synthetic construct
  source 1..1470: mol_type = other DNA
atggccttaccagtgaccgccttgctcctgccgctggccttgctgctccacgccgccaggccgcagtctgtgctgacacagcctcctagtgtgtctggcgctcctggacagagagtgaccatctcttgtaccggcagcagcagcaatatcggagccggctatgacgtgcactggtatcagcagctccctggcacagcccctaaactgctgatcttcggcaacagcaacagacccagcggcgtgcccgatagattcagcggctttaagagcggcacaagcgccagcctggctatcactggactgcaagccgaggacgaggccgactacttctgccagagctacgatagcagcctgagcggcagcggagtgtttggcacaggcaccaaagtgacagtgcttggcggcggaggcggaagtggaggcggaggatctggcggcggaggctctcaaatgcaactggttcaaagcggcggtggcctggtgcaacctggaagaagtctgagactgagctgtgccgccagcggcttcaccttcgatgattacgccatgcactgggtccgacaggcccctggaaaaggactggaatgggtgtccggcatctcctggaatagcggctctatcggctacgccgacagcgtgaagggcagattcaccatcagccgggacaacgccaagaacagcctgtacctccagatgaactccctgagagccgaggatacagccctgtactactgcgccaaggacatccacagcggcagctactacggcctgctgtactacgctatggacgtgtggggccagggcacaaccgtgacagtttcttctacgcgtggaatgaggactgaggatcttcccaaagctgtcgtctttctcgaaccccaatggtatcgggtgctcgaaaaagactctgtgacactgaaatgccaaggggcctactctcccgaggacaactccacacagtggtttcataatgagtccctcatcagctctcaggccagctcttatttcattgatgccgctacagtggacgactccggcgagtatcggtgtcagaccaatctgtctacactgtctgaccccgtgcagcttgaggtccacattggatggttgctcttgcaagccccacgctgggttttcaaagaggaagatccaatccatctgcggtgccacagctggaaaaacaccgctctccacaaagtcacatacctgcaaaatggcaaaggacgcaaatacttccatcacaattccgatttttacattccgaaggctaccctgaaagacagcggcagctatttctgccggggactcgtcggctccaagaatgtgtcctccgaaaccgtgaatatcacgattacccaaggactggctgtgcctacaatctctagcttctttccgcctggataccaagtctccttctgtcttgtgatggtcctcctgtttgctgtggacacaggactgtacttttacgtg

SEQ ID NO: 2045 - DNA, 1470 bp, synthetic construct
  source 1..1470: mol_type = other DNA
atggccttaccagtgaccgccttgctcctgccgctggccttgctgctccacgccgccaggccgctgcctgttctgacacagcctccatctgcctctggcacacctggacagagagtgaccatcagctgtagcggcagaagcagcaacatcggcagcaacagcgtgaactggtacagacagcttcctggcgctgcccctaagctgctgatctacagcaacaaccagcggcctcctggcgtgccagtcagattttctggcagcaagagcggcacaagcgccagcctggctatttctggactccagtctgaggacgaggccacctactactgtgccacctgggacgacaacctgaacgtgcactacgtgttcggcaccggcaccaaagtgacagtgcttggaagtagaggcggaggcggaagtggaggcggaggatctggcggcggaggctctcttgaaatggctcaggtgcagctggtgcagagcggagccgaagtgaagaaacctggcagcagcgtgaaggtgtcctgcaaagcttctggcggcaccttcagcagctacgccatctcttgggttcgacaggcccctggacaaggactggaatggatgggcagaatcatccccatcctgggaatcgccaactacgcccagaaattccagggcagagtgacaatcaccgccgacaagagcaccagcaccgcctacatggaactgagcagcctgagaagcgaggacaccgccgtgtactattgtgcaagaggcggctactacagccacgacatgtggagcgaagattggggccagggcacactggtcacagtgtcatctacgcgtggaatgaggactgaggatcttcccaaagctgtcgtctttctcgaaccccaatggtatcgggtgctcgaaaaagactctgtgacactgaaatgccaaggggcctactctcccgaggacaactccacacagtggtttcataatgagtccctcatcagctctcaggccagctcttatttcattgatgccgctacagtggacgactccggcgagtatcggtgtcagaccaatctgtctacactgtctgaccccgtgcagcttgaggtccacattggatggttgctcttgcaagccccacgctgggttttcaaagaggaagatccaatccatctgcggtgccacagctggaaaaacaccgctctccacaaagtcacatacctgcaaaatggcaaaggacgcaaatacttccatcacaattccgatttttacattccgaaggctaccctgaaagacagcggcagctatttctgccggggactcgtcggctccaagaatgtgtcctccgaaaccgtgaatatcacgattacccaaggactggctgtgcctacaatctctagcttctttccgcctggataccaagtctccttctgtcttgtgatggtcctcctgtttgctgtggacacaggactgtacttttacgtg

SEQ ID NO: 2046 - DNA, 1437 bp, synthetic construct
  source 1..1437: mol_type = other DNA
atggccttaccagtgaccgccttgctcctgccgctggccttgctgctccacgccgccaggccggacatcgtgctgacacagagccctgcttctctggccgtgtctctgggagagagagccaccatcaactgtagagccagcgagagcgtgtccgtgattggagcccacctgatccactggtatcagcagaagcctggacagcctcctaagctgctgatctacctggcctccaacctggaaacaggcgtgccagccagattttctggcagcggctctggcaccgatttcaccctgacaatcagcagcctccaggccgaagatgccgccatctactactgcctccagagccggatcttccccagaacctttggacagggcaccaagctggaaatcaaaggcggaggcggaagtggaggcggaggatctggcggcggaggctctcaagttcagctggtgcagtctggctccgagctgaagaaacctggcgagtccgtgaagatcagctgcaaggccagcggctacaccttcaccgactacagcatcaactgggtcaagcaggcccctggacagggactgaaatggatgggctggatcaacaccgagacaagagagcccgcctacgcctacgacttcagaggcagattcgtgttctccctggacaccagcgccagcacagcctatctccagatcagctctctgaaggccgaggataccgccgtgtacttctgcgccctggactacagctacgctatggactattggggccagggcaccctggtcacagtctcttctacgcgtggaatgaggactgaggatcttcccaaagctgtcgtctttctcgaaccccaatggtatcgggtgctcgaaaaagactctgtgacactgaaatgccaaggggcctactctcccgaggacaactccacacagtggtttcataatgagtccctcatcagctctcaggccagctcttatttcattgatgccgctacagtggacgactccggcgagtatcggtgtcagaccaatctgtctacactgtctgaccccgtgcagcttgaggtccacattggatggttgctcttgcaagccccacgctgggttttcaaagaggaagatccaatccatctgcggtgccacagctggaaaaacaccgctctccacaaagtcacatacctgcaaaatggcaaaggacgcaaatacttccatcacaattccgatttttacattccgaaggctaccctgaaagacagcggcagctatttctgccggggactcgtcggctccaagaatgtgtcctccgaaaccgtgaatatcacgattacccaaggactggctgtgcctacaatctctagcttctttccgcctggataccaagtctccttctgtcttgtgatggtcctcctgtttgctgtggacacaggactgtacttttacgtg

SEQ ID NO: 2047 - DNA, 1440 bp, synthetic construct
  source 1..1440: mol_type = other DNA
atggccttaccagtgaccgccttgctcctgccgctggccttgctgctccacgccgccaggccggacatcgtgctgacacagtctcccgccacactgtcactgagccctggcgatagagccacactgagctgtagagccagcgagagcgtgacaatcctgggcagccacctgatctactggtatcagcagaagcccggacaggcccctagactgctgattcagctcgccagcaatgtgcagacaggcatccctgccagattttccggcagcggcagcagaaccgatttcaccctgaccataagcagcctggaacctgaggacttcgccgtgtactactgcctccagagccggacaatccccagaacctttggacagggcaccaagctggaaatcaagagaggcggaggcggaagtggaggcggaggatctggcggcggaggctctcaagttcaactggtgcagagcggctccgagctgaagaaacctggcgagtccgtgaagattagctgcaaggccagcggctacaccttcacacactacagcatgaactgggtccgacaggctccaggccaaggactggaatggatgggcagaatcaacaccgagacaggcgagcccctgtacgccgacgatttcaagggcagattcgtgttcagcctggacaccagcgccagcacagcctatctccagatcagctctctgaaggccgaggacaccgccgtgtattattgcagcaacgactacctgtactccctggactattggggccagggcacactggtcacagtgtctagtacgcgtggaatgaggactgaggatcttcccaaagctgtcgtctttctcgaaccccaatggtatcgggtgctcgaaaaagactctgtgacactgaaatgccaaggggcctactctcccgaggacaactccacacagtggtttcataatgagtccctcatcagctctcaggccagctcttatttcattgatgccgctacagtggacgactccggcgagtatcggtgtcagaccaatctgtctacactgtctgaccccgtgcagcttgaggtccacattggatggttgctcttgcaagccccacgctgggttttcaaagaggaagatccaatccatctgcggtgccacagctggaaaaacaccgctctccacaaagtcacatacctgcaaaatggcaaaggacgcaaatacttccatcacaattccgatttttacattccgaaggctaccctgaaagacagcggcagctatttctgccggggactcgtcggctccaagaatgtgtcctccgaaaccgtgaatatcacgattacccaaggactggctgtgcctacaatctctagcttctttccgcctggataccaagtctccttctgtcttgtgatggtcctcctgtttgctgtggacacaggactgtacttttacgtg

SEQ ID NO: 2048 - DNA, 1452 bp, synthetic construct
  source 1..1452: mol_type = other DNA
atggccttaccagtgaccgccttgctcctgccgctggccttgctgctccacgccgccaggccggacttcgtgatgacacagagccctgatagcctggccgtgtctctcggcgagcgagtgaccatgagctgcaagtctagccagagcctgctgaacagcggcaaccagaagaactacctgacctggtatcagcagaagcccggccagcctcctaagctgctgatctactgggccagcaccagagaaagcggcgtgcccgatagattttctggctctggcagcggcaccgacttcaccctgacaatttctagcctgcaagccgaggacgtggccgtgtactactgccagaacgactacagctacccctacaccttcggccagggcaccaagctggaaatcaaaggcggaggcggaagtggaggcggaggatctggcggcggaggctctgaagtgcaactggttcagagcggagccgagctgaagaaacctggggccagcgtgaaggtgtcctgtaaagccagcggctacacctttaccgactactacatgaaatgggtccgacaggccccaggccagggactcgaatggatcggcgatattatccccagcaacggggccaccttctacaaccagaaattcaagggccgcgtgaccatcaccgtggacaagagcacaagcaccgcctacatggaactgagcagcctgagaagcgaggacaccgccgtgtattattgcgccagaagccatctgctgcgggccagttggttcgcctattggggacagggaaccctggtcaccgttagctctacgcgtggaatgaggactgaggatcttcccaaagctgtcgtctttctcgaaccccaatggtatcgggtgctcgaaaaagactctgtgacactgaaatgccaaggggcctactctcccgaggacaactccacacagtggtttcataatgagtccctcatcagctctcaggccagctcttatttcattgatgccgctacagtggacgactccggcgagtatcggtgtcagaccaatctgtctacactgtctgaccccgtgcagcttgaggtccacattggatggttgctcttgcaagccccacgctgggttttcaaagaggaagatccaatccatctgcggtgccacagctggaaaaacaccgctctccacaaagtcacatacctgcaaaatggcaaaggacgcaaatacttccatcacaattccgatttttacattccgaaggctaccctgaaagacagcggcagctatttctgccggggactcgtcggctccaagaatgtgtcctccgaaaccgtgaatatcacgattacccaaggactggctgtgcctacaatctctagcttctttccgcctggataccaagtctccttctgtcttgtgatggtcctcctgtttgctgtggacacaggactgtacttttacgtg

SEQ ID NO: 2049 - DNA, 1452 bp, synthetic construct
  source 1..1452: mol_type = other DNA
atggccttaccagtgaccgccttgctcctgccgctggccttgctgctccacgccgccaggccggacttcgtgatgacacagagccctgatagcctggccgtgtctctcggcgagcgagtgaccatgagctgcaagtctagccagagcctgctgaacagcggcaaccagaagaactacctgacctggtatcagcagaagcccggccagcctcctaagctgctgatctactgggccagcaccagagaaagcggcgtgcccgatagattttctggctctggcagcggcaccgacttcaccctgacaatttctagcctgcaagccgaggacgtggccgtgtactactgccagaacgactacagctacccctacaccttcggccagggcaccaagctggaaatcaaaggcggaggcggaagtggaggcggaggatctggcggcggaggctctcaagtgcaactggttcagagcggagccgagctgaagaaacctggggccagcgtgaaggtgtcctgtaaagccagcggctacacctttaccgactactacatgaaatgggtccgacaggccccaggccagggactcgaatggatcggcgatattatccccagcaacggggccaccttctacaaccagaaattcaagggccgcgtgaccatcaccgtggacaagagcacaagcaccgcctacatggaactgagcagcctgagaagcgaggacaccgccgtgtattattgcgccagaagccatctgctgcgggccagttggttcgcctattggggacagggaaccctggtcaccgttagctctacgcgtggaatgaggactgaggatcttcccaaagctgtcgtctttctcgaaccccaatggtatcgggtgctcgaaaaagactctgtgacactgaaatgccaaggggcctactctcccgaggacaactccacacagtggtttcataatgagtccctcatcagctctcaggccagctcttatttcattgatgccgctacagtggacgactccggcgagtatcggtgtcagaccaatctgtctacactgtctgaccccgtgcagcttgaggtccacattggatggttgctcttgcaagccccacgctgggttttcaaagaggaagatccaatccatctgcggtgccacagctggaaaaacaccgctctccacaaagtcacatacctgcaaaatggcaaaggacgcaaatacttccatcacaattccgatttttacattccgaaggctaccctgaaagacagcggcagctatttctgccggggactcgtcggctccaagaatgtgtcctccgaaaccgtgaatatcacgattacccaaggactggctgtgcctacaatctctagcttctttccgcctggataccaagtctccttctgtcttgtgatggtcctcctgtttgctgtggacacaggactgtacttttacgtg

SEQ ID NO: 2050 - DNA, 1422 bp, synthetic construct
  source 1..1422: mol_type = other DNA
atggccttaccagtgaccgccttgctcctgccgctggccttgctgctccacgccgccaggccggacgtgcagatcacacagagccctagctacctggctgcctctcctggcgagacaatcaccatcaactgtcgggccagcaagagcatcagcaaggacctggcctggtatcaagagaagcccggcaagaccaacaagctgctgatctacagcggcagcacactccagtctggcatccccagcagattttccggctctggcagcggcaccgatttcaccctgaccataagcagcctggaacctgaggacttcgccatgtactactgccagcagcacaacaagtacccctacacctttggcggaggcaccaagctggaaatcaagagaggcggaggcggaagtggaggcggaggatctggcggcggaggctctcaagttcaactgcaacagcctggggccgagcttgttagacctggcgcttctgtgaagctgagctgcaaggccagcggctacaccttcaccagctactggatgaactgggtcaagcagcggcctgaccagggcctcgaatggatcggcagaatcgacccctacgacagcgagacacactacaaccagaagttcaaggacaaggccatcctgaccgtggacaagagcagctccaccgcctacatgcaactgagcagcctgacctctgaggatagcgccgtgtactattgcgccagaggcaactgggacgactattggggccagggcacaaccctgacagtgtctagtacgcgtggaatgaggactgaggatcttcccaaagctgtcgtctttctcgaaccccaatggtatcgggtgctcgaaaaagactctgtgacactgaaatgccaaggggcctactctcccgaggacaactccacacagtggtttcataatgagtccctcatcagctctcaggccagctcttatttcattgatgccgctacagtggacgactccggcgagtatcggtgtcagaccaatctgtctacactgtctgaccccgtgcagcttgaggtccacattggatggttgctcttgcaagccccacgctgggttttcaaagaggaagatccaatccatctgcggtgccacagctggaaaaacaccgctctccacaaagtcacatacctgcaaaatggcaaaggacgcaaatacttccatcacaattccgatttttacattccgaaggctaccctgaaagacagcggcagctatttctgccggggactcgtcggctccaagaatgtgtcctccgaaaccgtgaatatcacgattacccaaggactggctgtgcctacaatctctagcttctttccgcctggataccaagtctccttctgtcttgtgatggtcctcctgtttgctgtggacacaggactgtacttttacgtg

SEQ ID NO: 2051 - DNA, 1428 bp, synthetic construct
  source 1..1428: mol_type = other DNA
atggccttaccagtgaccgccttgctcctgccgctggccttgctgctccacgccgccaggccggagatcgtgctgacacagagccctaccagcatgacagcctctccaggcgagcaagtgaccatcacctgtagagccagcagcagcatcaactacatgcactggtatcagcagaagcctggcgcaagccccagaccttggatctacgagacaagcaagctggcctccggcgtgcccgatagattttctggatctgccagcggcaccagctacagcctgaccatcaacaacatggaagccgaggacgccgccacctactactgccagcagtggaattacccctcctggacctttggcggaggcaccaagctggaacttaaaggcggaggcggaagtggaggcggaggatctggcggcggaggctctgaagtgcagctcgttgagtctggtggcggactggttcagcctggaagaagcctgaagctgagctgtgccgccagcggcttcaccttcagcgactacaatatggcctgggtccgacaggcccctaagaaaggactggaatgggtcgccaccatcctgtacgatggcggcagaacctactaccggggcagcgtgaagggcagattcaccatcagcagagacaacgccaagagcaccctgtacctgcggatggactctctgagaagcgaggataccgccacatattactgtgccacacacagccggggcaccgactactttgattattggggccagggcgtgatggttaccgtgtctagtacgcgtggaatgaggactgaggatcttcccaaagctgtcgtctttctcgaaccccaatggtatcgggtgctcgaaaaagactctgtgacactgaaatgccaaggggcctactctcccgaggacaactccacacagtggtttcataatgagtccctcatcagctctcaggccagctcttatttcattgatgccgctacagtggacgactccggcgagtatcggtgtcagaccaatctgtctacactgtctgaccccgtgcagcttgaggtccacattggatggttgctcttgcaagccccacgctgggttttcaaagaggaagatccaatccatctgcggtgccacagctggaaaaacaccgctctccacaaagtcacatacctgcaaaatggcaaaggacgcaaatacttccatcacaattccgatttttacattccgaaggctaccctgaaagacagcggcagctatttctgccggggactcgtcggctccaagaatgtgtcctccgaaaccgtgaatatcacgattacccaaggactggctgtgcctacaatctctagcttctttccgcctggataccaagtctccttctgtcttgtgatggtcctcctgtttgctgtggacacaggactgtacttttacgtg

SEQ ID NO: 2052 - DNA, 1455 bp, synthetic construct
  source 1..1455: mol_type = other DNA
atggccttaccagtgaccgccttgctcctgccgctggccttgctgctccacgccgccaggccggacatcgtgatgacacagagcccttctagcctggccgtgtctgagggcgagacagtgaccatcaactgcaagagcagccagagcttcctgtctagcggcgacggcaagaattacgtggcctggtatcagtacaagcccggacagagccccaagctgctgatctactgggccagcacaagacagagcggcgtgcccgatagattcatcggctctggcagcggcaccgacttcaccctgacaatctctacagtgcaggccgaggacctggctatctactactgccagcagtattacgacacccctctgacctttggctccggcaccaagctggaaatcaaaggcggaggcggaagtggaggcggaggatctggcggcggaggctctgaagtgaagctgcaagagtctggccccagcctggtgcagagtagccaaacactgagcctgacctgtaccgtgtccggctttagcctgaccagctaccacatccactgggtccgacagacccctggcaaaggactggaatggatgggcgtgatgtggagcgacggcgacaccagctataacagcgccctgaagtcccggctgagcatcagcagagatacaagccagagccaggtgttcctgaagatgaacagcctccagaccgaggacaccgccacctactattgtgccagaggctactacagcagctacctgtacctttggttcgcctattggggccagggcaccctggttacagtcagctctacgcgtggaatgaggactgaggatcttcccaaagctgtcgtctttctcgaaccccaatggtatcgggtgctcgaaaaagactctgtgacactgaaatgccaaggggcctactctcccgaggacaactccacacagtggtttcataatgagtccctcatcagctctcaggccagctcttatttcattgatgccgctacagtggacgactccggcgagtatcggtgtcagaccaatctgtctacactgtctgaccccgtgcagcttgaggtccacattggatggttgctcttgcaagccccacgctgggttttcaaagaggaagatccaatccatctgcggtgccacagctggaaaaacaccgctctccacaaagtcacatacctgcaaaatggcaaaggacgcaaatacttccatcacaattccgatttttacattccgaaggctaccctgaaagacagcggcagctatttctgccggggactcgtcggctccaagaatgtgtcctccgaaaccgtgaatatcacgattacccaaggactggctgtgcctacaatctctagcttctttccgcctggataccaagtctccttctgtcttgtgatggtcctcctgtttgctgtggacacaggactgtacttttacgtg

SEQ ID NO: 2053 - DNA, 1467 bp, synthetic construct
  source 1..1467: mol_type = other DNA
atggccttaccagtgaccgccttgctcctgccgctggccttgctgctccacgccgccaggccggacgtgctgatgacccagacacctgtgtctctgccagtgtctctcggaggccaggtgtccatctcctgtagaagcagccagagcctggtgcactccgacggcgatacctacctgcactggtatctccagaagcctggacagagccctcagctcctgatctaccgggtgtccaacagattcagcggcgtgcccgatagattttccggcagcggctctggcaccgacttcaccctgaagatcagcagagtggaacccgaggacctgggcctgtactactgtctccagaccacacacttcccaccttggacctttggcggaggcaccaagctggaaatgaaaggcggaggcggaagtggaggcggaggatctggcggcggaggctctcaggttcagctccagcagtctggacccgagcttagaaggccaggatctagcgtcagactgagctgcaaggccagcggctaccggatcaaggacttcctgatccactggattaagaacagacccgagcacggcctggaatggatcggatggattgaccctgaggacggcgagactaagtacgcccagaagttccagaccaaggccacactgaccgccgacacctctagcaacaccgcctacatgcaactgagcagcctgaccagcgaggacaccgccacctacttttgtgctagatggggcgacgtgtactacggcctgatgagaggccatgtgatggatgcctggggccagggaacaagcgtgacagtctcttctacgcgtggaatgaggactgaggatcttcccaaagctgtcgtctttctcgaaccccaatggtatcgggtgctcgaaaaagactctgtgacactgaaatgccaaggggcctactctcccgaggacaactccacacagtggtttcataatgagtccctcatcagctctcaggccagctcttatttcattgatgccgctacagtggacgactccggcgagtatcggtgtcagaccaatctgtctacactgtctgaccccgtgcagcttgaggtccacattggatggttgctcttgcaagccccacgctgggttttcaaagaggaagatccaatccatctgcggtgccacagctggaaaaacaccgctctccacaaagtcacatacctgcaaaatggcaaaggacgcaaatacttccatcacaattccgatttttacattccgaaggctaccctgaaagacagcggcagctatttctgccggggactcgtcggctccaagaatgtgtcctccgaaaccgtgaatatcacgattacccaaggactggctgtgcctacaatctctagcttctttccgcctggataccaagtctccttctgtcttgtgatggtcctcctgtttgctgtggacacaggactgtacttttacgtg

SEQ ID NO: 2054 - DNA, 1455 bp, synthetic construct
  source 1..1455: mol_type = other DNA
atggccttaccagtgaccgccttgctcctgccgctggccttgctgctccacgccgccaggccggacatcgtgatgacccaggccgctcccagcatccctgtgacacctggcgagagcgtgtccatctcctgccggtctagcaagagcctgctgaacagcaacggcaatacctacctgtactggttcctccagcggccaggccagtctccccaactgctgatctaccggatgagcaacctggcctccggcgtgcccgatagattttctggcagcggctccggcaccgccttcaccctgagaatcagcagagtggaagccgaggacgtgggcgtgtactactgtatgcagcacctggaataccccttcaccttcggagccggcaccaagctggaactgaagagaggcggaggcggaagtggaggcggaggatctggcggcggaggctctgaagtgcaactccagcagagcggccctgagctgattaagcctggggccagcgtgaagatgagctgcaaggccagcggctacaccttcaccagctacgtgatgcactgggtcaagcagaagcccggccagggcctggaatggatcggctacatcaacccctacaacgatggcaccaagtacaacgagaagttcaagggcaaggccaccctgaccagcgacaagagcagcagcaccgcctacatggaactgagcagcctgacaagcgaggacagcgccgtgtactattgcgccagaggcacctactactacggcagccgggtgttcgactattggggccagggcaccacactgaccgtgtcctctacgcgtggaatgaggactgaggatcttcccaaagctgtcgtctttctcgaaccccaatggtatcgggtgctcgaaaaagactctgtgacactgaaatgccaaggggcctactctcccgaggacaactccacacagtggtttcataatgagtccctcatcagctctcaggccagctcttatttcattgatgccgctacagtggacgactccggcgagtatcggtgtcagaccaatctgtctacactgtctgaccccgtgcagcttgaggtccacattggatggttgctcttgcaagccccacgctgggttttcaaagaggaagatccaatccatctgcggtgccacagctggaaaaacaccgctctccacaaagtcacatacctgcaaaatggcaaaggacgcaaatacttccatcacaattccgatttttacattccgaaggctaccctgaaagacagcggcagctatttctgccggggactcgtcggctccaagaatgtgtcctccgaaaccgtgaatatcacgattacccaaggactggctgtgcctacaatctctagcttctttccgcctggataccaagtctccttctgtcttgtgatggtcctcctgtttgctgtggacacaggactgtacttttacgtg

SEQ ID NO: 2055 - DNA, 1455 bp, synthetic construct; identical to SEQ ID NO: 2054
  source 1..1455: mol_type = other DNA

SEQ ID NO: 2056 - DNA, 1509 bp, synthetic construct
  source 1..1509: mol_type = other DNA
atggccttaccagtgaccgccttgctcctgccgctggccttgctgctccacgccgccaggccgatcaacatctacaacgccgagcctgccaatcctagcgagaagaacagccccgaattcgacatcgtgatgacacagagccccgccacactgtcactgtctccaggcgaaagagccacactgagctgtcggagcagcaagagcctccagaacgtgaacggcaacacctacctgtactggttccagcagaagcccggccagtctcctcagctcctgatctacagaatgagcaacctgaacagcggcgtgcccgacagattttctggcagcggaagcggcaccgagttcaccctgaccataagcagcctggaacctgaggacttcgccgtgtactactgtatgcagcacctggaataccccatcaccttcggagccggcaccaagctggaaatcaaaggcggaggcggaagtggaggcggaggatctggcggcggaggctctgaagtgcaactggttgaatctggcggcggactggttaagcctggcggatctctgaagctgagctgtgccgccagcggctacacctttaccagctacgtgatgcactgggtccgacaggcccctggcaaaggacttgagtggatcggctacatcaacccctacaacgatggcaccaagtacaacgagaagttccagggcagagtgaccatcagctccgacaagagcatcagcaccgcctacatggaactgagcagcctgagaagcgaggataccgccatgtactattgcgccagaggcacctactactacggcaccagagtgttcgactactggggccagggaaccctggtcacagtctcttctacgcgtggaatgaggactgaggatcttcccaaagctgtcgtctttctcgaaccccaatggtatcgggtgctcgaaaaagactctgtgacactgaaatgccaaggggcctactctcccgaggacaactccacacagtggtttcataatgagtccctcatcagctctcaggccagctcttatttcattgatgccgctacagtggacgactccggcgagtatcggtgtcagaccaatctgtctacactgtctgaccccgtgcagcttgaggtccacattggatggttgctcttgcaagccccacgctgggttttcaaagaggaagatccaatccatctgcggtgccacagctggaaaaacaccgctctccacaaagtcacatacctgcaaaatggcaaaggacgcaaatacttccatcacaattccgatttttacattccgaaggctaccctgaaagacagcggcagctatttctgccggggactcgtcggctccaagaatgtgtcctccgaaaccgtgaatatcacgattacccaaggactggctgtgcctacaatctctagcttctttccgcctggataccaagtctccttctgtcttgtgatggtcctcctgtttgctgtggacacaggactgtacttttacgtg

SEQ ID NO: 2057 - DNA, 1440 bp, synthetic construct
  source 1..1440: mol_type = other DNA
atggccttaccagtgaccgccttgctcctgccgctggccttgctgctccacgccgccaggccggacatccagatgacacagagccctagcagcctgtctgccagcgtgggagacagagtgaccatcacatgcaaggccagcgaccacatcaacaactggctggcctggtatcagcagaagcctggacaggcccctaagctgctgatctacggcgctaccacactggaaacaggcgtgcccagcagattttctggcagcggctctggcaccgactacaccctgacaatatccagcctccagcctgaggacttcgccacctactactgtcagcagagctggaacaccccttggacattcggccagggcaccaagctggaaatcaagagaggcggaggcggaagtggaggcggaggatctggcggcggaggctctcaagttcagcttcaacagcctggcgctgagctggtcaaacctggcgcttctgtgaagatgagctgcaaagccagcggctacgccttcagcagctactggatcaactggatgaagcagaaacccggccagggactcgaatggatcggccaaatctatcccggcgacggcgacaccaactacaacggcaagttcaagggcagagccacactgaccgccgatacctctagcagcacagcctacatgcagctgagcagcctgaccagcgaagatagcgccgtgtacttctgtgcccggtccatcacaacagtcgtgggctgcgctatggactattggggccagggaacaagcgtgaccgtgtctagtacgcgtggaatgaggactgaggatcttcccaaagctgtcgtctttctcgaaccccaatggtatcgggtgctcgaaaaagactctgtgacactgaaatgccaaggggcctactctcccgaggacaactccacacagtggtttcataatgagtccctcatcagctctcaggccagctcttatttcattgatgccgctacagtggacgactccggcgagtatcggtgtcagaccaatctgtctacactgtctgaccccgtgcagcttgaggtccacattggatggttgctcttgcaagccccacgctgggttttcaaagaggaagatccaatccatctgcggtgccacagctggaaaaacaccgctctccacaaagtcacatacctgcaaaatggcaaaggacgcaaatacttccatcacaattccgatttttacattccgaaggctaccctgaaagacagcggcagctatttctgccggggactcgtcggctccaagaatgtgtcctccgaaaccgtgaatatcacgattacccaaggactggctgtgcctacaatctctagcttctttccgcctggataccaagtctccttctgtcttgtgatggtcctcctgtttgctgtggacacaggactgtacttttacgtg

SEQ ID NO: 2058 - DNA, 1446 bp, synthetic construct
  source 1..1446: mol_type = other DNA
atggccttaccagtgaccgccttgctcctgccgctggccttgctgctccacgccgccaggccgcagatcgtgctgtctcagtctcctgccatcctgagcgcttccccaggcgagaaagtgaccatgacctgtagagccagcagcagcgtgtcctacatgcactggtatcagcagaagcccggcagcagccctaagccttggatctacgccaccagcaatctggcctctggcgtgccagccagattttctggctctggcagcggcaccagctacagcttcacaatcagcagagtggaagccgaggacgccgccacctactattgtcagcagtggaccttcaatcctcctaccttcggcggaggcacccggctggaaatcaaaagaacagtggctgctggcggaggcggaagtggaggcggaggatctggcggcggaggctctcaggcttatctgcaacagagcggagccgaactcgtcagacctggcgcttctgtgaagatgagctgcaaggccagcggctacaccttcaccagctataatatgcactgggtcaagcagacccctcggcagggactcgaatggatcggcggaatctatcccggcaacggcgacacctcctacaaccagaagttcaagggcaaagccacactgaccgtgggcaagagcagcagcaccgcctatatgcagctcagcagcctgaccagcgaggacagcgccgtgtacttctgcgccagatacgactacaactacgctatggactactggggccagggcaccagcgtgacagttagctctgccagcacgcgtggaatgaggactgaggatcttcccaaagctgtcgtctttctcgaaccccaatggtatcgggtgctcgaaaaagactctgtgacactgaaatgccaaggggcctactctcccgaggacaactccacacagtggtttcataatgagtccctcatcagctctcaggccagctcttatttcattgatgccgctacagtggacgactccggcgagtatcggtgtcagaccaatctgtctacactgtctgaccccgtgcagcttgaggtccacattggatggttgctcttgcaagccccacgctgggttttcaaagaggaagatccaatccatctgcggtgccacagctggaaaaacaccgctctccacaaagtcacatacctgcaaaatggcaaaggacgcaaatacttccatcacaattccgatttttacattccgaaggctaccctgaaagacagcggcagctatttctgccggggactcgtcggctccaagaatgtgtcctccgaaaccgtgaatatcacgattacccaaggactggctgtgcctacaatctctagcttctttccgcctggataccaagtctccttctgtcttgtgatggtcctcctgtttgctgtggacacaggactgtacttttacgtg

SEQ ID NO: 2059 - DNA, 1443 bp, synthetic construct
  source 1..1443: mol_type = other DNA
atggccttaccagtgaccgccttgctcctgccgctggccttgctgctccacgccgccaggccggacgagatcgtgctgacacagagccctgccaccctgtctctgagccctggcgaaagagccaccctgagctgtagagccagccagagcgtgtccagctacctggcctggtatcagcagaagcccggccaggctccccggctgctgatctacgatgccagcaatagagccaccggcatccccgccagattttccggctctggcagcggcaccgacttcaccctgaccatcagctccctggaacccgaggacttcgccgtgtactactgccagcagcggagcaactggcccatcacattcggccagggcacccggctggaaatcaaaggcggaggcggaagtggaggcggaggatctggcggcggaggctctgaggtgcagcttgttgagtctggcggaggactggtgcagcccgatagaagcctgagactgtcttgtgccgccagcggcttcaccttccacgattatgccatgcactgggtccgacaggcccctggcaaaggacttgaatgggtgtccaccatctcttggaacagcggcacaatcggctacgccgactctgtgaagggcagattcaccatcagccgggacaacgccaagaacagcctgtacctccagatgaactccctgagagccgaggacacagccctgtactactgcgccaaggacatccagtacggcaactactactacggcatggacgtgtggggccagggcacaacagtgacagtctcttctacgcgtggaatgaggactgaggatcttcccaaagctgtcgtctttctcgaaccccaatggtatcgggtgctcgaaaaagactctgtgacactgaaatgccaaggggcctactctcccgaggacaactccacacagtggtttcataatgagtccctcatcagctctcaggccagctcttatttcattgatgccgctacagtggacgactccggcgagtatcggtgtcagaccaatctgtctacactgtctgaccccgtgcagcttgaggtccacattggatggttgctcttgcaagccccacgctgggttttcaaagaggaagatccaatccatctgcggtgccacagctggaaaaacaccgctctccacaaagtcacatacctgcaaaatggcaaaggacgcaaatacttccatcacaattccgatttttacattccgaaggctaccctgaaagacagcggcagctatttctgccggggactcgtcggctccaagaatgtgtcctccgaaaccgtgaatatcacgattacccaaggactggctgtgcctacaatctctagcttctttccgcctggataccaagtctccttctgtcttgtgatggtcctcctgtttgctgtggacacaggactgtacttttacgtg

SEQ ID NO: 2060 - DNA, 1425 bp, synthetic construct
  source 1..1425: mol_type = other DNA
atggccttaccagtgaccgccttgctcctgccgctggccttgctgctccacgccgccaggccggacatccagatgacacagagccctagcagcctgtctgccagcgtgggagatagagtgaccatcaactgcaaggccagccaggacatcaacagctacctgagctggttccagcagaagcctggcaaggcccctaagacactgatctaccgggccaacagactggtggatggcgtgccaagcagattttctggcagcggcagcggccaggattacaccctgacaatatccagcctccagcctgaggacttcgccacctactactgcctccagtacgacgagttccctctgacctttggcggaggcaccaaggtggaaatcaaaggcggaggcggaagtggaggcggaggatctggcggcggaggctctcaggtgcaactggtgcagtctggggccgaagtgaagaaacctggggcctctgtgaaggtgtcctgcaaagccagcggctacacctttaccaactacgacatcaactgggtccgacaggctccaggccaaggactggaatggatcggctggatctatcctggcgacggcagcaccaagtacaacgagaagttcaaggccaaggccacactgaccgccgataccagcacaagcaccgcctacatggaactgcggagcctgagaagcgacgacaccgccgtgtactattgtgcctccggctacgaggacgctatggactattggggccagggcaccaccgtgacagtgtctagtacgcgtggaatgaggactgaggatcttcccaaagctgtcgtctttctcgaaccccaatggtatcgggtgctcgaaaaagactctgtgacactgaaatgccaaggggcctactctcccgaggacaactccacacagtggtttcataatgagtccctcatcagctctcaggccagctcttatttcattgatgccgctacagtggacgactccggcgagtatcggtgtcagaccaatctgtctacactgtctgaccccgtgcagcttgaggtccacattggatggttgctcttgcaagccccacgctgggttttcaaagaggaagatccaatccatctgcggtgccacagctggaaaaacaccgctctccacaaagtcacatacctgcaaaatggcaaaggacgcaaatacttccatcacaattccgatttttacattccgaaggctaccctgaaagacagcggcagctatttctgccggggactcgtcggctccaagaatgtgtcctccgaaaccgtgaatatcacgattacccaaggactggctgtgcctacaatctctagcttctttccgcctggataccaagtctccttctgtcttgtgatggtcctcctgtttgctgtggacacaggactgtacttttacgtg

SEQ ID NO: 2061 - DNA, 1431 bp, synthetic construct
  source 1..1431: mol_type = other DNA
atggccttaccagtgaccgccttgctcctgccgctggccttgctgctccacgccgccaggccggacatcgtgatgacccagacacctctgagcctgagcgtgacacctggacagcctgccagcattagctgcaagagcagccagtctctgctggacggcgacggcaagacctacctgaattggctgctccagaagcctggacagagccctcagcggctgatctacctggtgtccaagctggatagcggcgtgcccgatagattttctggcagcggctctggcaccgacttcaccctgaagatcagcagagtggaagccgaggacgtgggcgtgtactactgttggcagggcacacacttccccagaacattcggccagggcacaaagctggaaatcaaaggcggaggcggaagtggaggcggaggatctggcggcggaggctctcaagtgcaactggttcagagcggagccgaagtgaagaaacctggggcctctgtgaaggtgtcctgcaaggccagcggctacaccttcaaggacacctacatccactgggtccgacaggcccctggacaaggacttgagtggatgggcagaatcgaccccgccaacggcaacaccaaatacgaccccaagttccagggcagagtgaccatgaccagagacaccagcatcagcaccgcctacatggaactgagccggctgagatccgatgacaccgccgtgtactattgcgctagaagaggcggagtggattggggccagggaacactggttaccgtgtctagtacgcgtggaatgaggactgaggatcttcccaaagctgtcgtctttctcgaaccccaatggtatcgggtgctcgaaaaagactctgtgacactgaaatgccaaggggcctactctcccgaggacaactccacacagtggtttcataatgagtccctcatcagctctcaggccagctcttatttcattgatgccgctacagtggacgactccggcgagtatcggtgtcagaccaatctgtctacactgtctgaccccgtgcagcttgaggtccacattggatggttgctcttgcaagccccacgctgggttttcaaagaggaagatccaatccatctgcggtgccacagctggaaaaacaccgctctccacaaagtcacatacctgcaaaatggcaaaggacgcaaatacttccatcacaattccgatttttacattccgaaggctaccctgaaagacagcggcagctatttctgccggggactcgtcggctccaagaatgtgtcctccgaaaccgtgaatatcacgattacccaaggactggctgtgcctacaatctctagcttctttccgcctggataccaagtctccttctgtcttgtgatggtcctcctgtttgctgtggacacaggactgtacttttacgtg

SEQ ID NO: 2062 - DNA, 1434 bp, synthetic construct
  source 1..1434: mol_type = other DNA
atggccttaccagtgaccgccttgctcctgccgctggccttgctgctccacgccgccaggccggacatccagatgacacagagccctagcagcctgtctgccagcgtgggagacagagtgaccatcacatgcaaggccagccaggatgtgtctacagccgtggcctggttccagcagaagcctggaaaagcccctaagctgctgatctacagccccagctacagatacaccggcgtgcccagcagattttctggcagcggctctggcaccgacttcaccctgacaatatccagcctccagcctgaggacttcacctactactgccagcagctctacagcaccccttacacattcggccagggcaccaaggtggaaatcaaaggcggaggcggaagtggaggcggaggatctggcggcggaggctctgaagtgcaactggttcagagcggagccgaagtgaagaaacctggggcctctgtgaaggtgtcctgcaaagccagcggctacacctttaccgactactacctggacgtggtcgtgcggcaagctcctggacaaggactggaatggatcggcagagtgaacccctacaacggcggcaccatctacaaccagaaattcaagggaagagtgaccctgaccagagacaccagcacctccacagcctacctggaactgagcagcctgagaagcgaagataccgccgtgtactactgcgccagggaccactacagatatgaccctctgctggactactggggccagggaaccctggttacagtgtctagtacgcgtggaatgaggactgaggatcttcccaaagctgtcgtctttctcgaaccccaatggtatcgggtgctcgaaaaagactctgtgacactgaaatgccaaggggcctactctcccgaggacaactccacacagtggtttcataatgagtccctcatcagctctcaggccagctcttatttcattgatgccgctacagtggacgactccggcgagtatcggtgtcagaccaatctgtctacactgtctgaccccgtgcagcttgaggtccacattggatggttgctcttgcaagccccacgctgggttttcaaagaggaagatccaatccatctgcggtgccacagctggaaaaacaccgctctccacaaagtcacatacctgcaaaatggcaaaggacgcaaatacttccatcacaattccgatttttacattccgaaggctaccctgaaagacagcggcagctatttctgccggggactcgtcggctccaagaatgtgtcctccgaaaccgtgaatatcacgattacccaaggactggctgtgcctacaatctctagcttctttccgcctggataccaagtctccttctgtcttgtgatggtcctcctgtttgctgtggacacaggactgtacttttacgtg

SEQ ID NO: 2063 - DNA, 1452 bp, synthetic construct
  source 1..1452: mol_type = other DNA
atggccttaccagtgaccgccttgctcctgccgctggccttgctgctccacgccgccaggccggacatccagatgacacagagccctagcagcctgtctgccagcgtgggagacagagtgaccatcacctgtagagccagccagagcgtgtccaccagcagctacaactacatgcactggtatcagcagaagcccggcaagcctcctaagctgctgattaagtacgccagcaacctggaaagcggcgtgcccagcagattttctggcagcggctctggcaccgacttcaccctgacaatatccagcctccagcctgaggacttcgccacctactactgtcagcactcctgggagatccctctgacattcggccagggcaccaaggtggaaatcaaaggcggaggcggaagtggaggcggaggatctggcggcggaggctctgaagtgcaactggttcagagcggagccgaagtgaagaaacctggggcctctgtgaaggtgtcctgcaaggccagcggctacagcttcaccgactattatatgcactgggtccgacaggctccaggccagggacttgagtggatcggcagaatcaacccctacaacggcgctgccttctacagccagaacttcaaggatagagtgaccctgaccgtggacaccagcaccagcacagcctacctggaactgagcagcctgagaagcgaggacaccgccgtgtactactgcgccattgagagaggcgctgacctggaaggctacgctatggattattggggccagggaaccctggtcaccgtgtcatctacgcgtggaatgaggactgaggatcttcccaaagctgtcgtctttctcgaaccccaatggtatcgggtgctcgaaaaagactctgtgacactgaaatgccaaggggcctactctcccgaggacaactccacacagtggtttcataatgagtccctcatcagctctcaggccagctcttatttcattgatgccgctacagtggacgactccggcgagtatcggtgtcagaccaatctgtctacactgtctgaccccgtgcagcttgaggtccacattggatggttgctcttgcaagccccacgctgggttttcaaagaggaagatccaatccatctgcggtgccacagctggaaaaacaccgctctccacaaagtcacatacctgcaaaatggcaaaggacgcaaatacttccatcacaattccgatttttacattccgaaggctaccctgaaagacagcggcagctatttctgccggggactcgtcggctccaagaatgtgtcctccgaaaccgtgaatatcacgattacccaaggactggctgtgcctacaatctctagcttctttccgcctggataccaagtctccttctgtcttgtgatggtcctcctgtttgctgtggacacaggactgtacttttacgtg

SEQ ID NO: 2064 - DNA, 1446 bp, synthetic construct
  source 1..1446: mol_type = other DNA
atggccttaccagtgaccgccttgctcctgccgctggccttgctgctccacgccgccaggccggagatcgtgctgacacagtctccagccacactgagcgcttctccaggcgagagagtgaccctgacctgtagagccagcagcaacgtgatctccagctacgtgcactggtatcagcagaagcctggcagcagccccagactgtttctgtacagcaccagcaatctggcctccggcgtgccaagcagattttctggctctggcagcggcaccgacttcacctttaccatctctagcctggaagccgaggacgccgccacctactactgtcagcagtacagcggctaccctctgaccttcggccagggcacaagactggaaatcaaaggcggaggcggaagtggaggcggaggatctggcggcggaggctctcaagttcagctgcaagagtctggccctggcctggtcaagcctagcgaaacactgagcctgacctgcgccgtgtctggctactctatcaccagcgcctactattggaactggatcagacagcctcctggcaaaggactggaatggatcggctacatcagctacgacggcagaaacaactacaaccccagcctgaagaaccggatcaccatcaatcccgacaccagcaagaaccagttcagcctccagctgaacagcgtgacccctgaggataccgccgtgtactactgtgccagagaaggcgactacgacgtgggcaactactacgctatggactactggggccagggaaccctggtcacagtctcttctacgcgtggaatgaggactgaggatcttcccaaagctgtcgtctttctcgaaccccaatggtatcgggtgctcgaaaaagactctgtgacactgaaatgccaaggggcctactctcccgaggacaactccacacagtggtttcataatgagtccctcatcagctctcaggccagctcttatttcattgatgccgctacagtggacgactccggcgagtatcggtgtcagaccaatctgtctacactgtctgaccccgtgcagcttgaggtccacattggatggttgctcttgcaagccccacgctgggttttcaaagaggaagatccaatccatctgcggtgccacagctggaaaaacaccgctctccacaaagtcacatacctgcaaaatggcaaaggacgcaaatacttccatcacaattccgatttttacattccgaaggctaccctgaaagacagcggcagctatttctgccggggactcgtcggctccaagaatgtgtcctccgaaaccgtgaatatcacgattacccaaggactggctgtgcctacaatctctagcttctttccgcctggataccaagtctccttctgtcttgtgatggtcctcctgtttgctgtggacacaggactgtacttttacgtg

SEQ ID NO: 2065 - DNA, 1446 bp, synthetic construct
  source 1..1446: mol_type = other DNA
atggccttaccagtgaccgccttgctcctgccgctggccttgctgctccacgccgccaggccggagatcgtgctgacacagtctcccgccacactgtcactgtctccaggcgaaagagccacactgagctgtagagccagcagcaacgtgatctccagctacgtgcactggtatcagcagaagcctggacaggcccctcggctgctgatctacagcacaagcaatctggcctctggcatccccgccagattttctggctctggaagcggcaccgacttcaccctgaccataagcagcctggaacctgaggacttcgccgtgtactactgccagcagtatagcggctaccctctgaccttcggccagggcacaagactggaaatcaaaggcggaggcggaagtggaggcggaggatctggcggcggaggctctgaagtgcaactggtggaaagtggcggcggactggtgcaacctggaagaagcctgagactgtcctgtgccgccagcggctactctatcacaagcgcctactactggaactgggtccgacaggctcctggcaaaggactggaatgggtgtcctacatcagctacgacggcagaaacaactacaaccccagcctgaagaaccgcttcaccatcagccgggacaacgccaagaagtccctgtacctccagatgaacagcctgagagccgaggacacagccctgtactattgcgccaaagagggcgactacgacgtcggcaactactacgctatggactactggggccagggaaccaccgtgactgtctcttctacgcgtggaatgaggactgaggatcttcccaaagctgtcgtctttctcgaaccccaatggtatcgggtgctcgaaaaagactctgtgacactgaaatgccaaggggcctactctcccgaggacaactccacacagtggtttcataatgagtccctcatcagctctcaggccagctcttatttcattgatgccgctacagtggacgactccggcgagtatcggtgtcagaccaatctgtctacactgtctgaccccgtgcagcttgaggtccacattggatggttgctcttgcaagccccacgctgggttttcaaagaggaagatccaatccatctgcggtgccacagctggaaaaacaccgctctccacaaagtcacatacctgcaaaatggcaaaggacgcaaatacttccatcacaattccgatttttacattccgaaggctaccctgaaagacagcggcagctatttctgccggggactcgtcggctccaagaatgtgtcctccgaaaccgtgaatatcacgattacccaaggactggctgtgcctacaatctctagcttctttccgcctggataccaagtctccttctgtcttgtgatggtcctcctgtttgctgtggacacaggactgtacttttacgtg

SEQ ID NO: 2066 - DNA, 1473 bp, synthetic construct
  source 1..1473: mol_type = other DNA
atggccttaccagtgaccgccttgctcctgccgctggccttgctgctccacgccgccaggccggacgtggtcatgacacagaccccactgagcctgcctgtgtctctgggagatcaggccagcatctcctgtagaagcagccagagcctggtgcacagcaacggcaacacctacctgcggtggtatctccagaagcctggacagagccccaaggtgctgatctacaaggtgtccaacagagtgtccggcgtgcccgatagattttctggcagcggctctggcaccgacttcaccctgaagatcaatagagtggaagccgaggacctgggcgtgtacttctgtagccagagcacccatgtgccttggacctttggcggaggcaccaagctggaaatcaagagcagcgccgacgacgccaagaaggacgccgccaaaaaggatgatgccaagaaagacgatgctaaaaaagacggcggcgtgaagctggacgagacaggcggaggacttgttcaacctggcggagccatgaagctgagctgtgtgaccagcggctttaccttcggccactactggatgaactgggtccgacagtcccctgagaaaggactggaatgggtcgcccagttcagaaacaagccctacaactacgaaacctactacagcgacagcgtgaagggcagattcaccatcagccgggacgacagcaagtccagcgtgtacctccagatgaacaacctgcgcgtggaagataccggcatctactactgtaccggggccagctacggcatggaatatctcggccagggcaccagcgtgaccgtgtctacaacgcgtggaatgaggactgaggatcttcccaaagctgtcgtctttctcgaaccccaatggtatcgggtgctcgaaaaagactctgtgacactgaaatgccaaggggcctactctcccgaggacaactccacacagtggtttcataatgagtccctcatcagctctcaggccagctcttatttcattgatgccgctacagtggacgactccggcgagtatcggtgtcagaccaatctgtctacactgtctgaccccgtgcagcttgaggtccacattggatggttgctcttgcaagccccacgctgggttttcaaagaggaagatccaatccatctgcggtgccacagctggaaaaacaccgctctccacaaagtcacatacctgcaaaatggcaaaggacgcaaatacttccatcacaattccgatttttacattccgaaggctaccctgaaagacagcggcagctatttctgccggggactcgtcggctccaagaatgtgtcctccgaaaccgtgaatatcacgattacccaaggactggctgtgcctacaatctctagcttctttccgcctggataccaagtctccttctgtcttgtgatggtcctcctgtttgctgtggacacaggactgtacttttacgtg

SEQ ID NO: 2067 - DNA, 1461 bp, synthetic construct
  source 1..1461: mol_type = other DNA
atggccttaccagtgaccgccttgctcctgccgctggccttgctgctccacgccgccaggccgcaggtgcaactggtggaatctggcggcaatctggttcagcctggcggctctctgagactgtcttgtgccgccagcggcttcaccttcggcagcttttctatgagctgggtccgacaagctcctggcggaggacttgaatgggtggcaggactgtctgccagaagcagcctgacacactacgccgactctgtgaagggcagattcaccatcagccgggacaacgccaagaacagcgtgtacctccagatgaacagcctgagagtggaagataccgccgtgtactactgcgccagaagaagctacgacagcagcggctactggggccacttctacagctacatggatgtgtggggccagggcaccctggttacagtttctggcggaggcggaagtggaggcggaggatctggcggcggaggctcttctgtgctgacccagcctagctccgtgtctgctgctcctggacagaaagtgaccatctcctgtagcggcagcaccagcaacatcggcaacaactacgtgtcctggtatcagcagcaccccggcaaggcccctaagctgatgatctacgacgtgtccaagaggcccagcggcgtgccagatagattttccggcagcaagagcggcaacagcgccagcctggatattagcggactccagtctgaggacgaggccgactactattgcgccgcctgggatgatagcctgagcgagtttctgtttggcaccggcaccaagctgacagtgcttggaacgcgtggaatgaggactgaggatcttcccaaagctgtcgtctttctcgaaccccaatggtatcgggtgctcgaaaaagactctgtgacactgaaatgccaaggggcctactctcccgaggacaactccacacagtggtttcataatgagtccctcatcagctctcaggccagctcttatttcattgatgccgctacagtggacgactccggcgagtatcggtgtcagaccaatctgtctacactgtctgaccccgtgcagcttgaggtccacattggatggttgctcttgcaagccccacgctgggttttcaaagaggaagatccaatccatctgcggtgccacagctggaaaaacaccgctctccacaaagtcacatacctgcaaaatggcaaaggacgcaaatacttccatcacaattccgatttttacattccgaaggctaccctgaaagacagcggcagctatttctgccggggactcgtcggctccaagaatgtgtcctccgaaaccgtgaatatcacgattacccaaggactggctgtgcctacaatctctagcttctttccgcctggataccaagtctccttctgtcttgtgatggtcctcctgtttgctgtggacacaggactgtacttttacgtg

SEQ ID NO: 2068 - DNA, 1434 bp, synthetic construct
  source 1..1434: mol_type = other DNA
atggccttaccagtgaccgccttgctcctgccgctggccttgctgctccacgccgccaggccgcagtctgtggtcacacagcctccatctgtgtctggcgctccaggccagagagtgaccatctcttgtaccggcagcagcagcaatatcggagccggctatgacgtgcactggtatcagcagctccctggcacagcccctaaactgctgatctacggcaacagcaacagacccagcggcgtgcccgatagattttccggctctaagagcggcacaagcgccagcctggctattactggactccaggccgaggacgaggccgactactactgtcagagctacgacagcagcctgagcggcagctatgtgtttggcaccggcaccaagctgacagtgcttggaggcggaggcggaagtggaggcggaggatctggcggcggaggctctgaagttcaactggtggaaaccggcggcaacctggttcaacctggcgcttctctgagactgagctgtgccgccagcggctttagctttagcggaacagccatgcactgggtccgacaggcacctggcaaaggactggaatgggtgtccaccatcagcagcacaggcagaagcacctactaccgggacagcgtgaagggcagattcaccatctccagagacaacagcaagaacaccctgtacctccagatgaacagcctgagaggcgaggacaccgccgtgtactattgtgccagagtgtccttcgactactggggccagggaaccctggtcacagtctcttctacgcgtggaatgaggactgaggatcttcccaaagctgtcgtctttctcgaaccccaatggtatcgggtgctcgaaaaagactctgtgacactgaaatgccaaggggcctactctcccgaggacaactccacacagtggtttcataatgagtccctcatcagctctcaggccagctcttatttcattgatgccgctacagtggacgactccggcgagtatcggtgtcagaccaatctgtctacactgtctgaccccgtgcagcttgaggtccacattggatggttgctcttgcaagccccacgctgggttttcaaagaggaagatccaatccatctgcggtgccacagctggaaaaacaccgctctccacaaagtcacatacctgcaaaatggcaaaggacgcaaatacttccatcacaattccgatttttacattccgaaggctaccctgaaagacagcggcagctatttctgccggggactcgtcggctccaagaatgtgtcctccgaaaccgtgaatatcacgattacccaaggactggctgtgcctacaatctctagcttctttccgcctggataccaagtctccttctgtcttgtgatggtcctcctgtttgctgtggacacaggactgtacttttacgtg

SEQ ID NO: 2069 - DNA, 1440 bp, synthetic construct
  source 1..1440: mol_type = other DNA
atggccttaccagtgaccgccttgctcctgccgctggccttgctgctccacgccgccaggccgcagtctgtggttacacagcctgcctccgtgtctggctctcctggccagagcatcaccatcagctgtaccggcaccagctctgatgtcggcggctacaattacgtgtcctggtatcagcagcaccccggcaaggcccctaagctgatgatctacgacgtgtccaagaggcccagcggcgtgtccaatagattcagcggcagcaagagcggcaacaccgccagcctgacaatttctggactgcaagccgaggacgaggccgactactactgtagcagctacaccagcagcagcacactggtgtttggcggaggcaccaagctgacagttcttggaggcggaggcggaagtggaggcggaggatctggcggcggaggctctgaagttcagctggttgaaagcggcggagcctttgttcagcctggcggatctctgagactgagctgtgccgccagcggcttcacattttccagctacgccatgacctgggtccgacaggctcctggcaaaggactggaatgggtgtccaccatctccggcagaggcagaagcaccttctacgccgatagcgtgaagggcagattcacaatcagccgggacaacagcaagaacaccctgtacctccagatgaacagcctgagagccgaggataccgccgtgtactactgtgcccggtactatcacgctggcgcctttgatctttggggccagggaacactggtcaccgtgtcatctacgcgtggaatgaggactgaggatcttcccaaagctgtcgtctttctcgaaccccaatggtatcgggtgctcgaaaaagactctgtgacactgaaatgccaaggggcctactctcccgaggacaactccacacagtggtttcataatgagtccctcatcagctctcaggccagctcttatttcattgatgccgctacagtggacgactccggcgagtatcggtgtcagaccaatctgtctacactgtctgaccccgtgcagcttgaggtccacattggatggttgctcttgcaagccccacgctgggttttcaaagaggaagatccaatccatctgcggtgccacagctggaaaaacaccgctctccacaaagtcacatacctgcaaaatggcaaaggacgcaaatacttccatcacaattccgatttttacattccgaaggctaccctgaaagacagcggcagctatttctgccggggactcgtcggctccaagaatgtgtcctccgaaaccgtgaatatcacgattacccaaggactggctgtgcctacaatctctagcttctttccgcctggataccaagtctccttctgtcttgtgatggtcctcctgtttgctgtggacacaggactgtacttttacgtg

SEQ ID NO: 2070 - DNA, 1446 bp, synthetic construct
  source 1..1446: mol_type = other DNA
atggccttaccagtgaccgccttgctcctgccgctggccttgctgctccacgccgccaggccggacgtggtcatgacacagagcccttctagcctgtctgccagcgtgggcgacagagtgacaatcacctgtcagagcagcctggacatcagccactacctgaactggtatcagcagaagcccggcaaggcccctaagctgctgatctacgacgccagcaatctggaaaccggcgtgcccagcagattttctggcagcggaagcggcacccacttcaccttcacaatatccagcctccagcctgaggacttcgccacctactactgccagcagtacgacaacctgcctctgacctttggcggaggcaccaagctggaaatcaagagaggcggaggcggaagtggaggcggaggatctggcggcggaggctctcaagttcaactggttcaatcaggcggaggcgtggtgcaacctggtggctctctgagagtgtcttgtgctgcctctggcgtgaccctgagcgactatggaatgcactgggtccgacaggcccctggcaaaggacttgagtgggtcgccttcatcagaaacgacggcagcgacaagtattacgccgacagcgtgaagggcagattcaccatcagccgggacaacagcgagaaaaccgtgtctctccagatgtctagcctgagagccgaggacaccgccgtgtactactgtgccaagaatggcgagagcggccctctggactactggtatctggatctgtggggcagaggcaccctggtcacagtctcttctacgcgtggaatgaggactgaggatcttcccaaagctgtcgtctttctcgaaccccaatggtatcgggtgctcgaaaaagactctgtgacactgaaatgccaaggggcctactctcccgaggacaactccacacagtggtttcataatgagtccctcatcagctctcaggccagctcttatttcattgatgccgctacagtggacgactccggcgagtatcggtgtcagaccaatctgtctacactgtctgaccccgtgcagcttgaggtccacattggatggttgctcttgcaagccccacgctgggttttcaaagaggaagatccaatccatctgcggtgccacagctggaaaaacaccgctctccacaaagtcacatacctgcaaaatggcaaaggacgcaaatacttccatcacaattccgatttttacattccgaaggctaccctgaaagacagcggcagctatttctgccggggactcgtcggctccaagaatgtgtcctccgaaaccgtgaatatcacgattacccaaggactggctgtgcctacaatctctagcttctttccgcctggataccaagtctccttctgtcttgtgatggtcctcctgtttgctgtggacacaggactgtacttttacgtg

SEQ ID NO: 2071 - DNA, 1467 bp, synthetic construct
  source 1..1467: mol_type = other DNA
atggccttaccagtgaccgccttgctcctgccgctggccttgctgctccacgccgccaggccggacgtgatgctgacccagacaccactgagcctgcctgtgtctctgggcgatcaggccagcatctcctgtagaagcagccagagcatcctgcacagcaccggcgatacctacctggaatggtatctccagaagcctggacagagccccaagctgctgattaacaaggtgtccaaccggctgagcggcgtgcccgatagattttctggcagcggctctggcaccgacttcaccctgaagatcagcagagtggaagccgaggacctgggcgtgtactactgcttccaaggcagccatgttccttggacctttggcggaggcaccaagctggaaatcaagagagctgacgccgctcctaccgtgtccatctttcctggaggcggtggaagtggcggcggtggttcaggcggcggaggatctcaagtgaagctccagcagagcggccctagccttgtgaaacctggcgcttccgtgaagatgagctgcaaggccagcggctacaccttcaccgatttctacatgaaatgggtcaagcagagccacggcaagtctctggaatggatcggcgacatcaaccccaacatcggagacaccttctacaaccagaagttcaagggcaaagccacactgaccgtggacaagagcagcagcaccgcctacatgcagctcaacagcctgaccagcgaggacagcgccgtgtacttttgttccgtgggctacttcgacgtgtggggagccggaacaaccgtgacagtctcttctacgcgtggaatgaggactgaggatcttcccaaagctgtcgtctttctcgaaccccaatggtatcgggtgctcgaaaaagactctgtgacactgaaatgccaaggggcctactctcccgaggacaactccacacagtggtttcataatgagtccctcatcagctctcaggccagctcttatttcattgatgccgctacagtggacgactccggcgagtatcggtgtcagaccaatctgtctacactgtctgaccccgtgcagcttgaggtccacattggatggttgctcttgcaagccccacgctgggttttcaaagaggaagatccaatccatctgcggtgccacagctggaaaaacaccgctctccacaaagtcacatacctgcaaaatggcaaaggacgcaaatacttccatcacaattccgatttttacattccgaaggctaccctgaaagacagcggcagctatttctgccggggactcgtcggctccaagaatgtgtcctccgaaaccgtgaatatcacgattacccaaggactggctgtgcctacaatctctagcttctttccgcctggataccaagtctccttctgtcttgtgatggtcctcctgtttgctgtggacacaggactgtacttttacgtg

SEQ ID NO: 2072 - DNA, 1467 bp, synthetic construct
  source 1..1467: mol_type = other DNA
atggccttaccagtgaccgccttgctcctgccgctggccttgctgctccacgccgccaggccgctgcctgttctgacacagcctccatccgtgtctgtggcccctggaaagaccgccagaatcacatgcggcggcaacaacatcggcagcaagagcgtgcactggtatcagcagaagcctggacaggctcctgtgctggtggtgtacgacgacagcgatagacctagcggcatccccgagagattcagcggcagcaattccggcaataccgccacactgaccatcagcagagtggaagctggcgacgaggccgactactactgccaagtgtgggacagcagcagcgactacgtggtgtttggcggcggaacaaagctgacagtgcttggcggaggcggaagtggaggcggaggatctggcggcggaggctctgaagttcaactggtgcagagcggagccgaagtgaagaagccaggcgagagcctgaagattagctgcaaaggcagcggctacagcttcaccagctactggatcggctgggtccgacagatgcctggcaaaggactggaatggatgggcatcatctaccccggcgacagcgacaccagatacagccctagctttcagggccaagtgaccatctccgccgacaagagcatcagcacagcctacctccagtggtcctctctgaaggccagcgataccgccatgtactactgcgccagacaagtctggggatggcaaggcggcatgtaccccaggtctaactggtggtacaacctggactcttggggccagggcacactggtcacagtctcttctacgcgtggaatgaggactgaggatcttcccaaagctgtcgtctttctcgaaccccaatggtatcgggtgctcgaaaaagactctgtgacactgaaatgccaaggggcctactctcccgaggacaactccacacagtggtttcataatgagtccctcatcagctctcaggccagctcttatttcattgatgccgctacagtggacgactccggcgagtatcggtgtcagaccaatctgtctacactgtctgaccccgtgcagcttgaggtccacattggatggttgctcttgcaagccccacgctgggttttcaaagaggaagatccaatccatctgcggtgccacagctggaaaaacaccgctctccacaaagtcacatacctgcaaaatggcaaaggacgcaaatacttccatcacaattccgatttttacattccgaaggctaccctgaaagacagcggcagctatttctgccggggactcgtcggctccaagaatgtgtcctccgaaaccgtgaatatcacgattacccaaggactggctgtgcctacaatctctagcttctttccgcctggataccaagtctccttctgtcttgtgatggtcctcctgtttgctgtggacacaggactgtacttttacgtg

SEQ ID NO: 2073 - DNA, 1446 bp, synthetic construct
  source 1..1446: mol_type = other DNA
atggccttaccagtgaccgccttgctcctgccgctggccttgctgctccacgccgccaggccggagctggtcatgacacagagccctgcttctctggccgtgtcactgggacagagagccaccatctcttgcagagccagcgagagcgtggacagctacggcaagagcttcatgcactggtatcagctcaagcccggccagcctcctaagctgctgatctacagagcctccaacctggaaagcggcgtgccagccagattttctggcagcggcagcagaaccgacttcaccctgaccattgatcccgtggaagccgatgatgccgccacctactactgccagcagaacaacgaggacccctggacatttggcggaggcaccaagctggaaatcaaaggcggaggcggaagtggaggcggaggatctggcggcggaggctctgaagtgcagctcgaacagtctggccccgagcttgtgaaacctggcgcttccgtgaagatgagctgcaaggccagcggctacaccttcaccaactactacatgaaatgggtcaagcagagccacggcaagtccctggaatggatcggcgatctgaaccccaacaacggcgacaccttctacaaccagaagttcaagggcaaagccacactgaccgtggacaagagcagcaacaccgcctacatgcagctcaactccctgaccagcgaggacagcgccgtgtactactgtgccagaaccggcagatacgaagagaacgctatggactactggggccagggcacaagcgtgacagtctcttctacgcgtggaatgaggactgaggatcttcccaaagctgtcgtctttctcgaaccccaatggtatcgggtgctcgaaaaagactctgtgacactgaaatgccaaggggcctactctcccgaggacaactccacacagtggtttcataatgagtccctcatcagctctcaggccagctcttatttcattgatgccgctacagtggacgactccggcgagtatcggtgtcagaccaatctgtctacactgtctgaccccgtgcagcttgaggtccacattggatggttgctcttgcaagccccacgctgggttttcaaagaggaagatccaatccatctgcggtgccacagctggaaaaacaccgctctccacaaagtcacatacctgcaaaatggcaaaggacgcaaatacttccatcacaattccgatttttacattccgaaggctaccctgaaagacagcggcagctatttctgccggggactcgtcggctccaagaatgtgtcctccgaaaccgtgaatatcacgattacccaaggactggctgtgcctacaatctctagcttctttccgcctggataccaagtctccttctgtcttgtgatggtcctcctgtttgctgtggacacaggactgtacttttacgtg

SEQ ID NO: 2074 - DNA, 1440 bp, synthetic construct; identical to SEQ ID NO: 2047
  source 1..1440: mol_type = other DNA

SEQ ID NO: 2075 - DNA, 1440 bp, synthetic construct; identical to SEQ ID NO: 1956
  source 1..1440: mol_type = other DNA

SEQ ID NO: 2076 - DNA, 1428 bp, synthetic construct
  source 1..1428: mol_type = other DNA
atggccttaccagtgaccgccttgctcctgccgctggccttgctgctccacgccgccaggccggacgtggtcatgacacagagcccttctagcctgtctgccagcgtgggcgacagagtgaccatcacctgtatggcctccgaggacatctacatccggctggcctggtatcagcagaagcctggaaacgcccctaagctgctgatctacgccgccacctctctggaaacaggcgtgccaagcagattttccggcagcggctctggcaccgatttcaccctgacaatatccagcctccagcctgaggacttcgccacctactactgccagcagtattggagcagcccctggacatttggcggaggcaccaaggtggaaatcaaaggcggaggcggaagtggaggcggaggatctggcggcggaggctctcaggttcagctgcaagagtctggccccggactggtcaagcctagccaaacactgagcctgacctgtaccgtgtccggctacagcatcaccagcgactacacctggaactggatcagacagcctcctggcaacggactggaatggatcggctacatcacctacagcggcagcaccagctacaaccccagcctgaaaagccgggtgctgatctccgtggacaccagcaagaatcaggtgtccctgaagctgagcagcgtgacagccgctgataccgccgtgtactactgtgccagactggggagaagatacacaatggactactggggccagggcaccaccgtgacagtttcttctacgcgtggaatgaggactgaggatcttcccaaagctgtcgtctttctcgaaccccaatggtatcgggtgctcgaaaaagactctgtgacactgaaatgccaaggggcctactctcccgaggacaactccacacagtggtttcataatgagtccctcatcagctctcaggccagctcttatttcattgatgccgctacagtggacgactccggcgagtatcggtgtcagaccaatctgtctacactgtctgaccccgtgcagcttgaggtccacattggatggttgctcttgcaagccccacgctgggttttcaaagaggaagatccaatccatctgcggtgccacagctggaaaaacaccgctctccacaaagtcacatacctgcaaaatggcaaaggacgcaaatacttccatcacaattccgatttttacattccgaaggctaccctgaaagacagcggcagctatttctgccggggactcgtcggctccaagaatgtgtcctccgaaaccgtgaatatcacgattacccaaggactggctgtgcctacaatctctagcttctttccgcctggataccaagtctccttctgtcttgtgatggtcctcctgtttgctgtggacacaggactgtacttttacgtg

SEQ ID NO: 2077 - DNA, 1443 bp, synthetic construct
  source 1..1443: mol_type = other DNA
atggccttaccagtgaccgccttgctcctgccgctggccttgctgctccacgccgccaggccggaggtgcaactggttgagtctggcggaggactggtgcagcctggaagaagcctgagactgtcttgtgccgccagcggcttcaccttcgacgattatgccatgcactgggtccgacaggcccctggcaaaggacttgaatgggtgtccggcatctcctggaacagcggctctatcggctacgccgattccgtgaagggcagattcaccatcagccgggacaacgccaagaacagcctgtacctccagatgaactccctgagagccgaggacacagccctgtactactgcgccaaagacaaaggcggaggctactacgacttttggagcggcagcgattattggggccagggcacactggtcacagtgtctagcggcggaggcggaagtggaggcggaggatctggcggcggaggctcttcttctgagctgacacaggaccctgccgtgtctgttgctctgggccagacagtgcggattacctgtcagggcgatagcctgagaagctactacgcctcctggtatcagcagaagccaggccaggctcctgtgctggtcatctacggcaagaacaacagacccagcggcatccccgatagattcagcggaagcagctctggcaataccgccagcctgacaattactggcgctcaggccgaggacgaggccgactactactgcaacagcagagatagcagcggctgggttttcggcggaggcacaaaactgacagtgctgacgcgtggaatgaggactgaggatcttcccaaagctgtcgtctttctcgaaccccaatggtatcgggtgctcgaaaaagactctgtgacactgaaatgccaaggggcctactctcccgaggacaactccacacagtggtttcataatgagtccctcatcagctctcaggccagctcttatttcattgatgccgctacagtggacgactccggcgagtatcggtgtcagaccaatctgtctacactgtctgaccccgtgcagcttgaggtccacattggatggttgctcttgcaagccccacgctgggttttcaaagaggaagatccaatccatctgcggtgccacagctggaaaaacaccgctctccacaaagtcacatacctgcaaaatggcaaaggacgcaaatacttccatcacaattccgatttttacattccgaaggctaccctgaaagacagcggcagctatttctgccggggactcgtcggctccaagaatgtgtcctccgaaaccgtgaatatcacgattacccaaggactggctgtgcctacaatctctagcttctttccgcctggataccaagtctccttctgtcttgtgatggtcctcctgtttgctgtggacacaggactgtacttttacgtg

SEQ ID NO: 2078 - DNA, 1470 bp, synthetic construct
  source 1..1470: mol_type = other DNA
atggccttaccagtgaccgccttgctcctgccgctggccttgctgctccacgccgccaggccggaagtgcagctccagcagtctggacctggcctggttaagcctagccagacactgagcctgacctgtgccatcagcggcgatagcgtgctgagcaacagcgacacctggaactggatcagacagagccctagcagaggactggaatggctgggcagaacctaccacagaagcacttggtacgacgactacgccagctctgtgcggggcagagtgtccatcaatgtggacaccagcaagaaccagtacagcctgcaactgaacgccgtgacacctgaggataccggcgtgtactactgcgccagagacagactccaggacggcaactcttggagcgacgcctttgatgtgtggggccagggcacaatggtcaccgtttctagcggcggaggcggaagtggaggcggaggatctggcggcggaggctctcaatctgctctgacacagcctgccagcgtgtcaggatctcctggacagagcatcaccatctcttgcaccggcaccagctctgatgtcggcggctacaattacgtgtcctggtatcagcagcaccccggcaaggcccctaagctgatgatctacgacgtgtccaacagacccagcggcgtgtccaatagattctccggcagcaagagcggcaacaccgccagcctgacaatttctggactgcaagccgaggacgaggccgactactactgtagcagctacaccagcagcagcacactggtgtacgtgttcggcacaggcaccaaagtgaccgtgcttacgcgtggaatgaggactgaggatcttcccaaagctgtcgtctttctcgaaccccaatggtatcgggtgctcgaaaaagactctgtgacactgaaatgccaaggggcctactctcccgaggacaactccacacagtggtttcataatgagtccctcatcagctctcaggccagctcttatttcattgatgccgctacagtggacgactccggcgagtatcggtgtcagaccaatctgtctacactgtctgaccccgtgcagcttgaggtccacattggatggttgctcttgcaagccccacgctgggttttcaaagaggaagatccaatccatctgcggtgccacagctggaaaaacaccgctctccacaaagtcacatacctgcaaaatggcaaaggacgcaaatacttccatcacaattccgatttttacattccgaaggctaccctgaaagacagcggcagctatttctgccggggactcgtcggctccaagaatgtgtcctccgaaaccgtgaatatcacgattacccaaggactggctgtgcctacaatctctagcttctttccgcctggataccaagtctccttctgtcttgtgatggtcctcctgtttgctgtggacacaggactgtacttttacgtg

SEQ ID NO: 2079 - DNA, 1464 bp, synthetic construct
  source 1..1464: mol_type = other DNA
atggccttaccagtgaccgccttgctcctgccgctggccttgctgctccacgccgccaggccgcaggtgcaactggttcagtctggggccgaagtgaagaaacctggggcctctgtgaaggtgtcctgcaaggcttccggctacacctttaccagctacgacatcaactgggtccgacaggccacaggccaaggactggaatggatgggctggatgaaccccaacagcggcaataccggctacgcccagaaattccagggcagagtgaccatgaccagaaacaccagcatcagcaccgcctacatggaactgagcagcctgagaagcgaggacaccgccgtgtactattgcgccagaggcgacagcaactactggtcctactacggcatggacgtgtggggccagggaacactggttacagtttctagcggcggaggcggaagtggaggcggaggatctggcggcggaggctctggcggtggtggatctcaatctgtgctgacccagcctagatccgtgtctggctctcctggacagagcgtgaccatctcttgtaccggcaccagctctgatgtcggcggctacaattacgtgtcctggtatcagcagcaccccggcgaagcccctaagctgattatctacgacgccgacaagcggcccagcggcatcagcaatagattcagctctggcaagagcggcaacaccgccagcctgacaatcagcggactccaggtggaagatgaggccgactactactgctgctcctatgccggcggaagcacctgggttttcggaggcggtacaaaagtgaccgtgctgacgcgtggaatgaggactgaggatcttcccaaagctgtcgtctttctcgaaccccaatggtatcgggtgctcgaaaaagactctgtgacactgaaatgccaaggggcctactctcccgaggacaactccacacagtggtttcataatgagtccctcatcagctctcaggccagctcttatttcattgatgccgctacagtggacgactccggcgagtatcggtgtcagaccaatctgtctacactgtctgaccccgtgcagcttgaggtccacattggatggttgctcttgcaagccccacgctgggttttcaaagaggaagatccaatccatctgcggtgccacagctggaaaaacaccgctctccacaaagtcacatacctgcaaaatggcaaaggacgcaaatacttccatcacaattccgatttttacattccgaaggctaccctgaaagacagcggcagctatttctgccggggactcgtcggctccaagaatgtgtcctccgaaaccgtgaatatcacgattacccaaggactggctgtgcctacaatctctagcttctttccgcctggataccaagtctccttctgtcttgtgatggtcctcctgtttgctgtggacacaggactgtacttttacgtg

SEQ ID NO: 2080 - DNA, 1470 bp, synthetic construct
  source 1..1470: mol_type = other DNA
atggccttaccagtgaccgccttgctcctgccgctggccttgctgctccacgccgccaggccggaagtgcagctccagcagtctggacctggcctggttaagcctagccagacactgagcctgacctgtgccatcagcggcgatagcgtgtcctctaatagcgccgcctggaactggatcagacagagccctagcagaggactggaatggctgggcagaacctactaccgcagcaagtggtacagcgactacgccgtgtccgtgaagtcccggatcaccatcaatcccgacaccagcaagaaccagttcagcctgcaactgaacagcgtgacccctgaggataccgccgtgtactactgcgccagagatccctacgacttttggagcggctaccccgacgcctttgacatctggggacagggcacaatggtcaccgtttctagcggcggaggcggaagtggaggcggaggatctggcggcggaggctctcaatctgctctgacacagcctgccagcgtgtcaggatctcctggacagagcatcaccatctcttgcaccggcaccagctctgatgtcggcggctacaattacgtgtcctggtatcagcagcaccccggcaaggcccctaaagtgattatcagcgaagtgaacaacagacccagcggcgtgtcccacagattcagcggctctaagtctggcaacaccgccagcctgacaatctctggactgcaagccgaggacgaggccgactacttctgtagcagctacaccagcggcagaaccctgtacgtgttcggcacaggcagcaaagtgacagtgctgggaacgcgtggaatgaggactgaggatcttcccaaagctgtcgtctttctcgaaccccaatggtatcgggtgctcgaaaaagactctgtgacactgaaatgccaaggggcctactctcccgaggacaactccacacagtggtttcataatgagtccctcatcagctctcaggccagctcttatttcattgatgccgctacagtggacgactccggcgagtatcggtgtcagaccaatctgtctacactgtctgaccccgtgcagcttgaggtccacattggatggttgctcttgcaagccccacgctgggttttcaaagaggaagatccaatccatctgcggtgccacagctggaaaaacaccgctctccacaaagtcacatacctgcaaaatggcaaaggacgcaaatacttccatcacaattccgatttttacattccgaaggctaccctgaaagacagcggcagctatttctgccggggactcgtcggctccaagaatgtgtcctccgaaaccgtgaatatcacgattacccaaggactggctgtgcctacaatctctagcttctttccgcctggataccaagtctccttctgtcttgtgatggtcctcctgtttgctgtggacacaggactgtacttttacgtg

SEQ ID NO: 2081 - DNA, 1467 bp, synthetic construct
  source 1..1467: mol_type = other DNA
atggccttaccagtgaccgccttgctcctgccgctggccttgctgctccacgccgccaggccggaagtgcagctccagcagtctggacctggcctggttaagcctagccagacactgagcctgacctgtgccatcagcggcgattccatgctgagcaacagcgacacctggaactggatcagacagagccccagcagaggcctggaatggctgggcagaacataccacagaagcacttggtacgacgactacgccagctctgtgcggggcagagtgtccatcaatgtggacaccagcaagaaccagtacagcctgcaactgaacgccgtgacacctgaggataccggcgtgtactactgtgccagagtgcggctccaggacggcaattcttggagcgacgcctttgatgtgtggggccagggcacaatggtcaccgtttctagcggcggaggcggaagtggaggcggaggatctggcggcggaggctctcaatctgctctgacacagcctgccagcgcctctggatctcctggacagagcgtgaccatctcctgtaccggcacctcttctgatgtcggcggctacaactacgtgtcctggtatcagcagcaccccggcaaggcccctaagctgatgatctacgacgtgtccaacagacccagcggcgtgtccaatagattctccggcagcaagagcggcaacaccgccagcctgacaatttctggactgcaagccgaggacgaggccgactactactgtagcagctacaccagcagcagcacactgtacgtgttcggcacaggcacccagctcacagttcttacgcgtggaatgaggactgaggatcttcccaaagctgtcgtctttctcgaaccccaatggtatcgggtgctcgaaaaagactctgtgacactgaaatgccaaggggcctactctcccgaggacaactccacacagtggtttcataatgagtccctcatcagctctcaggccagctcttatttcattgatgccgctacagtggacgactccggcgagtatcggtgtcagaccaatctgtctacactgtctgaccccgtgcagcttgaggtccacattggatggttgctcttgcaagccccacgctgggttttcaaagaggaagatccaatccatctgcggtgccacagctggaaaaacaccgctctccacaaagtcacatacctgcaaaatggcaaaggacgcaaatacttccatcacaattccgatttttacattccgaaggctaccctgaaagacagcggcagctatttctgccggggactcgtcggctccaagaatgtgtcctccgaaaccgtgaatatcacgattacccaaggactggctgtgcctacaatctctagcttctttccgcctggataccaagtctccttctgtcttgtgatggtcctcctgtttgctgtggacacaggactgtacttttacgtg

SEQ ID NO: 2082 - DNA, 1440 bp, synthetic construct
  source 1..1440: mol_type = other DNA
atggccttaccagtgaccgccttgctcctgccgctggccttgctgctccacgccgccaggccggagatcgtgctgacacagtctcccgccacactgtcactgtctccaggcgaaagagccacactgagctgtagcgccagcagcagcgtgtcctacatgtactggtatcagcagaagcccggacaggcccctagactgctgatctacagaaccagcaacctggcctctggcatccccgccagattttctggctctggcagcggcaccgatttcaccctgaccataagcagcctggaacctgaggacttcgccgtgtactactgccagcagtaccacagctaccccaccacctttggacagggcaccaaggtggaaatcaagcggacagttggcggaggcggaagtggaggcggaggatctggcggcggaggctctgaagtgcagctggttgaatcaggtggcggcctggttcaacctggcggatctctgagactgtcttgtgccgccagcggcttcagcttcaacacctacgccatgaactgggtccgacaggctcctggcaaaggactggaatgggtgtcccacatcagaagcaagagcaacaacttcgccacctactacgccgacagcgtgaaggacagattcaccatcagccgggacaacgccaagaacagcctgtacctccagatgaactccctgagagccgaggacaccgccgtgtattattgcgccagacaaggcggcgacttccctatggattattggggccagggcaccctggtcaccgtttcttctacgcgtggaatgaggactgaggatcttcccaaagctgtcgtctttctcgaaccccaatggtatcgggtgctcgaaaaagactctgtgacactgaaatgccaaggggcctactctcccgaggacaactccacacagtggtttcataatgagtccctcatcagctctcaggccagctcttatttcattgatgccgctacagtggacgactccggcgagtatcggtgtcagaccaatctgtctacactgtctgaccccgtgcagcttgaggtccacattggatggttgctcttgcaagccccacgctgggttttcaaagaggaagatccaatccatctgcggtgccacagctggaaaaacaccgctctccacaaagtcacatacctgcaaaatggcaaaggacgcaaatacttccatcacaattccgatttttacattccgaaggctaccctgaaagacagcggcagctatttctgccggggactcgtcggctccaagaatgtgtcctccgaaaccgtgaatatcacgattacccaaggactggctgtgcctacaatctctagcttctttccgcctggataccaagtctccttctgtcttgtgatggtcctcctgtttgctgtggacacaggactgtacttttacgtg

SEQ ID NO: 2083 - DNA, 1428 bp, synthetic construct
  source 1..1428: mol_type = other DNA
atggccttaccagtgaccgccttgctcctgccgctggccttgctgctccacgccgccaggccggacgtggtcatgacacagagcccttctagcctgtctgccagcgtgggcgacagagtgaccatcacctgtaaagccagcgaggacatctacatccggctggcctggtatcagcagaagcctggaaaggcccctaagctgctgatctacgccgccacctctctggaaacaggcgtgccaagcagattttccggcagcggctctggcaccgatttcaccctgacaatatccagcctccagcctgaggacttcgccacctactactgccagcagtattggaccacaccttggacctttggcggaggcaccaaggtggaaatcaaaggcggaggcggaagtggaggcggaggatctggcggcggaggctctcaggtgcagctccaagagtctggccctggactggtcaagcctagccagacactgagcctgacctgtaccgtgtccggctacagcatcaccatcgactacacctggaactggatcagacagcctcctggcaaaggactggaatggatcggctacatcacctacagcggcagcaccgactacaaccccagcctgaaaagccgggtgctgatctccgtggacaccagcaagaatcaggtgtccctgaagctgagcagcgtgacagccgctgataccgccgtgtactactgtgccagactgggcagaagatacgccctggattattggggccagggcaccaccgtgacagtgtcatctacgcgtggaatgaggactgaggatcttcccaaagctgtcgtctttctcgaaccccaatggtatcgggtgctcgaaaaagactctgtgacactgaaatgccaaggggcctactctcccgaggacaactccacacagtggtttcataatgagtccctcatcagctctcaggccagctcttatttcattgatgccgctacagtggacgactccggcgagtatcggtgtcagaccaatctgtctacactgtctgaccccgtgcagcttgaggtccacattggatggttgctcttgcaagccccacgctgggttttcaaagaggaagatccaatccatctgcggtgccacagctggaaaaacaccgctctccacaaagtcacatacctgcaaaatggcaaaggacgcaaatacttccatcacaattccgatttttacattccgaaggctaccctgaaagacagcggcagctatttctgccggggactcgtcggctccaagaatgtgtcctccgaaaccgtgaatatcacgattacccaaggactggctgtgcctacaatctctagcttctttccgcctggataccaagtctccttctgtcttgtgatggtcctcctgtttgctgtggacacaggactgtacttttacgtg

SEQ ID NO: 2084 - DNA, 1443 bp, synthetic construct
  source 1..1443: mol_type = other DNA
atggccttaccagtgaccgccttgctcctgccgctggccttgctgctccacgccgccaggccggacatccagctgactcagagccctagctttctgagcgccagcgtgggcgacagagtgaccattacatgtagagccagccagggcatcagcaccgacctgaactggtatcagcagaagcctggcaaggcccctaagctgctgatctacgccgccagcaatctggaaagcggcgtgccaagcagattttccggctctggcagcggcaccgagttcaccctgacaatatctagcctccagcctgaggacttcgccacctactactgccagcagagctacaactggccctacacctttggcggaggcaccaaggtggaaatcaagagaggcggaggcggaagtggaggcggaggatctggcggcggaggctctgaagttcagctggttgaatcaggcggaggactcgtgaaacctggcggctctctgagactgtcttgtgccgccagcggcttcaccttcagcaacttcgagatgaactgggtccgacaggccccaggcaaaggactggaatgggtgtccggcatcagctccaatggccggtacatcaactacgccgacagcgtgaagggcagattcaccatcagccgggacaacgccaagaacagcctgtacctccagatgaactccctgagagccgaggacaccgccgtgtactattgtgccagagtggtggacttcgaccaggactacaacggcttcgactattggggccagggcaccctggttaccgttagctctacgcgtggaatgaggactgaggatcttcccaaagctgtcgtctttctcgaaccccaatggtatcgggtgctcgaaaaagactctgtgacactgaaatgccaaggggcctactctcccgaggacaactccacacagtggtttcataatgagtccctcatcagctctcaggccagctcttatttcattgatgccgctacagtggacgactccggcgagtatcggtgtcagaccaatctgtctacactgtctgaccccgtgcagcttgaggtccacattggatggttgctcttgcaagccccacgctgggttttcaaagaggaagatccaatccatctgcggtgccacagctggaaaaacaccgctctccacaaagtcacatacctgcaaaatggcaaaggacgcaaatacttccatcacaattccgatttttacattccgaaggctaccctgaaagacagcggcagctatttctgccggggactcgtcggctccaagaatgtgtcctccgaaaccgtgaatatcacgattacccaaggactggctgtgcctacaatctctagcttctttccgcctggataccaagtctccttctgtcttgtgatggtcctcctgtttgctgtggacacaggactgtacttttacgtg

SEQ ID NO: 2085 - DNA, 1437 bp, synthetic construct
  source 1..1437: mol_type = other DNA
atggccttaccagtgaccgccttgctcctgccgctggccttgctgctccacgccgccaggccggacatccaactgactcagagccccagctttctgagcgcctctgtgggcgacagagtgaccatcacatgtagtctcagcctgggcatcagcacatggcgggattggtttccgccgaggcttggcaggggccttgagccgctgacctacgccgccagcacactgcaaagcggagtgcctagcagattttccggcagcggctctggcaccgagttcaccctgacaatatccagcctccagcctgaggacttcgccacctactactgccagcagctcaacagctaccctctgacctttggcggaggcaccaaggtggaaatcaagagaggcggaggcggaagtggaggcggaggatctggcggcggaggctctgaagttcaactggttgagtctggtggcggcctggttaagcctggcggatctctgagactgagctgtgccgccagcggcttcacctttagcacatacggcatgagctgggtccgacaggcccctggaaaaggacttgagtgggtcgcctacatcaacaacggctccggctacatctactacgccgacagcgtgaagggcagattcaccatcagccgggacaacgccaagaacagcctgtacctccagatgaactccctgagagccgaggacaccgccgtgtactattgtgccagaggacagtggtggagcggcggagactttgattattggggccagggcaccctggtcaccgtttcttctacgcgtggaatgaggactgaggatcttcccaaagctgtcgtctttctcgaaccccaatggtatcgggtgctcgaaaaagactctgtgacactgaaatgccaaggggcctactctcccgaggacaactccacacagtggtttcataatgagtccctcatcagctctcaggccagctcttatttcattgatgccgctacagtggacgactccggcgagtatcggtgtcagaccaatctgtctacactgtctgaccccgtgcagcttgaggtccacattggatggttgctcttgcaagccccacgctgggttttcaaagaggaagatccaatccatctgcggtgccacagctggaaaaacaccgctctccacaaagtcacatacctgcaaaatggcaaaggacgcaaatacttccatcacaattccgatttttacattccgaaggctaccctgaaagacagcggcagctatttctgccggggactcgtcggctccaagaatgtgtcctccgaaaccgtgaatatcacgattacccaaggactggctgtgcctacaatctctagcttctttccgcctggataccaagtctccttctgtcttgtgatggtcctcctgtttgctgtggacacaggactgtacttttacgtg

SEQ ID NO: 2086 - DNA, 1443 bp, synthetic construct
  source 1..1443: mol_type = other DNA
atggccttaccagtgaccgccttgctcctgccgctggccttgctgctccacgccgccaggccggacatccagatgacccagaccacaagcagcctgtctgccagcctgggcgacagagtgaccatctcttgtagagccagccaggacatcagcaactacctgaactggtatcagcagaaacccgacggcaccgtgaagctgctgatctactacaccagcatcctgcacagcggcgtgcccagcagattttctggctctggcagcggcaccgactacagcctgaccatcagcaatctggaacaagaggacttcgctacctacttctgccagcaaggcaacaccctgccttggacatttggcggaggcaccaagctggaaatcaaagctggcggaggcggaagtggaggcggaggatctggcggcggaggctctgaagtgcaactggttgaatctggcggcggactggttaagcctggcggatctctgaagctgagctgtgccgcctctggcttcgccttcagcatctacgatatgagctgggtccgacagacccctgagaagagactggaatgggtcgcctacatctctagcggcggagggacctactatcccgacacagtgaagggcagattcaccatctccagagacaacgccaagaacaccctgtacctccagatgagcagcctgaagtccgaggacaccgccatgtactactgcgccagacacagcggctatggcacacattggggagtgctgtttgcctactggggccagggaacactggtcacagtttctgctacgcgtggaatgaggactgaggatcttcccaaagctgtcgtctttctcgaaccccaatggtatcgggtgctcgaaaaagactctgtgacactgaaatgccaaggggcctactctcccgaggacaactccacacagtggtttcataatgagtccctcatcagctctcaggccagctcttatttcattgatgccgctacagtggacgactccggcgagtatcggtgtcagaccaatctgtctacactgtctgaccccgtgcagcttgaggtccacattggatggttgctcttgcaagccccacgctgggttttcaaagaggaagatccaatccatctgcggtgccacagctggaaaaacaccgctctccacaaagtcacatacctgcaaaatggcaaaggacgcaaatacttccatcacaattccgatttttacattccgaaggctaccctgaaagacagcggcagctatttctgccggggactcgtcggctccaagaatgtgtcctccgaaaccgtgaatatcacgattacccaaggactggctgtgcctacaatctctagcttctttccgcctggataccaagtctccttctgtcttgtgatggtcctcctgtttgctgtggacacaggactgtacttttacgtg

SEQ ID NO: 2087 - DNA, 1473 bp, synthetic construct
  source 1..1473: mol_type = other DNA
atggccttaccagtgaccgccttgctcctgccgctggccttgctgctccacgccgccaggccggacatcgtgatgacacagagccctgatagcctggccgtgtctctgggagagagagccaccatcaactgcaagagcagccagagcctgctgtacagaagcaaccagaagaactacctggcctggtatcagcagaagcccggccagcctcctaagctgctgatctactgggccagcaccagagaaagcggcgtgcccgatagattttctggctctggcagcggcaccgacttcaccctgacaatttctagcctgcaagccgaggacgtggccgtgtactactgccagcagtattacaactaccccagaaccttcggccagggcaccaaggtggaaatcaagagaacagttggcggaggcggaagtggaggcggaggatctggcggcggaggctctgaagttcagctgcttgaatcaggcggcggactggttcaacctggcggatctctgagactgagctgtgccgccagcggctacagcatcacaagcgactatgcctggaactgggtccgacaggcccctggcaaaggactggaatgggtgtcctacatcagcaacagcggcagcaccagctacaaccccagcctgaagtcccggttcaccatcagcagagacaacagcaagaacaccctgtacctccagatgaacagcctgagagctgaggacaccgccgtgtattattgcgccaaagagcggaactacgactacgacgattactactacgctatggactactggggccagggaaccctggtcacagtctcttctacgcgtggaatgaggactgaggatcttcccaaagctgtcgtctttctcgaaccccaatggtatcgggtgctcgaaaaagactctgtgacactgaaatgccaaggggcctactctcccgaggacaactccacacagtggtttcataatgagtccctcatcagctctcaggccagctcttatttcattgatgccgctacagtggacgactccggcgagtatcggtgtcagaccaatctgtctacactgtctgaccccgtgcagcttgaggtccacattggatggttgctcttgcaagccccacgctgggttttcaaagaggaagatccaatccatctgcggtgccacagctggaaaaacaccgctctccacaaagtcacatacctgcaaaatggcaaaggacgcaaatacttccatcacaattccgatttttacattccgaaggctaccctgaaagacagcggcagctatttctgccggggactcgtcggctccaagaatgtgtcctccgaaaccgtgaatatcacgattacccaaggactggctgtgcctacaatctctagcttctttccgcctggataccaagtctccttctgtcttgtgatggtcctcctgtttgctgtggacacaggactgtacttttacgtg

SEQ ID NO: 2088 - DNA, 1452 bp, synthetic construct
  source 1..1452: mol_type = other DNA
atggccttaccagtgaccgccttgctcctgccgctggccttgctgctccacgccgccaggccggacgtggtcatgacacagagccctctgagcctgcctgtgacacttggacagcctgccagcatcagctgtagaagcagccagagcctgctgcacagcagcggcaatacctacctggaatggtatcagcagaggcccggacagagccccagacctctgatctacaagatcagcacccggttcagcggcgtgcccgatagattttctggctctggcagcggcaccgacttcaccctgaagattagcagagtggaagccgaggacgtgggcgtgtactactgcttccaaggcagccacgtgccatacacctttggcggcggaacaaaggtggaaatcaagagaggcggaggcggaagtggaggcggaggatctggcggcggaggctctcaagttcagctggttcagagcggagccgaagtgaagaaacctggggcctctgtgaaggtgtcctgcaaagcctctggcctgaccatcgaggactactacatgcactgggtccgacaggcccctggacaaggacttgaatggatgggctggatcgaccccgagaacggcgatacagagtacggccctaagttccagggcagagtgaccatgaccagagacaccagcatcaacaccgcctacatggaactgagccggctgagatccgatgacaccgccgtgtactattgcgccgtgcacaatgcccactacggcacttggtttgcctattggggccagggcacactggtcaccgttagctctacgcgtggaatgaggactgaggatcttcccaaagctgtcgtctttctcgaaccccaatggtatcgggtgctcgaaaaagactctgtgacactgaaatgccaaggggcctactctcccgaggacaactccacacagtggtttcataatgagtccctcatcagctctcaggccagctcttatttcattgatgccgctacagtggacgactccggcgagtatcggtgtcagaccaatctgtctacactgtctgaccccgtgcagcttgaggtccacattggatggttgctcttgcaagccccacgctgggttttcaaagaggaagatccaatccatctgcggtgccacagctggaaaaacaccgctctccacaaagtcacatacctgcaaaatggcaaaggacgcaaatacttccatcacaattccgatttttacattccgaaggctaccctgaaagacagcggcagctatttctgccggggactcgtcggctccaagaatgtgtcctccgaaaccgtgaatatcacgattacccaaggactggctgtgcctacaatctctagcttctttccgcctggataccaagtctccttctgtcttgtgatggtcctcctgtttgctgtggacacaggactgtacttttacgtg

SEQ ID NO: 2089 - DNA, 1428 bp, synthetic construct
  source 1..1428: mol_type = other DNA
atggccttaccagtgaccgccttgctcctgccgctggccttgctgctccacgccgccaggccggacatccagatgacacagagccctagcagcctgtctgccagcgtgggagacagagtgaccatcacctgtagagccagcgagaacatctacagcaacctggcctggtatcagcagaagcctggcaaggcccctaagctgctgatctacgccgccaccaatctggctgatggcgtgccaagcagattttccggctctggcagcggcaccgatttcaccctgacaatatccagcctccagcctgaggacttcgccacctactactgccagcacttttggggcacccctacattcggccagggcaccaaggtggaaatcaagagaacagttggcggaggcggaagtggaggcggaggatctggcggcggaggctctgaagtgcagctggttgaatcaggtggcggcctggttcaacctggcggatctctgagactgagctgtgccgcctctggcttcagcctgacaaattacggcgtgcactgggtccgacaggcccctggaaaaggactggaatgggtgtccgtgatttggagcggcggcagcaccgattacaacgccgccttcatcagccggttcaccatcagcgccgacaccagcaagaataccgcctacctccagatgaactccctgagagccgaggacaccgccgtgtactattgcgccagagaactgatccacgctatggacaactggggccagggaaccctggtcacagtctcttctacgcgtggaatgaggactgaggatcttcccaaagctgtcgtctttctcgaaccccaatggtatcgggtgctcgaaaaagactctgtgacactgaaatgccaaggggcctactctcccgaggacaactccacacagtggtttcataatgagtccctcatcagctctcaggccagctcttatttcattgatgccgctacagtggacgactccggcgagtatcggtgtcagaccaatctgtctacactgtctgaccccgtgcagcttgaggtccacattggatggttgctcttgcaagccccacgctgggttttcaaagaggaagatccaatccatctgcggtgccacagctggaaaaacaccgctctccacaaagtcacatacctgcaaaatggcaaaggacgcaaatacttccatcacaattccgatttttacattccgaaggctaccctgaaagacagcggcagctatttctgccggggactcgtcggctccaagaatgtgtcctccgaaaccgtgaatatcacgattacccaaggactggctgtgcctacaatctctagcttctttccgcctggataccaagtctccttctgtcttgtgatggtcctcctgtttgctgtggacacaggactgtacttttacgtg

SEQ ID NO: 2090 - DNA, 1449 bp, synthetic construct
  source 1..1449: mol_type = other DNA
atggccttaccagtgaccgccttgctcctgccgctggccttgctgctccacgccgccaggccggacttcgtgatgacacagagccctctgagcctgcctgtgacacctggcgaacctgccagcatcagctgtagaagcagccagagcatcgtgcacagcaacggcaacacctacctggaatggtatctccagaagcctggacagagcccacagctgctgatctacaaggtgtccaacagattcagcggcgtgcccgacagattttctggcagcggctctggcaccgacttcaccctgaagattagcagagtggaagccgaggacgtgggcgtgtactactgcttccaaggctctcacgtgcccctgacctttggacagggcaccaagctggaaatcaagagaggcggaggcggaagtggaggcggaggatctggcggcggaggctctgaagtgcagctggttgaaagcggagccgaagtgaagaaacctggggcctctgtgaaggtgtcctgcaaggccagcggctacacctttaccagctactggattcactgggtccgacaggcccctggacaaggacttgagtggatgggcgagaacgacccctccaacggcaggaccaactacaacgagaagttcaagaaccgcgtgaccctgaccgtggacaccagcatctctaccgcctacatggaactgagccggctgagatccgatgacaccgccgtgtactattgcgccagaggacccaactacttttacagcatggactactggggccagggcacaatggtcaccgttagctctacgcgtggaatgaggactgaggatcttcccaaagctgtcgtctttctcgaaccccaatggtatcgggtgctcgaaaaagactctgtgacactgaaatgccaaggggcctactctcccgaggacaactccacacagtggtttcataatgagtccctcatcagctctcaggccagctcttatttcattgatgccgctacagtggacgactccggcgagtatcggtgtcagaccaatctgtctacactgtctgaccccgtgcagcttgaggtccacattggatggttgctcttgcaagccccacgctgggttttcaaagaggaagatccaatccatctgcggtgccacagctggaaaaacaccgctctccacaaagtcacatacctgcaaaatggcaaaggacgcaaatacttccatcacaattccgatttttacattccgaaggctaccctgaaagacagcggcagctatttctgccggggactcgtcggctccaagaatgtgtcctccgaaaccgtgaatatcacgattacccaaggactggctgtgcctacaatctctagcttctttccgcctggataccaagtctccttctgtcttgtgatggtcctcctgtttgctgtggacacaggactgtacttttacgtg

SEQ ID NO: 2091 - DNA, 1428 bp, synthetic construct
  source 1..1428: mol_type = other DNA
atggccttaccagtgaccgccttgctcctgccgctggccttgctgctccacgccgccaggccggacatccagctgactcagagccctagctttctgagcgccagcgtgggcgacagagtgaccatcacatgtagcgccagatccagcatcagcttcatgtactggtatcagcagaagcccggcaaggcccctaagctgctgatctacgacaccagcaatctggcctctggcgtgcccagcagattttctggaagcggcagcggcaccgagttcaccctgacaatctctagcctggaagccgaggatgccgccacctactattgccagcagtggtccagctatcccctgacatttggacagggcaccaagctggaaatcaaaggcggaggcggaagtggaggcggaggatctggcggcggaggctctcaggttcagctggttcagtctggggccgaagtgaagaaacctggggcctctgtgaaggtgtcctgcaaggcttccggctacacctttaccggctcttggatgaactgggtccgacaggctcctggacagggactcgaatggatcggcagaatctatcctggcgacggcgagacaaactacaacggcaagttcaaggaccgcgtgacaatcaccgccgacaagagcacaagcaccgcctacatggaactgagcagcctgcggagcgaagataccgccgtgtactactgcgcccggatctacggcaacaacgtgtacttcgatgtgtggggccagggcacaaccgtgacagtctcttctacgcgtggaatgaggactgaggatcttcccaaagctgtcgtctttctcgaaccccaatggtatcgggtgctcgaaaaagactctgtgacactgaaatgccaaggggcctactctcccgaggacaactccacacagtggtttcataatgagtccctcatcagctctcaggccagctcttatttcattgatgccgctacagtggacgactccggcgagtatcggtgtcagaccaatctgtctacactgtctgaccccgtgcagcttgaggtccacattggatggttgctcttgcaagccccacgctgggttttcaaagaggaagatccaatccatctgcggtgccacagctggaaaaacaccgctctccacaaagtcacatacctgcaaaatggcaaaggacgcaaatacttccatcacaattccgatttttacattccgaaggctaccctgaaagacagcggcagctatttctgccggggactcgtcggctccaagaatgtgtcctccgaaaccgtgaatatcacgattacccaaggactggctgtgcctacaatctctagcttctttccgcctggataccaagtctccttctgtcttgtgatggtcctcctgtttgctgtggacacaggactgtacttttacgtg

SEQ ID NO: 2092 - DNA, 1452 bp, synthetic construct
  source 1..1452: mol_type = other DNA
atggccttaccagtgaccgccttgctcctgccgctggccttgctgctccacgccgccaggccgcagctggtgctgacacagtctccaagcgcctctgccagcctgggatctagcgtgaagctgacctgtacactgagcagcggccacaagaccgacaccatcgactggtatcagcagcagcctggcaaggcccctagatacctgatgaagctggaaggcagcggcagctacaacaaaggctctggcgtgcccgatagattcagcggcagttcttctggcgctgattggtatctgaccatcagcagcctccagagcgaggacgaggccgattactactgcggcacagactaccccggcaactacctgtttggcggcggaacacagctgacagtgcttggcggcggaggcggaagtggaggcggaggatctggcggcggaggctctcaagaacagctggttgaaagcggcggaggactggttcaacctggcggttctctgagactgagctgtgccgccagcggcttcaccttcagcgactactacatgagctggatcagacaggccccaggcaaaggactggaatgggtcgccacaatctaccccagcagcggcaagacctactacgccgattctgccaagggcagactgaccatctccagcgacaacgccaaggacagcctgtacctccagatgaacagcctgagagccgaggacaccgccgtgtactactgcaccagagatagctacgccgacgacgccgctctgtttgacatttggggccagggcaccaccgtgaccgtttcttctacgcgtggaatgaggactgaggatcttcccaaagctgtcgtctttctcgaaccccaatggtatcgggtgctcgaaaaagactctgtgacactgaaatgccaaggggcctactctcccgaggacaactccacacagtggtttcataatgagtccctcatcagctctcaggccagctcttatttcattgatgccgctacagtggacgactccggcgagtatcggtgtcagaccaatctgtctacactgtctgaccccgtgcagcttgaggtccacattggatggttgctcttgcaagccccacgctgggttttcaaagaggaagatccaatccatctgcggtgccacagctggaaaaacaccgctctccacaaagtcacatacctgcaaaatggcaaaggacgcaaatacttccatcacaattccgatttttacattccgaaggctaccctgaaagacagcggcagctatttctgccggggactcgtcggctccaagaatgtgtcctccgaaaccgtgaatatcacgattacccaaggactggctgtgcctacaatctctagcttctttccgcctggataccaagtctccttctgtcttgtgatggtcctcctgtttgctgtggacacaggactgtacttttacgtg

SEQ ID NO: 2093 - DNA, 1437 bp, synthetic construct
  source 1..1437: mol_type = other DNA
atggccttaccagtgaccgccttgctcctgccgctggccttgctgctccacgccgccaggccggacatcgtgctgacacagagccctccaagcctggctatgagcctgggaaagagagccaccatcagctgtagagccagcgagagcgtgacaatcctgggctctcacctgatccactggtatcagcagaagcccggccagcctcctacactgctgattcagctggcctccaatgtgcagacaggcgtgccagccagattttctggcagcggcagcagaaccgacttcaccctgaccattgatcccgtggaagaggacgacgtggccgtgtactactgcctccagagcagaacaatccccagaacctttggcggaggcaccaagctggaaatcaaaggcggcggaggaagcggaggcggaggatctggtggtggtggatctcaaatccagctggtgcagtctggccccgagctgaagaaacctggcgagacagtgaagatcagctgcaaggccagcggctacaccttcaccgactacagcatcaactgggtcaagagagcccctggcaagggcctgaaatggatgggctggatcaacaccgaaaccagagagcccgcctacgcctacgacttcagaggcagattcgccttcagcctggaaaccagcgccagcacagcctacctccagatcaacaacctgaagtacgaggacaccgccacctacttttgcgccctggactacagctacgctatggactattggggccagggcaccagcgtgacagtctcttctacgcgtggaatgaggactgaggatcttcccaaagctgtcgtctttctcgaaccccaatggtatcgggtgctcgaaaaagactctgtgacactgaaatgccaaggggcctactctcccgaggacaactccacacagtggtttcataatgagtccctcatcagctctcaggccagctcttatttcattgatgccgctacagtggacgactccggcgagtatcggtgtcagaccaatctgtctacactgtctgaccccgtgcagcttgaggtccacattggatggttgctcttgcaagccccacgctgggttttcaaagaggaagatccaatccatctgcggtgccacagctggaaaaacaccgctctccacaaagtcacatacctgcaaaatggcaaaggacgcaaatacttccatcacaattccgatttttacattccgaaggctaccctgaaagacagcggcagctatttctgccggggactcgtcggctccaagaatgtgtcctccgaaaccgtgaatatcacgattacccaaggactggctgtgcctacaatctctagcttctttccgcctggataccaagtctccttctgtcttgtgatggtcctcctgtttgctgtggacacaggactgtacttttacgtg

SEQ ID NO: 2094 - DNA, 1449 bp, synthetic construct
  source 1..1449: mol_type = other DNA
atggccttaccagtgaccgccttgctcctgccgctggccttgctgctccacgccgccaggccgcaggtacagctgcaggaatctgggcccggacttgtcaagccaagtcagacactttctcttacatgtaccgtgagcggcggaagtataagcagtggaggcttttactggtcttggatacggcagcacccaggcaaaggcttggagtggattggatacattcatcattcaggatctacacactataatccatcccttaagtcccgggtcaccattagcattgatacgtctaagaatctgttcagtctcaggctgtcctccgtcactgctgccgacacagccgtgtactactgcgcctccttggtttactgcggaggcgactgttatagcggctttgattattgggggcaggggaccctcgtaaccgtgagctctggaggcggaggatcaggtggcggtggatctggcggtggcggatctgatatccagctcactcaaagcccctctagtctctctgcctcagtgggggatcgggtcagttttacttgtcaagcttcacaggatatcaacaacttccttaattggtatcagcagaagccaggaaaagcacccaagctgctcatctatgatgcctcaaatttggagacgggtgttcccagtcgattctctgggtcagggtccgggaccgactttacgtttacgatctcctctctgcagcccgaagacatcgccacatactattgtcaacagtacggcaacttgcctttcacatttgggggcgggactaaggttgaaatcaagaggacgcgtggaatgaggactgaggatcttcccaaagctgtcgtctttctcgaaccccaatggtatcgggtgctcgaaaaagactctgtgacactgaaatgccaaggggcctactctcccgaggacaactccacacagtggtttcataatgagtccctcatcagctctcaggccagctcttatttcattgatgccgctacagtggacgactccggcgagtatcggtgtcagaccaatctgtctacactgtctgaccccgtgcagcttgaggtccacattggatggttgctcttgcaagccccacgctgggttttcaaagaggaagatccaatccatctgcggtgccacagctggaaaaacaccgctctccacaaagtcacatacctgcaaaatggcaaaggacgcaaatacttccatcacaattccgatttttacattccgaaggctaccctgaaagacagcggcagctatttctgccggggactcgtcggctccaagaatgtgtcctccgaaaccgtgaatatcacgattacccaaggactggctgtgcctacaatctctagcttctttccgcctggataccaagtctccttctgtcttgtgatggtcctcctgtttgctgtggacacaggactgtacttttacgtg

SEQ ID NO: 2095 - DNA, 1443 bp, synthetic construct
  source 1..1443: mol_type = other DNA
atggccttaccagtgaccgccttgctcctgccgctggccttgctgctccacgccgccaggccgcaggtccaactgcaagaaagcggacccggactggtgaagccttctgagacacttagtctgacgtgcacggtcagtggcggctccatctcctcctattattggtcatggatacgacaacccccaggtaagggcctggaatggattggctatatctactattcaggaagcacgaactacaatcccagcctgaagtcccgagtgacaatttcagtagataccagtaaaaaccagttcagtcttaaactgtcaagcgtgacagctgccgacaccgctgtgtattactgcgtctcactggtgtattgtggaggggattgttatagcgggttcgattattggggacagggaaccctggtgactgtatcttccggaggcggaggatcaggtggcggtggatctggcggtggcggatctgatattcaactgacacaatcccccagctcactcagcgccagcgtgggggacagggttagctttacctgtcaagcctctcaggatataaataactttctgaactggtatcaacagaagcctgggaaggcgcccaaactcctgatctatgatgcgtccaacctggaaactggcgtgccttcacgctttagcggctctggcagtggtacagacttcacttttaccatctcttcacttcagccggaggacatcgccacatattactgtcaacagtacggaaacttgccctttacttttggaggcggcaccaaagttgaaatcaaaagaacgcgtggaatgaggactgaggatcttcccaaagctgtcgtctttctcgaaccccaatggtatcgggtgctcgaaaaagactctgtgacactgaaatgccaaggggcctactctcccgaggacaactccacacagtggtttcataatgagtccctcatcagctctcaggccagctcttatttcattgatgccgctacagtggacgactccggcgagtatcggtgtcagaccaatctgtctacactgtctgaccccgtgcagcttgaggtccacattggatggttgctcttgcaagccccacgctgggttttcaaagaggaagatccaatccatctgcggtgccacagctggaaaaacaccgctctccacaaagtcacatacctgcaaaatggcaaaggacgcaaatacttccatcacaattccgatttttacattccgaaggctaccctgaaagacagcggcagctatttctgccggggactcgtcggctccaagaatgtgtcctccgaaaccgtgaatatcacgattacccaaggactggctgtgcctacaatctctagcttctttccgcctggataccaagtctccttctgtcttgtgatggtcctcctgtttgctgtggacacaggactgtacttttacgtg

SEQ ID NO: 2096 - DNA, 1458 bp, synthetic construct
  source 1..1458: mol_type = other DNA
atggccttaccagtgaccgccttgctcctgccgctggccttgctgctccacgccgccaggccgcaagttactttgaaggagtctggacctgtactggtgaagccaaccgagacactgacactcacgtgtacagtgagtggtttttccttgatcaacgcaaggatgggcgtcagctggatcaggcaaccccctggcaaggctctggaatggctcgctcacatattcagcaatgccgaaaaaagctaccggacaagcctgaaatcccgcctgactatttccaaggacacttctaagtctcaggtggtgctgaccatgaccaacatggacccggtggacaccgccacctattactgcgcaagaatccctgggtatggtgggaatggtgactaccattattatgggatggatgtgtgggggcaaggcacaaccgtaacggtctcaagcggaggcggaggatcaggtggcggtggatctggcggtggcggatctgacattcagatgacccaaagcccgtccagcctgtccgccagcctgggagatagagtgacaatcacgtgtagagcttcccaagggataagaaatgatctcgggtggtatcagcagaagcccggcaaagcccccaaaaggcttatatatgctagtagtacactgcagtctggagttccttcccgattttcaggtagcggctccggtacagagttcaccctcacgataagctcactccagcctgaggatttcgcaacgtactactgcctccagcacaacaattttccctggactttcggccagggcaccaaggtggagatcaagaggacgcgtggaatgaggactgaggatcttcccaaagctgtcgtctttctcgaaccccaatggtatcgggtgctcgaaaaagactctgtgacactgaaatgccaaggggcctactctcccgaggacaactccacacagtggtttcataatgagtccctcatcagctctcaggccagctcttatttcattgatgccgctacagtggacgactccggcgagtatcggtgtcagaccaatctgtctacactgtctgaccccgtgcagcttgaggtccacattggatggttgctcttgcaagccccacgctgggttttcaaagaggaagatccaatccatctgcggtgccacagctggaaaaacaccgctctccacaaagtcacatacctgcaaaatggcaaaggacgcaaatacttccatcacaattccgatttttacattccgaaggctaccctgaaagacagcggcagctatttctgccggggactcgtcggctccaagaatgtgtcctccgaaaccgtgaatatcacgattacccaaggactggctgtgcctacaatctctagcttctttccgcctggataccaagtctccttctgtcttgtgatggtcctcctgtttgctgtggacacaggactgtacttttacgtg

SEQ ID NO: 2097 - DNA, 1440 bp, synthetic construct
  source 1..1440: mol_type = other DNA
atggccttaccagtgaccgccttgctcctgccgctggccttgctgctccacgccgccaggccgcagatccagttggtggaatcagggggcggtgtggtgcagccgggtaggagcctgagactgtcatgcgtggcgtctggcttcacattcaagaactacggcatgcactgggtgcgacaggcccccggaaagggtttggagtgggtcgccgtgatctggtacgacggatctaatgagtattacggagatcctgtgaagggaaggttcaccatctcccgcgacaatagcaaaaatatgctctacctgcaaatgaactcactcagggcggatgatacggcggtctactattgcgctcgctcagggattgctgtggccggcgcattcgattactggggacagggtaccctggtgacagtatcaagcggaggcggaggatcaggtggcggtggatctggcggtggcggatctgagattgtgttgacacagtctcccgataccctgtcactgtcacccggcgagaaggcaacgctgagttgcagagcaagccagtcagtctcctcttcttttctggcctggtatcagcaaaaaccaggtcaggcaccatctctcctgatttacgttgccagcagacgggcggctggcattcccgacaggttctctggaagcggatctgggaccgattttaccctgacaattagccgcttggagcccgaagactttggtatgttttactgccagcactacggaaggacacctttcacatttggcccgggcacgaaagtcgatataaaacgcacgcgtggaatgaggactgaggatcttcccaaagctgtcgtctttctcgaaccccaatggtatcgggtgctcgaaaaagactctgtgacactgaaatgccaaggggcctactctcccgaggacaactccacacagtggtttcataatgagtccctcatcagctctcaggccagctcttatttcattgatgccgctacagtggacgactccggcgagtatcggtgtcagaccaatctgtctacactgtctgaccccgtgcagcttgaggtccacattggatggttgctcttgcaagccccacgctgggttttcaaagaggaagatccaatccatctgcggtgccacagctggaaaaacaccgctctccacaaagtcacatacctgcaaaatggcaaaggacgcaaatacttccatcacaattccgatttttacattccgaaggctaccctgaaagacagcggcagctatttctgccggggactcgtcggctccaagaatgtgtcctccgaaaccgtgaatatcacgattacccaaggactggctgtgcctacaatctctagcttctttccgcctggataccaagtctccttctgtcttgtgatggtcctcctgtttgctgtggacacaggactgtacttttacgtg

SEQ ID NO: 2098 - DNA, 1443 bp, synthetic construct
  source 1..1443: mol_type = other DNA
atggccttaccagtgaccgccttgctcctgccgctggccttgctgctccacgccgccaggccggacatccaactgactcagagccccagctttctgagcgcctctgtgggcgacagagtgaccatcacatgtagagccagccagggcatcagcagctacctggcttggtatcagcagaagcctggcaaggcccctaaactgctgatctacgccgccagcacactccagtctggcgtgccaagcagattttctggcagcggctctggcaccgagttcaccctgacaatatccagcctccagcctgaggacttcgccacctactactgccagcaagtgaacagctaccctctgacctttggcggaggcaccaaggtggaaatcaagagaggcggaggcggaagtggaggcggaggatctggcggcggaggctctcaactgcaactgcaagagtctggccctggcctggtcaagcctagcgaaacactgagcctgacctgtaccgtgtctggcggcagcatcagctccagcacatattactggggctggatcagacagcctcctggcaaaggactggaatggatcggctccatctacttcaccggcagcaccgactacaaccccagcctgaagtccagggtgtccatctccgtggacaccagcaagaaccagttctccctgaagctgagcagcgtgacagccgctgataccgccgtgtactactgcgccaaagaggacgatagcagcggctactacagcttcgactattggggccagggcaacctggtcaccgttagctctacgcgtggaatgaggactgaggatcttcccaaagctgtcgtctttctcgaaccccaatggtatcgggtgctcgaaaaagactctgtgacactgaaatgccaaggggcctactctcccgaggacaactccacacagtggtttcataatgagtccctcatcagctctcaggccagctcttatttcattgatgccgctacagtggacgactccggcgagtatcggtgtcagaccaatctgtctacactgtctgaccccgtgcagcttgaggtccacattggatggttgctcttgcaagccccacgctgggttttcaaagaggaagatccaatccatctgcggtgccacagctggaaaaacaccgctctccacaaagtcacatacctgcaaaatggcaaaggacgcaaatacttccatcacaattccgatttttacattccgaaggctaccctgaaagacagcggcagctatttctgccggggactcgtcggctccaagaatgtgtcctccgaaaccgtgaatatcacgattacccaaggactggctgtgcctacaatctctagcttctttccgcctggataccaagtctccttctgtcttgtgatggtcctcctgtttgctgtggacacaggactgtacttttacgtg

SEQ ID NO: 2099 - DNA, 1452 bp, synthetic construct
  source 1..1452: mol_type = other DNA
atggccttaccagtgaccgccttgctcctgccgctggccttgctgctccacgccgccaggccgcagtctgctctgacccagcctagatccgtgtctggctctcctggacacagcgtgaccatcagctgtaccggcacctcttccgacgtgggcgactacaattacgtgtcctggtatcagcagaggcccggcaaggtgccaaagctgctgatctacgacgtgtccaagaggccaagcggcgtgcccgatagattttccggcagcaagtctggcaacaccgccagcctgacaatctctggactgcaagccgaggacgaggccatctacttttgtgccagctacgccggcaactacaacgtggtgtttggcggaggcaccaagctgacagtgcttggacaaggcggaggcggaagtggaggcggaggatctggcggcggaggctctcaagttcagctggtgcagtctggcagcgagctgaagaaacctggggcctctgtgaaggtgtcctgcaaggcttccggctacaccttcaacacctacgccatgaattgggtccgacaggctccaggccaaggactggaatggatgggctggatcaacaccaacaccggcaatcccacatacgcccagggcttcaccggcagattcgtgttctctctggacacctccgtgtccaccgcctacctccagatcagctctctgaaggccgaggataccgccgtgtactactgcgccagacggtacttcgattggctgctgggagccttcgacatctggggccagggaacaatggtcaccgtgtctagtacgcgtggaatgaggactgaggatcttcccaaagctgtcgtctttctcgaaccccaatggtatcgggtgctcgaaaaagactctgtgacactgaaatgccaaggggcctactctcccgaggacaactccacacagtggtttcataatgagtccctcatcagctctcaggccagctcttatttcattgatgccgctacagtggacgactccggcgagtatcggtgtcagaccaatctgtctacactgtctgaccccgtgcagcttgaggtccacattggatggttgctcttgcaagccccacgctgggttttcaaagaggaagatccaatccatctgcggtgccacagctggaaaaacaccgctctccacaaagtcacatacctgcaaaatggcaaaggacgcaaatacttccatcacaattccgatttttacattccgaaggctaccctgaaagacagcggcagctatttctgccggggactcgtcggctccaagaatgtgtcctccgaaaccgtgaatatcacgattacccaaggactggctgtgcctacaatctctagcttctttccgcctggataccaagtctccttctgtcttgtgatggtcctcctgtttgctgtggacacaggactgtacttttacgtg

SEQ ID NO: 2100 - DNA, 1428 bp, synthetic construct
  source 1..1428: mol_type = other DNA
atggccttaccagtgaccgccttgctcctgccgctggccttgctgctccacgccgccaggccggacatccagatgacacagagccctagcagcctgtctgccagcgtgggagacagagtgaccatcacatgtagcgccagccagggcatcaacaactacctgaactggtatcagcagaagcccggcaaggcccctaagctgctgatccactacacatctggactgcacgctggcgtgcccagcagattttctggctctggcagcggcaccgactacaccctgacaatatctagcctccagcctgaggacgtggcaacctactactgccagcagtacagcatcctgccttggacctttggcggaggcaccaaggtggaaatcaagagaggcggaggcggaagtggaggcggaggatctggcggcggaggctctcaagttcagcttgttcagagcggagccgaagtgaagaaacccggcagctctgtgaaggtgtcctgcaaggcttccggctacgcctttagcagcagctggatgaactgggtccgacaggctcctggacagggccttgaatggatgggcagaatctatcccggcgacggcaatacccactacgcccagaaattccagggccgcgtgacactgacagccgacaagtctacaagcaccgcctacatggaactgagcagcctgagaagcgaggacaccgccgtgtactattgcggcgaaggctatctggaccctatggactattggggccagggcacactggtcaccgttagctctacgcgtggaatgaggactgaggatcttcccaaagctgtcgtctttctcgaaccccaatggtatcgggtgctcgaaaaagactctgtgacactgaaatgccaaggggcctactctcccgaggacaactccacacagtggtttcataatgagtccctcatcagctctcaggccagctcttatttcattgatgccgctacagtggacgactccggcgagtatcggtgtcagaccaatctgtctacactgtctgaccccgtgcagcttgaggtccacattggatggttgctcttgcaagccccacgctgggttttcaaagaggaagatccaatccatctgcggtgccacagctggaaaaacaccgctctccacaaagtcacatacctgcaaaatggcaaaggacgcaaatacttccatcacaattccgatttttacattccgaaggctaccctgaaagacagcggcagctatttctgccggggactcgtcggctccaagaatgtgtcctccgaaaccgtgaatatcacgattacccaaggactggctgtgcctacaatctctagcttctttccgcctggataccaagtctccttctgtcttgtgatggtcctcctgtttgctgtggacacaggactgtacttttacgtg

SEQ ID NO: 2101 - DNA, 1437 bp, synthetic construct
  source 1..1437: mol_type = other DNA
atggccttaccagtgaccgccttgctcctgccgctggccttgctgctccacgccgccaggccggaggtgcagctggttgaatctggcggaggactggttcagcctggcggatctctgagactgtcttgtgccgccagcggctacaccttcaccacctattggatgcactgggtccgacaggcccctggcaaaggacttgagtgggtcggatatatcaggcccagcaccggctacacagagtacaaccagaagttcaaggaccgcttcaccatcagcgccgacaccagcaagaataccgcctacctccagatgaacagcctgagagccgaggacaccgccgtgtactactgtgccagatccagatggctgctggactattggggccagggcacactggttacagtttctggcggaggcggaagtggaggcggaggatctggcggcggaggctctgacattcagatgacacagagccctagcagcctgagcgcctctgtgggagacagagtgaccatcacatgcaagagcagccagagcgtgctgtactccagcaatcagaagaactacctggcctggttccagcagaagcctggcaaggctcctaagctgctgatctactgggccagcaccagagaaagcggcgtgccaagcagattttctggcagcggctctggcaccgacttcaccctgacaatatccagcctccagcctgaggacttcgccacctacttttgccaccagtacctgagcagctacacattcggacagggcaccaaggtggaaatcaagcggacgcgtggaatgaggactgaggatcttcccaaagctgtcgtctttctcgaaccccaatggtatcgggtgctcgaaaaagactctgtgacactgaaatgccaaggggcctactctcccgaggacaactccacacagtggtttcataatgagtccctcatcagctctcaggccagctcttatttcattgatgccgctacagtggacgactccggcgagtatcggtgtcagaccaatctgtctacactgtctgaccccgtgcagcttgaggtccacattggatggttgctcttgcaagccccacgctgggttttcaaagaggaagatccaatccatctgcggtgccacagctggaaaaacaccgctctccacaaagtcacatacctgcaaaatggcaaaggacgcaaatacttccatcacaattccgatttttacattccgaaggctaccctgaaagacagcggcagctatttctgccggggactcgtcggctccaagaatgtgtcctccgaaaccgtgaatatcacgattacccaaggactggctgtgcctacaatctctagcttctttccgcctggataccaagtctccttctgtcttgtgatggtcctcctgtttgctgtggacacaggactgtacttttacgtg

SEQ ID NO: 2102 - DNA, 1428 bp, synthetic construct
  source 1..1428: mol_type = other DNA
atggccttaccagtgaccgccttgctcctgccgctggccttgctgctccacgccgccaggccggacatccagatgacacagagccctagcagcctgtctgccagcgtgggagacagagtgaccatcacctgtagagccagccaggacatcagcaactacctgaactggtatcagcagaagcccggcaaggcccctaagctgctgatctactacaccagcagactgcacagcggcgtgcccagcagattttctggctctggcagcggcaccgacttcaccctgacaatatctagcctccagcctgaggacttcgccacctactattgccagcagggcaacaccctgccttacacatttggacagggcaccaaggtggaaatcaagagaggcggaggcggaagtggaggcggaggatctggcggcggaggctctgaagtgcagctggttgaatcaggtggcggcctggttcaacctggcggatctctgagactgagctgtgccgccagcggcttcaccttcagcgactactttatgagctgggtccgacaggcccctggcaaaggacttgaatgggtcgccaccatcagcaatggcggcacctacacttactaccccgacagcgtgaagggcagattcaccatctccagagacaacagcaagaacaccctgtacctccagatgaactccctgagagccgaggacaccgccgtgtactactgcgccagattcgacggctacatcttcgactattggggccagggcaccctggtcacagtctcttctacgcgtggaatgaggactgaggatcttcccaaagctgtcgtctttctcgaaccccaatggtatcgggtgctcgaaaaagactctgtgacactgaaatgccaaggggcctactctcccgaggacaactccacacagtggtttcataatgagtccctcatcagctctcaggccagctcttatttcattgatgccgctacagtggacgactccggcgagtatcggtgtcagaccaatctgtctacactgtctgaccccgtgcagcttgaggtccacattggatggttgctcttgcaagccccacgctgggttttcaaagaggaagatccaatccatctgcggtgccacagctggaaaaacaccgctctccacaaagtcacatacctgcaaaatggcaaaggacgcaaatacttccatcacaattccgatttttacattccgaaggctaccctgaaagacagcggcagctatttctgccggggactcgtcggctccaagaatgtgtcctccgaaaccgtgaatatcacgattacccaaggactggctgtgcctacaatctctagcttctttccgcctggataccaagtctccttctgtcttgtgatggtcctcctgtttgctgtggacacaggactgtacttttacgtg

SEQ ID NO: 2103 - DNA, 1449 bp, synthetic construct
  source 1..1449: mol_type = other DNA
atggccttaccagtgaccgccttgctcctgccgctggccttgctgctccacgccgccaggccggacatccagatgacacagagccctagcagcctgtctgccagcgtgggagacagagtgaccatcacctgtaccgccagcagcagagtgtccagcagctacctgcactggttccagcagaagcctggcaaggcccctaagctgctgatctacagcaccagcaatctggcctctggcgtgcccagcagattttctggctctggcagcggcaccgacttcaccctgacaatatctagcctccagcctgaggacttcgccacctactactgccaccagtaccacagaagcccctacacattcggccagggcaccaaggtggaaatcaagagaggcggaggcggaagtggaggcggaggatctggcggcggaggctctgaagttcagctggttgaatctggcggcggactggttcaacctggcggatctctgagactgagctgtgccgcctctggctacgccttcagcaacagctggatcaactgggtccgacaggcccctggcaaaggactggaatgggtcggacaaatctaccccggcgactacgacaccaactacaacggcaagttcaagggcagattcaccatcagccgggacaagagcaagaacaccgcctacctccagatgaactccctgagagccgaggacaccgccgtgtactattgtgctagaggcggctccatctactacggcaacctgggcttcttcgacgtgtggggacagggcacactggtcacagtctcttctacgcgtggaatgaggactgaggatcttcccaaagctgtcgtctttctcgaaccccaatggtatcgggtgctcgaaaaagactctgtgacactgaaatgccaaggggcctactctcccgaggacaactccacacagtggtttcataatgagtccctcatcagctctcaggccagctcttatttcattgatgccgctacagtggacgactccggcgagtatcggtgtcagaccaatctgtctacactgtctgaccccgtgcagcttgaggtccacattggatggttgctcttgcaagccccacgctgggttttcaaagaggaagatccaatccatctgcggtgccacagctggaaaaacaccgctctccacaaagtcacatacctgcaaaatggcaaaggacgcaaatacttccatcacaattccgatttttacattccgaaggctaccctgaaagacagcggcagctatttctgccggggactcgtcggctccaagaatgtgtcctccgaaaccgtgaatatcacgattacccaaggactggctgtgcctacaatctctagcttctttccgcctggataccaagtctccttctgtcttgtgatggtcctcctgtttgctgtggacacaggactgtacttttacgtg

SEQ ID NO: 2104 - DNA, 1419 bp, synthetic construct
  source 1..1419: mol_type = other DNA
atggccttaccagtgaccgccttgctcctgccgctggccttgctgctccacgccgccaggccggacatccagatgacacagagccctagcagcctgtctgccagcgtgggagacagagtgaccatcacatgtagcgccagcagcagcgtgacctacatgtactggtatcagcagaagcccggcaaggcccctaagctgctgatctacgacaccagcaatctggcctctggcgtgcccagcagattttctggctctggcagcggcaccgactacaccctgacaatatctagcctccagcctgaggacttcgccacctactactgccagcagtggtccaactatcccctgacattcggccagggcaccaaggtggaaatcaaaggcggaggcggaagtggaggcggaggatctggcggcggaggctctcaagttcagctggttcagagcggagccgaagtgaagaaacctggggcctctgtgaaggtgtcctgcaaggccagcggctacagcttcatcgagtacaccatcaactgggtccgacaggcccctggacaaggcctggaatggatcggcaacatcgacccctactacggcacaacctactacaaccagatgttcaccggcagagccacactgaccgtggacacctctatcagcaccgcctacatggaactgagccggctgagatccgatgacaccgccgtgtactattgtgccagaggcagcgcctggtttccctattggggacagggaaccctggtcaccgttagctctacgcgtggaatgaggactgaggatcttcccaaagctgtcgtctttctcgaaccccaatggtatcgggtgctcgaaaaagactctgtgacactgaaatgccaaggggcctactctcccgaggacaactccacacagtggtttcataatgagtccctcatcagctctcaggccagctcttatttcattgatgccgctacagtggacgactccggcgagtatcggtgtcagaccaatctgtctacactgtctgaccccgtgcagcttgaggtccacattggatggttgctcttgcaagccccacgctgggttttcaaagaggaagatccaatccatctgcggtgccacagctggaaaaacaccgctctccacaaagtcacatacctgcaaaatggcaaaggacgcaaatacttccatcacaattccgatttttacattccgaaggctaccctgaaagacagcggcagctatttctgccggggactcgtcggctccaagaatgtgtcctccgaaaccgtgaatatcacgattacccaaggactggctgtgcctacaatctctagcttctttccgcctggataccaagtctccttctgtcttgtgatggtcctcctgtttgctgtggacacaggactgtacttttacgtg

SEQ ID NO: 2105 - DNA, 1419 bp, synthetic construct
  source 1..1419: mol_type = other DNA
atggccttaccagtgaccgccttgctcctgccgctggccttgctgctccacgccgccaggccggagatcgtgctgacacagagcccttctagcctgtctgccagcgtgggcgacagagtgaccatcacatgtagagccagcgagaacatctacagctacctggcctggtatcagcagaagcctggcaaggcccctaagctgctgatctacaacaccaagacactcggcgagggcgtgcccagcagattttctggttctggcagcggcaccgacttcaccctgaccatatctagcctgcagcctgaggacttcgccacctactactgccagcaccactacggcacccctttcacatttggccctggcaccaaggtggacatcaaaggcggaggcggaagtggaggcggaggatctggcggcggaggctctcaagttcagctggttcagagcggagccgaagtgaagaaacctggggcctctgtgaaggtgtcctgcaaggccagcggctacaccttcagcgactattgggtgcactgggtccgacaggctccaggacaaggactggaatggatgggagccatcgacggcagcgataccttcaacgattacagccagaaattcaaaggccgcgtgaccatgaccagagacaccagcatcagcaccgcctacatggaactgagccggctgagatccgatgacaccgccgtgtactattgtgccagaggcggcctgctgcagtattggggacagggaacactggtcaccgtgtcctctacgcgtggaatgaggactgaggatcttcccaaagctgtcgtctttctcgaaccccaatggtatcgggtgctcgaaaaagactctgtgacactgaaatgccaaggggcctactctcccgaggacaactccacacagtggtttcataatgagtccctcatcagctctcaggccagctcttatttcattgatgccgctacagtggacgactccggcgagtatcggtgtcagaccaatctgtctacactgtctgaccccgtgcagcttgaggtccacattggatggttgctcttgcaagccccacgctgggttttcaaagaggaagatccaatccatctgcggtgccacagctggaaaaacaccgctctccacaaagtcacatacctgcaaaatggcaaaggacgcaaatacttccatcacaattccgatttttacattccgaaggctaccctgaaagacagcggcagctatttctgccggggactcgtcggctccaagaatgtgtcctccgaaaccgtgaatatcacgattacccaaggactggctgtgcctacaatctctagcttctttccgcctggataccaagtctccttctgtcttgtgatggtcctcctgtttgctgtggacacaggactgtacttttacgtg

SEQ ID NO: 2106 - DNA, 1431 bp, synthetic construct
  source 1..1431: mol_type = other DNA
atggccttaccagtgaccgccttgctcctgccgctggccttgctgctccacgccgccaggccgcaggttcagctccagcagtctggacctgagctggttaagcctggcgcttccgtgaagatcagctgcaaggcttccggctacgccttcagcagcagctggatgaactgggtcaaacagaggcccggcaaaggactggaatggatcggcagaatctaccccggcgacgaggacaccaattacagcggcaagttcaaggacaaggccacactgaccgccgacaagagcagcaccacagcctacatgcagctgagcagcctgaccagcgaggatagcgccgtgtacttctgtgccagaagcctgctgtacggcgactacctggattattggggccagggcacaaccctgacagtgtctagcggcggaggcggaagtggaggcggaggatctggcggcggaggctctcaaattgtgctgacacagagccccgccatcatgagcgcttctccaggcgagaaagtgaccatgacctgtagcgccagcagctccgtgtcttacatgcactggtatcagcagaagtccggcacaagccccaagcggtggatctacgataccagcaaactggcctccggcgtgcccgatagattttctggcagcggcagcggaaccagctacttcctgaccatcaacaacatggaagccgaggacgccgccacctactactgccagcagtggaacatcaaccctctgacctttggagccggcaccaagctggaactgaagagaacgcgtggaatgaggactgaggatcttcccaaagctgtcgtctttctcgaaccccaatggtatcgggtgctcgaaaaagactctgtgacactgaaatgccaaggggcctactctcccgaggacaactccacacagtggtttcataatgagtccctcatcagctctcaggccagctcttatttcattgatgccgctacagtggacgactccggcgagtatcggtgtcagaccaatctgtctacactgtctgaccccgtgcagcttgaggtccacattggatggttgctcttgcaagccccacgctgggttttcaaagaggaagatccaatccatctgcggtgccacagctggaaaaacaccgctctccacaaagtcacatacctgcaaaatggcaaaggacgcaaatacttccatcacaattccgatttttacattccgaaggctaccctgaaagacagcggcagctatttctgccggggactcgtcggctccaagaatgtgtcctccgaaaccgtgaatatcacgattacccaaggactggctgtgcctacaatctctagcttctttccgcctggataccaagtctccttctgtcttgtgatggtcctcctgtttgctgtggacacaggactgtacttttacgtg

SEQ ID NO: 2107 - DNA, 1440 bp, synthetic construct
  source 1..1440: mol_type = other DNA
atggccttaccagtgaccgccttgctcctgccgctggccttgctgctccacgccgccaggccggacatccagatgacacagagcagcgcctacctgagcgtgtcccttggaggcagagtgaccatcacatgcaaggccagcgaccacatcaacaactggctggcctggtatcagcacaagcccggcaatgcccctagactgctgatctctggcgctaccacactggaaacaggcgtgcccagcagattttctggcagcggctctggcaaggactacaccctgagcatcaccagcctccagaccgaggatgtggctacctactactgccagcagagctggaacaccccttggacatttggcggaggcaccaagctggaaatcaagagaggcggaggcggaagtggaggcggaggatctggcggcggaggctctcaagttcagctgcaacagagcggagccgagcttgtcagacctggcagctctgtgaagattagctgcaaagccagcggctacgccttcagcagctactgggtcaactggatgaagcagcggcctggacagggcctcgaatggatcggccaaatctatcctggcgacggcgacaccaactacaacggcaagtttaagggcagagccaccgtgaccgccgacaagagcagcagcacatcctacatgcagttcagcagcctgaccagcgaggacagcgccgtgtatttctgtgccagatccatcaccaccgtcgtgggctgcgctatggattattggggccagggcacaagcgtgaccgtgtcatctacgcgtggaatgaggactgaggatcttcccaaagctgtcgtctttctcgaaccccaatggtatcgggtgctcgaaaaagactctgtgacactgaaatgccaaggggcctactctcccgaggacaactccacacagtggtttcataatgagtccctcatcagctctcaggccagctcttatttcattgatgccgctacagtggacgactccggcgagtatcggtgtcagaccaatctgtctacactgtctgaccccgtgcagcttgaggtccacattggatggttgctcttgcaagccccacgctgggttttcaaagaggaagatccaatccatctgcggtgccacagctggaaaaacaccgctctccacaaagtcacatacctgcaaaatggcaaaggacgcaaatacttccatcacaattccgatttttacattccgaaggctaccctgaaagacagcggcagctatttctgccggggactcgtcggctccaagaatgtgtcctccgaaaccgtgaatatcacgattacccaaggactggctgtgcctacaatctctagcttctttccgcctggataccaagtctccttctgtcttgtgatggtcctcctgtttgctgtggacacaggactgtacttttacgtg

SEQ ID NO: 2108 - DNA, 1437 bp, synthetic construct
  source 1..1437: mol_type = other DNA
atggccttaccagtgaccgccttgctcctgccgctggccttgctgctccacgccgccaggccggaggttcagctgcttgagtctggcggaggactggttcaacctggcggaagcctgagactgtcttgtgccgccagcggcttcacctttagcagctacgccatgagctgggtccgacaggctcctggcaaaggactggaatgggtgtccgtgatctctggctctggcggcagacccaattacgccgattctgtgaagggcagattcaccatcagccgggacaacagcaagaacaccctgtacctccagatgaacagcctgcgcgacgaggataccgccgtgtactattgtgccaaggtggactacagcaactacctgttcttcgactactggggccagggcaccctggtcacagtttctagcggcggaggcggaagtggaggcggaggatctggcggcggaggctctgaaatcgtgctgacacagagccccggcacactgtcactttctccaggcgaaggcgctaccctgtcttgtagagctggacagtctgtgcggagcagctacctcggatggtatcagcagaagcctggacaggcccctcggctgttgatctacggtgcttctagcagagccacaggcatccccgatagattttctggcagcggctccggcaccgacttcaccctgacaatcagcagactggaacccgaggacttcgccgtgtattactgccagcagtacggctacagccctcctacatttggcggaggcaccaagctggaaatcaagacgcgtggaatgaggactgaggatcttcccaaagctgtcgtctttctcgaaccccaatggtatcgggtgctcgaaaaagactctgtgacactgaaatgccaaggggcctactctcccgaggacaactccacacagtggtttcataatgagtccctcatcagctctcaggccagctcttatttcattgatgccgctacagtggacgactccggcgagtatcggtgtcagaccaatctgtctacactgtctgaccccgtgcagcttgaggtccacattggatggttgctcttgcaagccccacgctgggttttcaaagaggaagatccaatccatctgcggtgccacagctggaaaaacaccgctctccacaaagtcacatacctgcaaaatggcaaaggacgcaaatacttccatcacaattccgatttttacattccgaaggctaccctgaaagacagcggcagctatttctgccggggactcgtcggctccaagaatgtgtcctccgaaaccgtgaatatcacgattacccaaggactggctgtgcctacaatctctagcttctttccgcctggataccaagtctccttctgtcttgtgatggtcctcctgtttgctgtggacacaggactgtacttttacgtg

SEQ ID NO: 2109 - DNA, 1446 bp, synthetic construct
  source 1..1446: mol_type = other DNA
atggccttaccagtgaccgccttgctcctgccgctggccttgctgctccacgccgccaggccggacatcgtgctgacacagagccctccaagcctggctatgagcctgggaaagagagccaccatcagctgtagagccagcgagagcgtgacaatcctgggctctcacctgatccactggtatcagcagaagcccggccagcctcctacactgctgattcagctggcctccaatgtgcagacaggcgtgccagccagattttctggcagcggcagcagaaccgacttcaccctgaccattgatcccgtggaagaggacgacgtggccgtgtactactgcctccagagcagaacaatccccagaacctttggcggaggcaccaagctggaaatcaagggcagcacaagcggcagcggaaagcctggatctggcgagggatctaccaagggacagatccagctggtgcagtctggccccgagctgaagaaacctggcgagacagtgaagatcagctgcaaggccagcggctacaccttcaccgactacagcatcaactgggtcaagagagcccctggcaagggcctgaaatggatgggctggatcaacaccgaaaccagagagcccgcctacgcctacgacttcagaggcagattcgccttcagcctggaaaccagcgccagcacagcctacctccagatcaacaacctgaagtacgaggacaccgccacctacttttgcgccctggactacagctacgctatggactattggggccagggcaccagcgtgacagtctcttctacgcgtggaatgaggactgaggatcttcccaaagctgtcgtctttctcgaaccccaatggtatcgggtgctcgaaaaagactctgtgacactgaaatgccaaggggcctactctcccgaggacaactccacacagtggtttcataatgagtccctcatcagctctcaggccagctcttatttcattgatgccgctacagtggacgactccggcgagtatcggtgtcagaccaatctgtctacactgtctgaccccgtgcagcttgaggtccacattggatggttgctcttgcaagccccacgctgggttttcaaagaggaagatccaatccatctgcggtgccacagctggaaaaacaccgctctccacaaagtcacatacctgcaaaatggcaaaggacgcaaatacttccatcacaattccgatttttacattccgaaggctaccctgaaagacagcggcagctatttctgccggggactcgtcggctccaagaatgtgtcctccgaaaccgtgaatatcacgattacccaaggactggctgtgcctacaatctctagcttctttccgcctggataccaagtctccttctgtcttgtgatggtcctcctgtttgctgtggacacaggactgtacttttacgtg

SEQ ID NO: 2110 - DNA, 1446 bp, synthetic construct
  source 1..1446: mol_type = other DNA
atggccttaccagtgaccgccttgctcctgccgctggccttgctgctccacgccgccaggccggacatccagatgacacagagccctagcagcctgtctgccagcgtgggagacagagtgaccatcacctgtagagccagcagcagcgtgtcctacatgcactggtatcagcagaagcccggcaaggcccctaagctgctgatctacgccaccagcaatctggcctctggcgtgccaagcagattttctggcagcggctctggcaccgacttcaccctgacaatatccagcctccagcctgaggacttcgccacctactactgccagcagtggaccttcaatcctcctaccttcggccagggcaccaagctggaaatcaagagaacagtggctgccggcggaggcggaagtggaggcggaggatctggcggcggaggctctcaagttcagctggttcagtctggggccgaagtgaagaaacctggggcctctgtgaaggtgtcctgcaaggcttccggctacacctttaccagctacaatatgcactgggtccgacaggctcccggccagagacttgaatggatgggcggcatctaccccggcaatggcgacacctcctacaaccagaaattcaagggccgcgtgacaatcaccagagacacctctgccagcaccgcctacatggaactgagcagcctgagaagcgaggacaccgccgtgtactactgcgccagatacgactacaactacgctatggactactggggccagggaaccctggtcacagtgtctagtgcttccacgcgtggaatgaggactgaggatcttcccaaagctgtcgtctttctcgaaccccaatggtatcgggtgctcgaaaaagactctgtgacactgaaatgccaaggggcctactctcccgaggacaactccacacagtggtttcataatgagtccctcatcagctctcaggccagctcttatttcattgatgccgctacagtggacgactccggcgagtatcggtgtcagaccaatctgtctacactgtctgaccccgtgcagcttgaggtccacattggatggttgctcttgcaagccccacgctgggttttcaaagaggaagatccaatccatctgcggtgccacagctggaaaaacaccgctctccacaaagtcacatacctgcaaaatggcaaaggacgcaaatacttccatcacaattccgatttttacattccgaaggctaccctgaaagacagcggcagctatttctgccggggactcgtcggctccaagaatgtgtcctccgaaaccgtgaatatcacgattacccaaggactggctgtgcctacaatctctagcttctttccgcctggataccaagtctccttctgtcttgtgatggtcctcctgtttgctgtggacacaggactgtacttttacgtg

SEQ ID NO: 2111 - DNA, 1431 bp, synthetic construct
  source 1..1431: mol_type = other DNA
atggccttaccagtgaccgccttgctcctgccgctggccttgctgctccacgccgccaggccggagatcgtgctgacacagagccctggcacactgtcactgtctccaggcgaaagagccacactgagctgtagagccagccagagcgtgtccagctcttacctggcttggtatcagcagaagcccggacaggctcccagactgctgatctacggtgcctctagcagagccacaggcatccccgatagattttctggcagcggctccggcaccgacttcaccctgacaatcagcagactggaacccgaggacttcgccgtgtactactgccagcagtaccaccactctccactgacctttggcggaggcaccaaggtggaaatcaagagaggcggaggcggaagtggaggcggaggatctggcggcggaggctctgaagttcagctggttgaatcaggtggcggcctggttcaacctggcggatctctgagactgtcttgtgccgccagcggcttcactttcagcggcagatccatgaactgggtccgacaggcccctggcaaaggactggaatgggtgtcctacatcagcagcgacagccggaccatctactacgccgatagcgtgaagggcagattcaccatctccagagacaacgccaagaacagcctgtacctccagatgaactccctgagagccgaggacacagccgtgtattattgtgccagaggcggccacggctacttcgatctttggggcagaggcaccctggtcaccgtttcttctacgcgtggaatgaggactgaggatcttcccaaagctgtcgtctttctcgaaccccaatggtatcgggtgctcgaaaaagactctgtgacactgaaatgccaaggggcctactctcccgaggacaactccacacagtggtttcataatgagtccctcatcagctctcaggccagctcttatttcattgatgccgctacagtggacgactccggcgagtatcggtgtcagaccaatctgtctacactgtctgaccccgtgcagcttgaggtccacattggatggttgctcttgcaagccccacgctgggttttcaaagaggaagatccaatccatctgcggtgccacagctggaaaaacaccgctctccacaaagtcacatacctgcaaaatggcaaaggacgcaaatacttccatcacaattccgatttttacattccgaaggctaccctgaaagacagcggcagctatttctgccggggactcgtcggctccaagaatgtgtcctccgaaaccgtgaatatcacgattacccaaggactggctgtgcctacaatctctagcttctttccgcctggataccaagtctccttctgtcttgtgatggtcctcctgtttgctgtggacacaggactgtacttttacgtg

SEQ ID NO: 2112 - DNA, 1440 bp, synthetic construct
  source 1..1440: mol_type = other DNA
atggccttaccagtgaccgccttgctcctgccgctggccttgctgctccacgccgccaggccggagatcgtgctgacacagagccctggcacactgtcactgtctccaggcgaaagagccacactgagctgtagagccagccagagcgtgtccagcgattacctggcttggtatcagcagaagcccggacaggctcccagactgctgatctatggtgcctctcggagagccacaggcatccccgatagattttctggcagcggctccggcaccgacttcaccctgacaatcagcagactggaacccgaggacttcgccgtgtactactgccagcagtacgtgtcctactggacctttggcggaggcaccaaggtggaaatcaagagaggcggaggcggaagtggaggcggaggatctggcggcggaggctctcaagttcagctggttgaatcaggcggaggcgttgtgcagcctggcagaagtctgagactgtcttgtgccgccagcggcttcaccttcagcagctatggaatgcactgggtccgacaggcccctggcaaaggacttgaatgggtggccggcatttggtgggacggcagcaatgagaagtacgccgacagcgtgaagggcagattcaccatctccagagacaacagcaagaacaccctgtacctccagatgaacagcctgagagccgaggacacagccgtgtattattgcgccaaagaggccccttactacgccaaggactacatggacgtgtggggcaagggcaccacagtgactgtctcttctacgcgtggaatgaggactgaggatcttcccaaagctgtcgtctttctcgaaccccaatggtatcgggtgctcgaaaaagactctgtgacactgaaatgccaaggggcctactctcccgaggacaactccacacagtggtttcataatgagtccctcatcagctctcaggccagctcttatttcattgatgccgctacagtggacgactccggcgagtatcggtgtcagaccaatctgtctacactgtctgaccccgtgcagcttgaggtccacattggatggttgctcttgcaagccccacgctgggttttcaaagaggaagatccaatccatctgcggtgccacagctggaaaaacaccgctctccacaaagtcacatacctgcaaaatggcaaaggacgcaaatacttccatcacaattccgatttttacattccgaaggctaccctgaaagacagcggcagctatttctgccggggactcgtcggctccaagaatgtgtcctccgaaaccgtgaatatcacgattacccaaggactggctgtgcctacaatctctagcttctttccgcctggataccaagtctccttctgtcttgtgatggtcctcctgtttgctgtggacacaggactgtacttttacgtg

SEQ ID NO: 2113 - DNA, 1440 bp, synthetic construct
  source 1..1440: mol_type = other DNA
atggccttaccagtgaccgccttgctcctgccgctggccttgctgctccacgccgccaggccggacatccagatgacacagagccctagcagcctgtctgccagcgtgggagacagagtgaccatcacctgtagagccagccaggacgtgaacacagccgtggcttggtatcagcagaagcctggcaaggcccctaagctgctgatctacagcgccagctttctgtacagcggcgtgcccagcagattcagcggaagcagaagcggcaccgacttcaccctgacaatatccagcctccagcctgaggacttcgccacctactactgccagcagcactacaccacacctccaacattcggccagggcaccaaggtggaaatcaagagaacaggcggaggcggaagtggaggcggaggatctggcggcggaggctctgaagtgcagctggttgaatcaggtggcggcctggttcaacctggcggatctctgagactgagctgtgccgccagcggcttcaacatcaaggacacctacatccactgggtccgacaggcccctggcaaaggacttgaatgggtcgccagaatctaccccaccaacggctacaccagatacgccgactctgtgaagggcagattcaccatcagcgccgacaccagcaagaacaccgcctacctccagatgaactccctgagagccgaggacaccgccgtgtactactgtagcagatggggcggctggggcttctacgctatggattattggggccagggaaccctggtcaccgtgtcatctacgcgtggaatgaggactgaggatcttcccaaagctgtcgtctttctcgaaccccaatggtatcgggtgctcgaaaaagactctgtgacactgaaatgccaaggggcctactctcccgaggacaactccacacagtggtttcataatgagtccctcatcagctctcaggccagctcttatttcattgatgccgctacagtggacgactccggcgagtatcggtgtcagaccaatctgtctacactgtctgaccccgtgcagcttgaggtccacattggatggttgctcttgcaagccccacgctgggttttcaaagaggaagatccaatccatctgcggtgccacagctggaaaaacaccgctctccacaaagtcacatacctgcaaaatggcaaaggacgcaaatacttccatcacaattccgatttttacattccgaaggctaccctgaaagacagcggcagctatttctgccggggactcgtcggctccaagaatgtgtcctccgaaaccgtgaatatcacgattacccaaggactggctgtgcctacaatctctagcttctttccgcctggataccaagtctccttctgtcttgtgatggtcctcctgtttgctgtggacacaggactgtacttttacgtg

SEQ ID NO: 2114 - DNA, 1425 bp, synthetic construct
  source 1..1425: mol_type = other DNA
atggccttaccagtgaccgccttgctcctgccgctggccttgctgctccacgccgccaggccgcaggtgcagctggttgaatctggcggcggacttgtgaagcctggcggatctctgagactgagctgtgccgccagcggcttcaccttcagcgactactacatgacctggatcagacaggcccctggcaaaggactggaatggatcagctacatcagcagcagcggcagcaccatctactacgccgatagcgtgaagggcagattcaccatcagccgggacaacgccaagaacagcctgtacctccagatgaactccctgagagccgaggacaccgccgtgtactactgcgccagagacagaaacagccacttcgactattggggccagggcaccctggtcacagtttctagcggcggaggcggaagtggaggcggaggatctggcggcggaggctctgatattcagatgacacagagccccagcagcgtgtccgcctctgtgggagatagagtgaccatcacctgtagagccagccagggcatcacaagatggctggcctggtatcagcagaagccaggcaaggcccctaagctgctgatctacgccgcttctgtgctccagagcggagtgcctagcagattttctggcagcggctccggcaccgatttcaccctgacaatatccagcctccagcctgaggacttcgccacctactactgccagcagagcaacagcttccccagaacattcggacagggcaccaaggtggaaatcaagacgcgtggaatgaggactgaggatcttcccaaagctgtcgtctttctcgaaccccaatggtatcgggtgctcgaaaaagactctgtgacactgaaatgccaaggggcctactctcccgaggacaactccacacagtggtttcataatgagtccctcatcagctctcaggccagctcttatttcattgatgccgctacagtggacgactccggcgagtatcggtgtcagaccaatctgtctacactgtctgaccccgtgcagcttgaggtccacattggatggttgctcttgcaagccccacgctgggttttcaaagaggaagatccaatccatctgcggtgccacagctggaaaaacaccgctctccacaaagtcacatacctgcaaaatggcaaaggacgcaaatacttccatcacaattccgatttttacattccgaaggctaccctgaaagacagcggcagctatttctgccggggactcgtcggctccaagaatgtgtcctccgaaaccgtgaatatcacgattacccaaggactggctgtgcctacaatctctagcttctttccgcctggataccaagtctccttctgtcttgtgatggtcctcctgtttgctgtggacacaggactgtacttttacgtg

SEQ ID NO: 2115 - DNA, 1425 bp, synthetic construct
  source 1..1425: mol_type = other DNA
atggccttaccagtgaccgccttgctcctgccgctggccttgctgctccacgccgccaggccgcaggtgcagctggttgaatctggcggcggacttgtgaagcctggcggatctctgagactgagctgtgccgccagcggcttcaccttcagcgatcactacatgagctggatcagacaggcccctggcaaaggactggaatggttcagctacatcagcagcagcggcggcatcatctactacgccgatagcgtgaagggcagattcaccatcagccgggacaacgccaagaacagcctgtacctccagatgaactccctgagagccgaggacaccgccgtgtactactgtgccagagatgtgggcagccacttcgactattggggccagggaacactggtcaccgtttctagcggcggaggcggaagtggaggcggaggatctggcggcggaggctctgatattcagatgacacagagccccagcagcgtgtccgcctctgtgggagatagagtgaccatcacctgtcgggccagccaggacattagcagatggctggcttggtatcagcagaagccaggcaaggcccctaagctgctgatttcagccgccagcagactccagagcggagtgcctagcagattttctggctctggcagcggcaccgacttcaccctgacaatatctagcctccagcctgaggacttcgccatctactattgccagcaggccaagagcttccccagaacatttggacagggcaccaaggtggaaatcaagacgcgtggaatgaggactgaggatcttcccaaagctgtcgtctttctcgaaccccaatggtatcgggtgctcgaaaaagactctgtgacactgaaatgccaaggggcctactctcccgaggacaactccacacagtggtttcataatgagtccctcatcagctctcaggccagctcttatttcattgatgccgctacagtggacgactccggcgagtatcggtgtcagaccaatctgtctacactgtctgaccccgtgcagcttgaggtccacattggatggttgctcttgcaagccccacgctgggttttcaaagaggaagatccaatccatctgcggtgccacagctggaaaaacaccgctctccacaaagtcacatacctgcaaaatggcaaaggacgcaaatacttccatcacaattccgatttttacattccgaaggctaccctgaaagacagcggcagctatttctgccggggactcgtcggctccaagaatgtgtcctccgaaaccgtgaatatcacgattacccaaggactggctgtgcctacaatctctagcttctttccgcctggataccaagtctccttctgtcttgtgatggtcctcctgtttgctgtggacacaggactgtacttttacgtg

SEQ ID NO: 2116 - DNA, 1461 bp, synthetic construct
  source 1..1461: mol_type = other DNA
atggccttaccagtgaccgccttgctcctgccgctggccttgctgctccacgccgccaggccgcaggtgcagctggttgaatctggtggcggagtggtgcagtctggcagaagcctgagactgtcttgtgccgccagcggcttcaccttcagaaactacggaatgcactgggtccgacaggcccctggcaaaggacttgaatgggtcgccgtgatttggtacgacggcagcgacaagtactacgccgattctgtgcggggcagattcaccatcagccgggacaacagcaagaacaccctgtacctccagatgaacagcctgagagccgaggacaccgccgtgtactactgtgccagagatggctacgacatcctgaccggcaatcccagagacttcgactattggggccagggcacactggtcacagtttctagcggcggaggcggaagtggaggcggaggatctggcggcggaggctctgataccgtgatgacccagacacctctgagcagccacgtgacacttggacagcctgccagcatcagctgtagaagcagccagagcctggtgcacagcgacggcaatacctacctgtcttggctccagcagaggccaggacagcctcctagactgctgatctaccggatcagcagacggttcagcggcgtgcccgatagattttctggaagcggagccggcaccgacttcaccctggaaatcagcagagtggaagccgaggatgtgggcgtctactactgtatgcagagcacccacgtgccacggacctttggacagggcaccaaggtggaaatcaagacgcgtggaatgaggactgaggatcttcccaaagctgtcgtctttctcgaaccccaatggtatcgggtgctcgaaaaagactctgtgacactgaaatgccaaggggcctactctcccgaggacaactccacacagtggtttcataatgagtccctcatcagctctcaggccagctcttatttcattgatgccgctacagtggacgactccggcgagtatcggtgtcagaccaatctgtctacactgtctgaccccgtgcagcttgaggtccacattggatggttgctcttgcaagccccacgctgggttttcaaagaggaagatccaatccatctgcggtgccacagctggaaaaacaccgctctccacaaagtcacatacctgcaaaatggcaaaggacgcaaatacttccatcacaattccgatttttacattccgaaggctaccctgaaagacagcggcagctatttctgccggggactcgtcggctccaagaatgtgtcctccgaaaccgtgaatatcacgattacccaaggactggctgtgcctacaatctctagcttctttccgcctggataccaagtctccttctgtcttgtgatggtcctcctgtttgctgtggacacaggactgtacttttacgtg

SEQ ID NO: 2117 - DNA, 1440 bp, synthetic construct
  source 1..1440: mol_type = other DNA
atggccttaccagtgaccgccttgctcctgccgctggccttgctgctccacgccgccaggccggaggtgcagctggttgaatctggcggaggactggttcagcctggcggatctctgagactgtcttgtgccgccagcggcttcccattcagcagctacgatatgcactgggtccgacaggccacaggcaaaggactggaatgggtgtccgccatcggaacagccggcgctacctattatcccggctctgtgaagggcagattcaccatcagcagagagaacgccaagaacagcctgtacctccagatgaactccctgagagccggcgataccgccgtgtactattgtgccagaggcgactacgtgtggggcacctacagacccctgttcgattattggggccagggcaccctggtcacagtttctagtggcggaggcggaagtggaggcggaggatctggcggcggaggctctgatattcagctgactcagagccccagcttcctgtctgcctctgtgggcgacagagtgaccatcacatgttgggccagccagggcatcaacaactacctggcctggtatcagcagaagcccggcaaggctcctaagctgctgatctacgccgccagcacactgcaaacaggcgtgccaagcagattttccggctctggcagcggcaccgagttcaccctgacaatatctagcctccagcctgaggacttcgccacctactactgccagcagctgaacagctaccctctgacctttggaggcggcaccaaggtggaaatcaagacgcgtggaatgaggactgaggatcttcccaaagctgtcgtctttctcgaaccccaatggtatcgggtgctcgaaaaagactctgtgacactgaaatgccaaggggcctactctcccgaggacaactccacacagtggtttcataatgagtccctcatcagctctcaggccagctcttatttcattgatgccgctacagtggacgactccggcgagtatcggtgtcagaccaatctgtctacactgtctgaccccgtgcagcttgaggtccacattggatggttgctcttgcaagccccacgctgggttttcaaagaggaagatccaatccatctgcggtgccacagctggaaaaacaccgctctccacaaagtcacatacctgcaaaatggcaaaggacgcaaatacttccatcacaattccgatttttacattccgaaggctaccctgaaagacagcggcagctatttctgccggggactcgtcggctccaagaatgtgtcctccgaaaccgtgaatatcacgattacccaaggactggctgtgcctacaatctctagcttctttccgcctggataccaagtctccttctgtcttgtgatggtcctcctgtttgctgtggacacaggactgtacttttacgtg

SEQ ID NO: 2118 - DNA, 1431 bp, synthetic construct
  source 1..1431: mol_type = other DNA
atggccttaccagtgaccgccttgctcctgccgctggccttgctgctccacgccgccaggccgcaggttcagctgcaagagtctggccctggcctggtcaagcctagcgaaacactgagcctgacctgtaccgtgtctggggccagcatcagcagcttctactggtcctggatcagacagcctcctggcaaaggactggaatggatcggctacatctactacagcggcaccaccaactacaaccccagcctgaagtccagagtgaccatcagcgtggacaccagcaagaaccagttctccctgaagctgagcagcgtgacagccgccgatacagccgtgtactactgtgccagaattgccgtggccggcttcttcttcgactattggggccagggcaccctggtcacagtttctagcggcggaggcggaagtggaggcggaggatctggcggcggaggctctgaaattgtgctgacacagagccccggcacactgtcactttctccaggcgaaagagccacactgagctgtagagccagccagagcgtgaacaagaactacctggcttggtatcagcagaagcccggacaggctcccagactgctgatctacggtgcctctagcagagccacaggcatccccgatagattttctggcagcggctccggcaccgacttcaccctgacaatcagcagactggaacccgaggacttcgccgtgtattattgccagcagtacgacagaagccctctgacctttggaggcggcaccaaggtggaaatcaagacgcgtggaatgaggactgaggatcttcccaaagctgtcgtctttctcgaaccccaatggtatcgggtgctcgaaaaagactctgtgacactgaaatgccaaggggcctactctcccgaggacaactccacacagtggtttcataatgagtccctcatcagctctcaggccagctcttatttcattgatgccgctacagtggacgactccggcgagtatcggtgtcagaccaatctgtctacactgtctgaccccgtgcagcttgaggtccacattggatggttgctcttgcaagccccacgctgggttttcaaagaggaagatccaatccatctgcggtgccacagctggaaaaacaccgctctccacaaagtcacatacctgcaaaatggcaaaggacgcaaatacttccatcacaattccgatttttacattccgaaggctaccctgaaagacagcggcagctatttctgccggggactcgtcggctccaagaatgtgtcctccgaaaccgtgaatatcacgattacccaaggactggctgtgcctacaatctctagcttctttccgcctggataccaagtctccttctgtcttgtgatggtcctcctgtttgctgtggacacaggactgtacttttacgtg

SEQ ID NO: 2119 - DNA, 1458 bp, synthetic construct
  source 1..1458: mol_type = other DNA
atggccttaccagtgaccgccttgctcctgccgctggccttgctgctccacgccgccaggccgcaggttcagctggttcagtctggggccgaagtgaagaaacctggggcctctgtgaaggtgtcctgcaaggccagcggctacacctttaccaactactacatgcactgggtccgacaggcccctggactgggacttgagtggatgggcatcatcaaccctagcgacggcagcacaagctacgcccagaaattccagggcagagtgaccatgaccagagacaccagcaccaacaccgtgtacatggacctgagcagcctgagaagcgaggacaccgccgtgtactattgtgccagaggcggcaacagcgccttctacagctactacgacatggacgtgtggggccagggcaccacagtgacagtttctagcggcggaggcggaagtggaggcggaggatctggcggcggaggctctgatgtggtcatgacacagacccctctgagcctgcctgtgacacttggacagcctgccagcatcagctgtagatccagccagagcctggtgtacagagatggcaacacctacctgagctggttccagcagaggcctggacagtctcctcggcggctgatctacaaggtgtccaactggcagagcggcgtgcccgatagattttctggcggtggcagcggcaccgacttcaccctgaagatcagcagagtggaagccgaggacgtgggcgtgtactactgtatgcagggcacacactggcctccaacattcggccagggaacaaaggtggaaatcaagacgcgtggaatgaggactgaggatcttcccaaagctgtcgtctttctcgaaccccaatggtatcgggtgctcgaaaaagactctgtgacactgaaatgccaaggggcctactctcccgaggacaactccacacagtggtttcataatgagtccctcatcagctctcaggccagctcttatttcattgatgccgctacagtggacgactccggcgagtatcggtgtcagaccaatctgtctacactgtctgaccccgtgcagcttgaggtccacattggatggttgctcttgcaagccccacgctgggttttcaaagaggaagatccaatccatctgcggtgccacagctggaaaaacaccgctctccacaaagtcacatacctgcaaaatggcaaaggacgcaaatacttccatcacaattccgatttttacattccgaaggctaccctgaaagacagcggcagctatttctgccggggactcgtcggctccaagaatgtgtcctccgaaaccgtgaatatcacgattacccaaggactggctgtgcctacaatctctagcttctttccgcctggataccaagtctccttctgtcttgtgatggtcctcctgtttgctgtggacacaggactgtacttttacgtg

SEQ ID NO: 2120 - DNA, 1419 bp, synthetic construct
  source 1..1419: mol_type = other DNA
atggccttaccagtgaccgccttgctcctgccgctggccttgctgctccacgccgccaggccgcaggttcagctccagcagtctggacctgagctggttaagcctggcgcttctgtgcggatctcttgcaaggccagcggctacaccttcaccacctactacatccactgggtcaagcagcggcctggacagggactcgaatggatcggctggatctaccccggcaacgtgaacaccaactacaacgagaagttcaagggcaaagccacactgaccgccgacaagagcagcagcacagcctacatgcagctgaccagcctgacctctgaggacagcgccgtgtacttttgtgccagaggcgtgtactacttcgactactggggccagggcaccatcctgacagtttctagcggcggaggcggaagtggaggcggaggatctggcggcggaggctctatcgtgatgacccagactcctaagttcctgctggtgtctgccggcgacagagtgaccatcacctgtaaagccagccagagcgtgaacaacgacgtgtcctggttccagcagaagcccggccaatctcctacactgctgatctactacgccagcaacagatacaccggcgtgcccgatagattcaccggctctggctacggcaccgacttcacctttaccatcagcaccgtgcaggccgaggacctggctgtgtacttctgccagcaagactacagcagcccttacacctttggaggcggcaccaagctggaaatcaagacgcgtggaatgaggactgaggatcttcccaaagctgtcgtctttctcgaaccccaatggtatcgggtgctcgaaaaagactctgtgacactgaaatgccaaggggcctactctcccgaggacaactccacacagtggtttcataatgagtccctcatcagctctcaggccagctcttatttcattgatgccgctacagtggacgactccggcgagtatcggtgtcagaccaatctgtctacactgtctgaccccgtgcagcttgaggtccacattggatggttgctcttgcaagccccacgctgggttttcaaagaggaagatccaatccatctgcggtgccacagctggaaaaacaccgctctccacaaagtcacatacctgcaaaatggcaaaggacgcaaatacttccatcacaattccgatttttacattccgaaggctaccctgaaagacagcggcagctatttctgccggggactcgtcggctccaagaatgtgtcctccgaaaccgtgaatatcacgattacccaaggactggctgtgcctacaatctctagcttctttccgcctggataccaagtctccttctgtcttgtgatggtcctcctgtttgctgtggacacaggactgtacttttacgtg

SEQ ID NO: 2121 - DNA, 1428 bp, synthetic construct
  source 1..1428: mol_type = other DNA
atggccttaccagtgaccgccttgctcctgccgctggccttgctgctccacgccgccaggccgcaggttcagctgcaagagtctggccctggcctggtcaagcctagccaaacactgagcctgacctgtaccgtgtctggcggcagcatcaacaacaacaattactactggacctggatcagacagcaccccggcaaaggactggaatggatcggctacatctactacagcggcagcaccttctacaaccccagcctgaagtccagagtgaccatcagcgtggacaccagcaagacccagttctccctgaagctgagcagcgtgacagccgccgatacagccgtgtactactgcgccagagaagataccatgaccggcctggatgtgtggggccagggaacaacagtgacagtgtctagcggcggaggcggaagtggaggcggaggatctggcggcggaggctctgacattcagatgacacagagccctagcagcctgagcgcctctgtgggagacagagtgacaattacctgtcgggccagccagtctatcaacaactacctgaactggtatcagcagaagcccggcaaggcccctacactgctgatctatgccgccagctctctccagagcggagtgcctagcagattcagcggaagcagaagcggcaccgacttcaccctgacaatatccagcctccagcctgaggacttcgccgcctacttttgccagcagacctacagcaaccccacctttggccagggcaccaaggtggaagtgaagacgcgtggaatgaggactgaggatcttcccaaagctgtcgtctttctcgaaccccaatggtatcgggtgctcgaaaaagactctgtgacactgaaatgccaaggggcctactctcccgaggacaactccacacagtggtttcataatgagtccctcatcagctctcaggccagctcttatttcattgatgccgctacagtggacgactccggcgagtatcggtgtcagaccaatctgtctacactgtctgaccccgtgcagcttgaggtccacattggatggttgctcttgcaagccccacgctgggttttcaaagaggaagatccaatccatctgcggtgccacagctggaaaaacaccgctctccacaaagtcacatacctgcaaaatggcaaaggacgcaaatacttccatcacaattccgatttttacattccgaaggctaccctgaaagacagcggcagctatttctgccggggactcgtcggctccaagaatgtgtcctccgaaaccgtgaatatcacgattacccaaggactggctgtgcctacaatctctagcttctttccgcctggataccaagtctccttctgtcttgtgatggtcctcctgtttgctgtggacacaggactgtacttttacgtg

SEQ ID NO: 2122 - DNA, 1443 bp, synthetic construct
  source 1..1443: mol_type = other DNA
atggccttaccagtgaccgccttgctcctgccgctggccttgctgctccacgccgccaggccgagctacgagctgacacagcctccaagcgtgtccgtgtctcctggacagacagccagcatcacctgtagcggcgataagctgggcgataagtacgccagctggtatcagcagaagcccggccagtctcctgtgctggtcatctaccaggacaacagaaggcccagcggcatccccgagagattcagcggcagcaatagcggcaataccgccacactgaccatcagcggcacccaggctatggacgaggccgactactattgccaggcttgggacagcgacacctacgtgttcggcaccggcaccaaagtgacagtgcttggacaaggcggaggcggaagtggaggcggaggatctggcggcggaggctctgaagttcagctggttcagagcggagccgaagtgaagaaacctggggcctctgtgaaggtgtcctgcaaggcttccggcgataccttcaagcggtactacgtgcactgggtccgacaggctccaggacaaggactggaatggatgggcatcatcaaccccagcggcgtgtccacaacatacgcccagaaattccagggcagagtgaccatgaccagagacaccagcacctccaccgtgtacatggaactgagcagcctgagaagcgaggacaccgccgtgtactactgtgctgaagtgcgcggcagcggcttcaactacttcggcatggatgtgtggggccagggcacactggttaccgtttcttctacgcgtggaatgaggactgaggatcttcccaaagctgtcgtctttctcgaaccccaatggtatcgggtgctcgaaaaagactctgtgacactgaaatgccaaggggcctactctcccgaggacaactccacacagtggtttcataatgagtccctcatcagctctcaggccagctcttatttcattgatgccgctacagtggacgactccggcgagtatcggtgtcagaccaatctgtctacactgtctgaccccgtgcagcttgaggtccacattggatggttgctcttgcaagccccacgctgggttttcaaagaggaagatccaatccatctgcggtgccacagctggaaaaacaccgctctccacaaagtcacatacctgcaaaatggcaaaggacgcaaatacttccatcacaattccgatttttacattccgaaggctaccctgaaagacagcggcagctatttctgccggggactcgtcggctccaagaatgtgtcctccgaaaccgtgaatatcacgattacccaaggactggctgtgcctacaatctctagcttctttccgcctggataccaagtctccttctgtcttgtgatggtcctcctgtttgctgtggacacaggactgtacttttacgtg

SEQ ID NO: 2123 - DNA, 1440 bp, synthetic construct
  source 1..1440: mol_type = other DNA
atggccttaccagtgaccgccttgctcctgccgctggccttgctgctccacgccgccaggccggaggttcagctgcttgagtctggcggaggactggttcaacctggcggaagcctgagactgtcttgtgccgccagcggcttcacctttagcagctacgccatgagctgggtccgacaggctcctggcaaaggactggaagtggtggtgtctgccatttctggcggcggaggcagaacctactacgccgattctgtgaagggcagattcaccatcagccgggacaacagcaagaacaccctgtacctgcagatgaacagcctgagagccgaggacaccgccgtgtactactgtgccagagaagagatggccttccgggcctacagattcgacatctggggccagggaaccctggtcacagtttctagcggcggaggcggaagtggaggcggaggatctggcggcggaggctctgatattcagatgacacagagccccagcagcctgtctgcctctgtgggagacagagtgaccatcacctgtagagccagccagagcatcagcagctacctgaactggtatcagcagaagcccggcaaggcccctaaactgctgatctatgccgcctccagtctgcagagcggagtgcctagcagattttctggctctggcagcggcaccgacttcaccctgacaatatctagcctgcagcctgaggacttcgccacctactactgccagcagagctacatcacccctctgacattcggtggcggcaccaaggtggaaatcaagacgcgtggaatgaggactgaggatcttcccaaagctgtcgtctttctcgaaccccaatggtatcgggtgctcgaaaaagactctgtgacactgaaatgccaaggggcctactctcccgaggacaactccacacagtggtttcataatgagtccctcatcagctctcaggccagctcttatttcattgatgccgctacagtggacgactccggcgagtatcggtgtcagaccaatctgtctacactgtctgaccccgtgcagcttgaggtccacattggatggttgctcttgcaagccccacgctgggttttcaaagaggaagatccaatccatctgcggtgccacagctggaaaaacaccgctctccacaaagtcacatacctgcaaaatggcaaaggacgcaaatacttccatcacaattccgatttttacattccgaaggctaccctgaaagacagcggcagctatttctgccggggactcgtcggctccaagaatgtgtcctccgaaaccgtgaatatcacgattacccaaggactggctgtgcctacaatctctagcttctttccgcctggataccaagtctccttctgtcttgtgatggtcctcctgtttgctgtggacacaggactgtacttttacgtg

SEQ ID NO: 2124 - DNA, 1464 bp, synthetic construct
  source 1..1464: mol_type = other DNA
atggccttaccagtgaccgccttgctcctgccgctggccttgctgctccacgccgccaggccggacatcgtgctgacacagagccctgcttctctggccgtgtctcttggacagggcgctaccatcagctgtagagccagcaagagcgtgtccaccagcggctacacctacatgcactggtatcagcagaagcccggccagcctcctaagctgctgatctacctggcctccaacctggaaagcggagtgcctgccagattttctggcagcggctctggcaccgacttcaccctgaatatccatcctgtggaagaagaggacgccgccacctactactgtcagcactctggcgaactgccacctagctttggcggaggcaccaagctggaaatcaagagagctggcggaggcggaagtggaggcggaggatctggcggcggaggctctgaagtgcagctggtggaatctggcggcgaccttgtgaaacctggcggctctctgaagctgagctgtgccgtgtccggcttcacctttagcagctacggcatgagctgggtccgacagacccctgacaagagactggaatgggtcgccacagtgtctagcggcggcacctacacatattaccccgacagcgtgaagggcagattcaccatcagccgggacaacgccaagaacaccctgtacctccagatgagcagcctgaagtccgaggacagcgccatgtactactgcgccagacaccggggcaattactacgccacctattattacgctatggactactggggccagggcaccagcgtgacagtttcttctacgcgtggaatgaggactgaggatcttcccaaagctgtcgtctttctcgaaccccaatggtatcgggtgctcgaaaaagactctgtgacactgaaatgccaaggggcctactctcccgaggacaactccacacagtggtttcataatgagtccctcatcagctctcaggccagctcttatttcattgatgccgctacagtggacgactccggcgagtatcggtgtcagaccaatctgtctacactgtctgaccccgtgcagcttgaggtccacattggatggttgctcttgcaagccccacgctgggttttcaaagaggaagatccaatccatctgcggtgccacagctggaaaaacaccgctctccacaaagtcacatacctgcaaaatggcaaaggacgcaaatacttccatcacaattccgatttttacattccgaaggctaccctgaaagacagcggcagctatttctgccggggactcgtcggctccaagaatgtgtcctccgaaaccgtgaatatcacgattacccaaggactggctgtgcctacaatctctagcttctttccgcctggataccaagtctccttctgtcttgtgatggtcctcctgtttgctgtggacacaggactgtacttttacgtg

SEQ ID NO: 2125 - DNA, 1446 bp, synthetic construct
  source 1..1446: mol_type = other DNA
atggccttaccagtgaccgccttgctcctgccgctggccttgctgctccacgccgccaggccggacatccagatgacacagagccctagcagcctgtctgccagcgtgggagacagagtgaccatcacatgtagcgccagccagggcatcagaaactacctgaactggtatcagcagaaacccggcaaggtgcccaagctgctgatctactacaccagcagactgcacagcggcgtgcccagcagattttctggctctggcagcggcaccgacttcaccctgacaatatctagcctccagcctgaggacgtggcaacctactactgtcagcagtacggcaagctgccctacacattcggccagggcaccaagctggaaatcaagagaacagtggctgccggcggaggcggaagtggaggcggaggatctggcggcggaggctctgaagttcagctggttgaatcaggcggcggactggttcaacctggcggatctctgagactgagctgtgccgccagcggcttcacattttccgacgcctggatggactgggtccgacaggctcctggaaaaggactggaatgggtcggagagatccggtccaaagtgaacaaccacgaaacctactatgccgagagcgtgaagggcagattcaccatcagccgggacgacagcaagaacagcctgtacctccagatgaactccctgaaaaccgaggacaccgccgtgtactactgcgccagaaacgactacttcgactactggggccagggaaccaccgtgacagtgtctagtgcttccacgcgtggaatgaggactgaggatcttcccaaagctgtcgtctttctcgaaccccaatggtatcgggtgctcgaaaaagactctgtgacactgaaatgccaaggggcctactctcccgaggacaactccacacagtggtttcataatgagtccctcatcagctctcaggccagctcttatttcattgatgccgctacagtggacgactccggcgagtatcggtgtcagaccaatctgtctacactgtctgaccccgtgcagcttgaggtccacattggatggttgctcttgcaagccccacgctgggttttcaaagaggaagatccaatccatctgcggtgccacagctggaaaaacaccgctctccacaaagtcacatacctgcaaaatggcaaaggacgcaaatacttccatcacaattccgatttttacattccgaaggctaccctgaaagacagcggcagctatttctgccggggactcgtcggctccaagaatgtgtcctccgaaaccgtgaatatcacgattacccaaggactggctgtgcctacaatctctagcttctttccgcctggataccaagtctccttctgtcttgtgatggtcctcctgtttgctgtggacacaggactgtacttttacgtg

SEQ ID NO: 2126 - DNA, 1470 bp, synthetic construct
  source 1..1470: mol_type = other DNA
atggccttaccagtgaccgccttgctcctgccgctggccttgctgctccacgccgccaggccggaggttcagctgcaagagtctggggccgaagtgaagaaacctggcagcagcgtgaaggtgtcctgcaaggccagcggcttcaacatcaaggacacctacatgcactgggtccgacaggcccctggacaaggacttgagtggatgggcagaatcgaccccgccaacggcaacagcaaatacgtgcccaagttccagggcagagtgaccatcacagccgacgagagcacaagcaccgcctacatggaactgagcagcctgagaagcgaggacaccgccgtgtactactgtgcccctttcggctactacgtgtccgactacgccatggcctattggggccagggaaccaccgtgacagtgtctagtgcatctggcggaggcggaagtggaggcggaggatctggcggcggaggctctgacatcgtgatgacacagagccccgatagcctggccgtgtctctgggagaaagagccaccatcaactgtagagccggcgagagcgtggacatcttcggcgtgggatttctgcactggtatcagcagaagcccggccagcctcctaagctgctgatctacagagccagcaacctggaaagcggcgtgcccgatagattttctggcagcggctctggcaccgacttcaccctgacaatcagacctctccaggccgaggatgtggccgtgtattattgccagcagaccaacgaggacccctacacatttggacagggcaccaagctggaaatcaagagaacagtggccgccacgcgtggaatgaggactgaggatcttcccaaagctgtcgtctttctcgaaccccaatggtatcgggtgctcgaaaaagactctgtgacactgaaatgccaaggggcctactctcccgaggacaactccacacagtggtttcataatgagtccctcatcagctctcaggccagctcttatttcattgatgccgctacagtggacgactccggcgagtatcggtgtcagaccaatctgtctacactgtctgaccccgtgcagcttgaggtccacattggatggttgctcttgcaagccccacgctgggttttcaaagaggaagatccaatccatctgcggtgccacagctggaaaaacaccgctctccacaaagtcacatacctgcaaaatggcaaaggacgcaaatacttccatcacaattccgatttttacattccgaaggctaccctgaaagacagcggcagctatttctgccggggactcgtcggctccaagaatgtgtcctccgaaaccgtgaatatcacgattacccaaggactggctgtgcctacaatctctagcttctttccgcctggataccaagtctccttctgtcttgtgatggtcctcctgtttgctgtggacacaggactgtacttttacgtg

SEQ ID NO: 2127 - DNA, 1449 bp, synthetic construct
  source 1..1449: mol_type = other DNA
atggccttaccagtgaccgccttgctcctgccgctggccttgctgctccacgccgccaggccgcaagttcagctggttcagtctggggccgaagtgaagaaacctggcagcagcgtgaaggtgtcctgcaaagcaagcggcggcacctttagcagctacgccatctcttgggtccgacaggcaccaggacaaggactggaatggatgggcctgattatccccagatacggcaaggccagatacgcccagaaattccagggcagagtgaccatcaccgccgacgagtctacaagcaccgcctacatggaactgagcagcctgagaagcgaggacacagccgtgtattattgcgcccggaactggccctactactacatggatttttggggccagggaaccctggtcaccgtgtctagtgcatctggcggaggcggaagtggaggcggaggatctggcggcggaggctctgacatcgtgctgacacagtctcccgccacactgtcactgtctccaggcgaaagagccacactgagctgtagagccagccagaacatcgtgttcaacctggcctggtatcagcagaagcctggacaggctccccggctgctgatctacgatgccagcaatagagccaccggcgtgcccgccagattttctggttctggcagcggcaccgacttcaccctgaccatatctagcctggaacctgaggacttcgccgtgtactactgccagcagaaaaagtccatgcctctgaccttcggccagggcaccaaggtggaaatcaagagaacagtggctgccacgcgtggaatgaggactgaggatcttcccaaagctgtcgtctttctcgaaccccaatggtatcgggtgctcgaaaaagactctgtgacactgaaatgccaaggggcctactctcccgaggacaactccacacagtggtttcataatgagtccctcatcagctctcaggccagctcttatttcattgatgccgctacagtggacgactccggcgagtatcggtgtcagaccaatctgtctacactgtctgaccccgtgcagcttgaggtccacattggatggttgctcttgcaagccccacgctgggttttcaaagaggaagatccaatccatctgcggtgccacagctggaaaaacaccgctctccacaaagtcacatacctgcaaaatggcaaaggacgcaaatacttccatcacaattccgatttttacattccgaaggctaccctgaaagacagcggcagctatttctgccggggactcgtcggctccaagaatgtgtcctccgaaaccgtgaatatcacgattacccaaggactggctgtgcctacaatctctagcttctttccgcctggataccaagtctccttctgtcttgtgatggtcctcctgtttgctgtggacacaggactgtacttttacgtg

SEQ ID NO: 2128 - DNA, 1458 bp, synthetic construct
  source 1..1458: mol_type = other DNA
atggccttaccagtgaccgccttgctcctgccgctggccttgctgctccacgccgccaggccggaggtgcagctggttgaatctggcggcggacttgtgaagcctggcggatctctgagactgagctgtgccgccagcggcttcacctttagcaatgcctggatgagctgggtccgacaggcccctggaaaaggactggaatgggtcggacggatcaagagcaagaccgaaggcggcaccaccgattatgctgcccctgtgaagggcagattcaccatcagcagggacgacagcaagaacaccctgtacctccagatgaacagcctgaaaaccgaggacaccgccgtgtactactgcaccacaccttacgagtggtcttggtacgactactggggccagggcacactggtcacagtgtcatctgcatctggcggaggcggaagtggaggcggaggatctggcggcggaggctctcagacagtggtcacccaagagcctagcctgacagtgtctcctggcggaaccgtgacactgacatgtggcagttctaccggcgctgtgaccaccagcaattacgccaactgggtgcagcagaagccaggccaagctcctagaggactgatcggcggcacaaacaagagagcccctggcacaccagccagattttctggctctctgctcggcggaaaggccgctcttacactgtctggtgtccagcctgaggacgaggccgagtattattgcgccctgtggtacagcaacctgtgggttttcggcggaggcaccaagctgacagtgctgactgttgctgctacgcgtggaatgaggactgaggatcttcccaaagctgtcgtctttctcgaaccccaatggtatcgggtgctcgaaaaagactctgtgacactgaaatgccaaggggcctactctcccgaggacaactccacacagtggtttcataatgagtccctcatcagctctcaggccagctcttatttcattgatgccgctacagtggacgactccggcgagtatcggtgtcagaccaatctgtctacactgtctgaccccgtgcagcttgaggtccacattggatggttgctcttgcaagccccacgctgggttttcaaagaggaagatccaatccatctgcggtgccacagctggaaaaacaccgctctccacaaagtcacatacctgcaaaatggcaaaggacgcaaatacttccatcacaattccgatttttacattccgaaggctaccctgaaagacagcggcagctatttctgccggggactcgtcggctccaagaatgtgtcctccgaaaccgtgaatatcacgattacccaaggactggctgtgcctacaatctctagcttctttccgcctggataccaagtctccttctgtcttgtgatggtcctcctgtttgctgtggacacaggactgtacttttacgtg

SEQ ID NO: 2129 - DNA, 1458 bp, synthetic construct
  source 1..1458: mol_type = other DNA
atggccttaccagtgaccgccttgctcctgccgctggccttgctgctccacgccgccaggccgcaggttcagctggttcagtctggggccgaagtgaagaaacctggggcctctgtgaaggtgtcctgcaaggcttccggctacacctttaccagctactacatgcactgggtccgacaggcccctggacaaggacttgagtggatgggcatcatcaaccctagcggcggcagcacaagctacgcccagaaattccagggcagagtgaccatgacacacgacaccagcacctccaccgtgtacatggaactgagcagcctgagaagcgaggacaccgccgtgtactactgcgccagatccttcttcaccggcttccacctggattactggggccagggaacactggtcacagtgtcatctgcatctggcggaggcggaagtggaggcggaggatctggcggcggaggctctgaaattgtgctgacacagagccccggcacactgtcactttctccaggcgaaagagccacactgagctgtagagccagccagagcgtgtccagctcttacctggcttggtatcagcagaagcccggccaggctcctagactgctgatctacggtgccagcagcagagccacaggcatccccgatagattttctggcagcggctccggcaccgacttcaccctgacaatcagcagactggaacccgaggactttgccgtgtattattgccagcagtacaccaacgagcactactacaccttcggccagggcaccaaggtggaaatcaagagaacagtggccgccacgcgtggaatgaggactgaggatcttcccaaagctgtcgtctttctcgaaccccaatggtatcgggtgctcgaaaaagactctgtgacactgaaatgccaaggggcctactctcccgaggacaactccacacagtggtttcataatgagtccctcatcagctctcaggccagctcttatttcattgatgccgctacagtggacgactccggcgagtatcggtgtcagaccaatctgtctacactgtctgaccccgtgcagcttgaggtccacattggatggttgctcttgcaagccccacgctgggttttcaaagaggaagatccaatccatctgcggtgccacagctggaaaaacaccgctctccacaaagtcacatacctgcaaaatggcaaaggacgcaaatacttccatcacaattccgatttttacattccgaaggctaccctgaaagacagcggcagctatttctgccggggactcgtcggctccaagaatgtgtcctccgaaaccgtgaatatcacgattacccaaggactggctgtgcctacaatctctagcttctttccgcctggataccaagtctccttctgtcttgtgatggtcctcctgtttgctgtggacacaggactgtacttttacgtg

SEQ ID NO: 2130 - DNA, 1476 bp, synthetic construct
  source 1..1476: mol_type = other DNA
atggccttaccagtgaccgccttgctcctgccgctggccttgctgctccacgccgccaggccggagatcgtgctgacacagtctcccgccacactgtcactgtctccaggcgaaagagccacactgagctgtagcgtgtccagcagcatcagcagcagcaacctgcactggtatcagcagaagcctggacaggcccctcggctgctgatctacggcacatctaatctggcctctggcatccccgccagattttctggctctggaagcggcaccgacttcaccctgaccataagcagcctggaacctgaggacttcgccgtgtactactgccagcagtggtccagctatccccacacatttggcggaggcaccaaggtggaaatcaagagaacagtggctgccggcggaggcggaagtggaggcggaggatctggcggcggaggctctcaggttcagctggttcagagcggagccgaagtgaagaaacctggggcctctgtgaaggtgtcctgcaaggcttccggctacacctttaccaactacctgatcgagtgggtccgacaggctccaggacaaggactggaatggatgggcctgattaaccctggcagcggcggcaccaactacaacgagaagttcaagggcagagtgaccatgaccaccgacaccagcacaagcaccgcctacatggaactgcggagcctgagaagcgacgacaccgccgtgtattattgcgccagaagaagccctctcggctcttggatctactacgcctatgacggcgtggcctattggggccagggaacactggttacagtgtcctctgccagcacgcgtggaatgaggactgaggatcttcccaaagctgtcgtctttctcgaaccccaatggtatcgggtgctcgaaaaagactctgtgacactgaaatgccaaggggcctactctcccgaggacaactccacacagtggtttcataatgagtccctcatcagctctcaggccagctcttatttcattgatgccgctacagtggacgactccggcgagtatcggtgtcagaccaatctgtctacactgtctgaccccgtgcagcttgaggtccacattggatggttgctcttgcaagccccacgctgggttttcaaagaggaagatccaatccatctgcggtgccacagctggaaaaacaccgctctccacaaagtcacatacctgcaaaatggcaaaggacgcaaatacttccatcacaattccgatttttacattccgaaggctaccctgaaagacagcggcagctatttctgccggggactcgtcggctccaagaatgtgtcctccgaaaccgtgaatatcacgattacccaaggactggctgtgcctacaatctctagcttctttccgcctggataccaagtctccttctgtcttgtgatggtcctcctgtttgctgtggacacaggactgtacttttacgtg

SEQ ID NO: 2131 - DNA, 1431 bp, synthetic construct
  source 1..1431: mol_type = other DNA
atggccttaccagtgaccgccttgctcctgccgctggccttgctgctccacgccgccaggccggacatccagatgacacagagccctagcagcctgtctgccagcgtgggagacagagtgaccatcacctgtaaagccggccagaacgtgggcacaagcgtggcatggtatcagcagaagcctggcaaggcccctaagctgctgatctacagcgccagctacagatacagcggcgtgcccagcagattttctggcagcggctctggcaccgacttcaccctgacaatatccagcctccagcctgaggacttcgccacctactactgccagcagtacatcacatacccctacaccttcggccagggcaccaaggtggaaatcaagagaacagtggctgccggcggaggcggaagtggaggcggaggatctggcggcggaggctctgaagttcagctggttgaatcaggcggcggactggttcaacctggcggatctctgagactgagctgtgccgccagcggcttcaccttcagcagatactggatgagctgggtccgacaggcccctggcaaaggacttgaatgggtcgccgagatcaaccccgacagcagcaccatccagtacaccccatctctgaaggcccggttcaccctgtccgtggacagaagcaagaacaccctgtacctccagatgaactccctgagagccgaggacaccgccgtgtactattgtgccagacctgcctattggggccagggaacactggtcacagtgtctagcgcttccacgcgtggaatgaggactgaggatcttcccaaagctgtcgtctttctcgaaccccaatggtatcgggtgctcgaaaaagactctgtgacactgaaatgccaaggggcctactctcccgaggacaactccacacagtggtttcataatgagtccctcatcagctctcaggccagctcttatttcattgatgccgctacagtggacgactccggcgagtatcggtgtcagaccaatctgtctacactgtctgaccccgtgcagcttgaggtccacattggatggttgctcttgcaagccccacgctgggttttcaaagaggaagatccaatccatctgcggtgccacagctggaaaaacaccgctctccacaaagtcacatacctgcaaaatggcaaaggacgcaaatacttccatcacaattccgatttttacattccgaaggctaccctgaaagacagcggcagctatttctgccggggactcgtcggctccaagaatgtgtcctccgaaaccgtgaatatcacgattacccaaggactggctgtgcctacaatctctagcttctttccgcctggataccaagtctccttctgtcttgtgatggtcctcctgtttgctgtggacacaggactgtacttttacgtg

SEQ ID NO: 2132 - DNA, 1452 bp, synthetic construct
  source 1..1452: mol_type = other DNA
atggccttaccagtgaccgccttgctcctgccgctggccttgctgctccacgccgccaggccggacatccagatgacacagagccctagcagcctgtctgccagcgtgggagacagagtgaccatcacatgtagcgccagccaggacatcggcaactttctgaactggtatcagcagaagcccggcaaggcccctaagctgctgatctactacacctccagcctgtacagcggcgtgcccagcagattttctggcagcggctctggcaccgacttcaccctgacaatatccagcctccagccagaggacttcgccacctactactgccagcagtacagcaagctgcccctgacctttggacagggcaccaagctggaaatcaagagaacagtggctgccggcggaggcggaagtggaggcggaggatctggcggcggaggctctcaagttcagctggttcagtctggggccgaagtgaagaaacctggggcctctgtgaaggtgtcctgcaaggcttccggctacacctttaccggctacaacatccactgggtccgacaggctcccggccaaagacttgaatggatgggcgctatctaccccggcaacggcgataccagctacaagcagaaattccggggcagagtgacaattaccagagacaccagcgccagcaccgcctacatggaactgtctagcctgagaagcgaggacaccgccgtgtactattgcgccagaggcgaaacagccagagccacctttgcctattggggccagggaaccctggtcacagtgtctagtgcttccacgcgtggaatgaggactgaggatcttcccaaagctgtcgtctttctcgaaccccaatggtatcgggtgctcgaaaaagactctgtgacactgaaatgccaaggggcctactctcccgaggacaactccacacagtggtttcataatgagtccctcatcagctctcaggccagctcttatttcattgatgccgctacagtggacgactccggcgagtatcggtgtcagaccaatctgtctacactgtctgaccccgtgcagcttgaggtccacattggatggttgctcttgcaagccccacgctgggttttcaaagaggaagatccaatccatctgcggtgccacagctggaaaaacaccgctctccacaaagtcacatacctgcaaaatggcaaaggacgcaaatacttccatcacaattccgatttttacattccgaaggctaccctgaaagacagcggcagctatttctgccggggactcgtcggctccaagaatgtgtcctccgaaaccgtgaatatcacgattacccaaggactggctgtgcctacaatctctagcttctttccgcctggataccaagtctccttctgtcttgtgatggtcctcctgtttgctgtggacacaggactgtacttttacgtg

SEQ ID NO: 2133 - DNA, 1044 bp, synthetic construct
  source 1..1044: mol_type = other DNA
atggccttaccagtgaccgccttgctcctgccgctggccttgctgctccacgccgccaggccggatgtgcaagtgacacagagccctagcagcctgtctgcctctgtgggcgacagagtgacaatcacctgtcggagcagccagagcctggctaactcctacggcaataccttcctgagctggtatctgcacaagcccggaaaggctccccagctgctgatctacggcatcagcaacagattcagcggcgtgcccgataggtttagcggctctggaagcggcaccgacttcaccctgacaatatccagcctccagcctgaggactttgccacctactactgtctgcaaggcacccaccagccttacacattcggacagggcaccaaggtggaaatcaagacgcgtggaatgaggactgaggatcttcccaaagctgtcgtctttctcgaaccccaatggtatcgggtgctcgaaaaagactctgtgacactgaaatgccaaggggcctactctcccgaggacaactccacacagtggtttcataatgagtccctcatcagctctcaggccagctcttatttcattgatgccgctacagtggacgactccggcgagtatcggtgtcagaccaatctgtctacactgtctgaccccgtgcagcttgaggtccacattggatggttgctcttgcaagccccacgctgggttttcaaagaggaagatccaatccatctgcggtgccacagctggaaaaacaccgctctccacaaagtcacatacctgcaaaatggcaaaggacgcaaatacttccatcacaattccgatttttacattccgaaggctaccctgaaagacagcggcagctatttctgccggggactcgtcggctccaagaatgtgtcctccgaaaccgtgaatatcacgattacccaaggactggctgtgcctacaatctctagcttctttccgcctggataccaagtctccttctgtcttgtgatggtcctcctgtttgctgtggacacaggactgtacttttacgtg

SEQ ID NO: 2134 - DNA, 1029 bp, synthetic construct
  source 1..1029: mol_type = other DNA
atggccttaccagtgaccgccttgctcctgccgctggccttgctgctccacgccgccaggccggacatccagatgacacagagccctagcagcctgtctgccagcgtgggagacagagtgaccatcacctgtagagccagccaggacatcagcaactacctgaactggtatcagcagaaacccggcaaggccgtgaagctgctgatctactacaccagcatcctgcacagcggcgtgcccagcagattttctggctctggcagcggcaccgactacaccctgacaatatctagcctccagcctgaggacttcgctacctacttctgccagcaaggcaacaccctgccttggacatttggcggaggcaccaaggtggaaatcaaaacgcgtggaatgaggactgaggatcttcccaaagctgtcgtctttctcgaaccccaatggtatcgggtgctcgaaaaagactctgtgacactgaaatgccaaggggcctactctcccgaggacaactccacacagtggtttcataatgagtccctcatcagctctcaggccagctcttatttcattgatgccgctacagtggacgactccggcgagtatcggtgtcagaccaatctgtctacactgtctgaccccgtgcagcttgaggtccacattggatggttgctcttgcaagccccacgctgggttttcaaagaggaagatccaatccatctgcggtgccacagctggaaaaacaccgctctccacaaagtcacatacctgcaaaatggcaaaggacgcaaatacttccatcacaattccgatttttacattccgaaggctaccctgaaagacagcggcagctatttctgccggggactcgtcggctccaagaatgtgtcctccgaaaccgtgaatatcacgattacccaaggactggctgtgcctacaatctctagcttctttccgcctggataccaagtctccttctgtcttgtgatggtcctcctgtttgctgtggacacaggactgtacttttacgtg

SEQ ID NO: 2135 - DNA, 1032 bp, synthetic construct
  source 1..1032: mol_type = other DNA
atggccttaccagtgaccgccttgctcctgccgctggccttgctgctccacgccgccaggccggacatcgtgatgacccagagccagcggttcatgaccacaagcgtgggcgatagagtgtccgtgacatgcaaggccagccagagcgtggactctaacgtggcctggtatcagcagaagcccagacagagccccaaggctctgatctttagcgccagcctgagattcagcggagtgcccgctagattcacaggcagcggctctggcaccgatttcaccctgaccatcagcaacctccagagcgaggacctggccgagtatttctgccagcagtacaacaactaccctctgaccttcggagccggcaccaagctggaactgaagagaacgcgtggaatgaggactgaggatcttcccaaagctgtcgtctttctcgaaccccaatggtatcgggtgctcgaaaaagactctgtgacactgaaatgccaaggggcctactctcccgaggacaactccacacagtggtttcataatgagtccctcatcagctctcaggccagctcttatttcattgatgccgctacagtggacgactccggcgagtatcggtgtcagaccaatctgtctacactgtctgaccccgtgcagcttgaggtccacattggatggttgctcttgcaagccccacgctgggttttcaaagaggaagatccaatccatctgcggtgccacagctggaaaaacaccgctctccacaaagtcacatacctgcaaaatggcaaaggacgcaaatacttccatcacaattccgatttttacattccgaaggctaccctgaaagacagcggcagctatttctgccggggactcgtcggctccaagaatgtgtcctccgaaaccgtgaatatcacgattacccaaggactggctgtgcctacaatctctagcttctttccgcctggataccaagtctccttctgtcttgtgatggtcctcctgtttgctgtggacacaggactgtacttttacgtg

SEQ ID NO: 2136 - DNA, 1032 bp, synthetic construct
  source 1..1032: mol_type = other DNA
atggccttaccagtgaccgccttgctcctgccgctggccttgctgctccacgccgccaggccggacatccagatgacacagagccctagcagcctgtctgccagcgtgggagacagagtgaccatcacctgtagagccagccaggacatcagcaactacctgaactggtatcagcagaagcccggcaaggcccctaagctgctgatctactacaccagcatcctgcacagcggcgtgcccagcagattttctggctctggcagcggcaccgacttcaccctgacaatatctagcctccagcctgaggacttcgccacctactattgccagcagggcaacaccctgccttggacctttggacagggcaccaaggtggaaatcaagagaacgcgtggaatgaggactgaggatcttcccaaagctgtcgtctttctcgaaccccaatggtatcgggtgctcgaaaaagactctgtgacactgaaatgccaaggggcctactctcccgaggacaactccacacagtggtttcataatgagtccctcatcagctctcaggccagctcttatttcattgatgccgctacagtggacgactccggcgagtatcggtgtcagaccaatctgtctacactgtctgaccccgtgcagcttgaggtccacattggatggttgctcttgcaagccccacgctgggttttcaaagaggaagatccaatccatctgcggtgccacagctggaaaaacaccgctctccacaaagtcacatacctgcaaaatggcaaaggacgcaaatacttccatcacaattccgatttttacattccgaaggctaccctgaaagacagcggcagctatttctgccggggactcgtcggctccaagaatgtgtcctccgaaaccgtgaatatcacgattacccaaggactggctgtgcctacaatctctagcttctttccgcctggataccaagtctccttctgtcttgtgatggtcctcctgtttgctgtggacacaggactgtacttttacgtg

SEQ ID NO: 2137 - DNA, 1032 bp, synthetic construct
  source 1..1032: mol_type = other DNA
atggccttaccagtgaccgccttgctcctgccgctggccttgctgctccacgccgccaggccggacatccagatgacacagagccctagcagcctgtctgccagcgtgggagacagagtgaccatcacatgcaaggccagcgaccacatcaacaactggctggcctggtatcagcagaagcctggcaaggcccctaagctgctgatctacggcgctaccacactggaaacaggcgtgcccagcagattttctggcagcggctctggcaccgacttcaccctgacaatatccagcctccagcctgaggacttcgccacctactactgtcagcagagctggaacaccccttggacattcggccagggcaccaaggtggaaatcaagagaacgcgtggaatgaggactgaggatcttcccaaagctgtcgtctttctcgaaccccaatggtatcgggtgctcgaaaaagactctgtgacactgaaatgccaaggggcctactctcccgaggacaactccacacagtggtttcataatgagtccctcatcagctctcaggccagctcttatttcattgatgccgctacagtggacgactccggcgagtatcggtgtcagaccaatctgtctacactgtctgaccccgtgcagcttgaggtccacattggatggttgctcttgcaagccccacgctgggttttcaaagaggaagatccaatccatctgcggtgccacagctggaaaaacaccgctctccacaaagtcacatacctgcaaaatggcaaaggacgcaaatacttccatcacaattccgatttttacattccgaaggctaccctgaaagacagcggcagctatttctgccggggactcgtcggctccaagaatgtgtcctccgaaaccgtgaatatcacgattacccaaggactggctgtgcctacaatctctagcttctttccgcctggataccaagtctccttctgtcttgtgatggtcctcctgtttgctgtggacacaggactgtacttttacgtg

SEQ ID NO: 2138 - DNA, 1032 bp, synthetic construct
  source 1..1032: mol_type = other DNA
atggccttaccagtgaccgccttgctcctgccgctggccttgctgctccacgccgccaggccgagctacgtgctgacacagcctccatccgtgtctgtggctccaggacagaccgccagaatcacatgcggcggcaacaacatcggcagcaagagcgtgcactggtatcagcagccacctggacaggctccagtggtggtggtgtacgacgacagcgatagacctagcggcatccccgagagattcagcggcagcaattccggcaataccgccacactgaccatcagcagagtggaagctggcgacgaggccgtgtactactgccaagtgtgggacagcagcagcgatcacgtggtgtttggcggcggaacaaagctgacagtgcttacgcgtggaatgaggactgaggatcttcccaaagctgtcgtctttctcgaaccccaatggtatcgggtgctcgaaaaagactctgtgacactgaaatgccaaggggcctactctcccgaggacaactccacacagtggtttcataatgagtccctcatcagctctcaggccagctcttatttcattgatgccgctacagtggacgactccggcgagtatcggtgtcagaccaatctgtctacactgtctgaccccgtgcagcttgaggtccacattggatggttgctcttgcaagccccacgctgggttttcaaagaggaagatccaatccatctgcggtgccacagctggaaaaacaccgctctccacaaagtcacatacctgcaaaatggcaaaggacgcaaatacttccatcacaattccgatttttacattccgaaggctaccctgaaagacagcggcagctatttctgccggggactcgtcggctccaagaatgtgtcctccgaaaccgtgaatatcacgattacccaaggactggctgtgcctacaatctctagcttctttccgcctggataccaagtctccttctgtcttgtgatggtcctcctgtttgctgtggacacaggactgtacttttacgtg

SEQ ID NO: 2139 - DNA, 1032 bp, synthetic construct
  source 1..1032: mol_type = other DNA
atggccttaccagtgaccgccttgctcctgccgctggccttgctgctccacgccgccaggccggacatccagatgacacagagccctagcagcctgtctgccagcgtgggagacagagtgaccatcacctgtatggcctccgaggacatctacatccggctggcctggtatcagcagaagcctggaaaggcccctaagctgctgatctacgccgccacctctctggaaacaggcgtgccaagcagattttccggcagcggctctggcaccgatttcaccctgaccataagcagcctgcagcctgaggacttcgccacctactactgccagcagtattggagcagcccctggacctttggacagggcaccaaggtggaaatcaagagaacgcgtggaatgaggactgaggatcttcccaaagctgtcgtctttctcgaaccccaatggtatcgggtgctcgaaaaagactctgtgacactgaaatgccaaggggcctactctcccgaggacaactccacacagtggtttcataatgagtccctcatcagctctcaggccagctcttatttcattgatgccgctacagtggacgactccggcgagtatcggtgtcagaccaatctgtctacactgtctgaccccgtgcagcttgaggtccacattggatggttgctcttgcaagccccacgctgggttttcaaagaggaagatccaatccatctgcggtgccacagctggaaaaacaccgctctccacaaagtcacatacctgcaaaatggcaaaggacgcaaatacttccatcacaattccgatttttacattccgaaggctaccctgaaagacagcggcagctatttctgccggggactcgtcggctccaagaatgtgtcctccgaaaccgtgaatatcacgattacccaaggactggctgtgcctacaatctctagcttctttccgcctggataccaagtctccttctgtcttgtgatggtcctcctgtttgctgtggacacaggactgtacttttacgtg

SEQ ID NO: 2140 - DNA, 1044 bp, synthetic construct
  source 1..1044: mol_type = other DNA
atggccttaccagtgaccgccttgctcctgccgctggccttgctgctccacgccgccaggccggacatccagatgacacagagccctagcagcgtgtccgcctctgtgggagacagagtgaccatcacctgtagagccagcgagagcgtggacaactacggcatcagcttcatgaactggtatcagcagaagcccggcaaggcccctaagctgctgattagcgccgccagcaatagagccacaggcgtgccaagcagattttccggctctggcagcggcaccgatttcaccctgacaatatccagcctccagcctgaggacttcgccatctactactgccagcagagcaaagaggtgccctggacctttggacagggcaccaaggtggaaatcaagagaacgcgtggaatgaggactgaggatcttcccaaagctgtcgtctttctcgaaccccaatggtatcgggtgctcgaaaaagactctgtgacactgaaatgccaaggggcctactctcccgaggacaactccacacagtggtttcataatgagtccctcatcagctctcaggccagctcttatttcattgatgccgctacagtggacgactccggcgagtatcggtgtcagaccaatctgtctacactgtctgaccccgtgcagcttgaggtccacattggatggttgctcttgcaagccccacgctgggttttcaaagaggaagatccaatccatctgcggtgccacagctggaaaaacaccgctctccacaaagtcacatacctgcaaaatggcaaaggacgcaaatacttccatcacaattccgatttttacattccgaaggctaccctgaaagacagcggcagctatttctgccggggactcgtcggctccaagaatgtgtcctccgaaaccgtgaatatcacgattacccaaggactggctgtgcctacaatctctagcttctttccgcctggataccaagtctccttctgtcttgtgatggtcctcctgtttgctgtggacacaggactgtacttttacgtg

SEQ ID NO: 2141 - DNA, 1044 bp, synthetic construct
  source 1..1044: mol_type = other DNA
atggccttaccagtgaccgccttgctcctgccgctggccttgctgctccacgccgccaggccggacatccagctgacacagagcccttctagcctgtctgccagcgtgggcgacagagtgaccatcacatgtagagccagcaagagcgtgtccaccagcggctacagctacatgcactggtatcagcagaagcccggcaaggcccctaagctgctgatctacctggtgtccaacctggaaagcggcgtgcccagcagattttctggcagcggctctggcaccgacttcaccctgacaatatccagcctccagcctgaggacttcgccacctactactgccagcagttcagcgagctgccttggacctttggacagggcaccaaggtggaaatcaagagaacgcgtggaatgaggactgaggatcttcccaaagctgtcgtctttctcgaaccccaatggtatcgggtgctcgaaaaagactctgtgacactgaaatgccaaggggcctactctcccgaggacaactccacacagtggtttcataatgagtccctcatcagctctcaggccagctcttatttcattgatgccgctacagtggacgactccggcgagtatcggtgtcagaccaatctgtctacactgtctgaccccgtgcagcttgaggtccacattggatggttgctcttgcaagccccacgctgggttttcaaagaggaagatccaatccatctgcggtgccacagctggaaaaacaccgctctccacaaagtcacatacctgcaaaatggcaaaggacgcaaatacttccatcacaattccgatttttacattccgaaggctaccctgaaagacagcggcagctatttctgccggggactcgtcggctccaagaatgtgtcctccgaaaccgtgaatatcacgattacccaaggactggctgtgcctacaatctctagcttctttccgcctggataccaagtctccttctgtcttgtgatggtcctcctgtttgctgtggacacaggactgtacttttacgtg

SEQ ID NO: 2142 - DNA, 1035 bp, synthetic construct
  source 1..1035: mol_type = other DNA
atggccttaccagtgaccgccttgctcctgccgctggccttgctgctccacgccgccaggccggacatccagatgacacagagccctagcagcgtgtccgcctctgtgggagacagagtgaccatcacctgtcgggccagccagttcatcagcagcagctacctgagctggtatcagcagaagcctggcaaggcccctaagctgctgatctctggcagctctagcagagccacaggcgtgccaagcagattttctggcagcggctctggcaccgacttcaccctgacaatatccagcctccagcctgaggacttcgccatctactactgccagcagctgtactctagccccatgacattcggccagggcaccaaggtggaaatcaagagaacgcgtggaatgaggactgaggatcttcccaaagctgtcgtctttctcgaaccccaatggtatcgggtgctcgaaaaagactctgtgacactgaaatgccaaggggcctactctcccgaggacaactccacacagtggtttcataatgagtccctcatcagctctcaggccagctcttatttcattgatgccgctacagtggacgactccggcgagtatcggtgtcagaccaatctgtctacactgtctgaccccgtgcagcttgaggtccacattggatggttgctcttgcaagccccacgctgggttttcaaagaggaagatccaatccatctgcggtgccacagctggaaaaacaccgctctccacaaagtcacatacctgcaaaatggcaaaggacgcaaatacttccatcacaattccgatttttacattccgaaggctaccctgaaagacagcggcagctatttctgccggggactcgtcggctccaagaatgtgtcctccgaaaccgtgaatatcacgattacccaaggactggctgtgcctacaatctctagcttctttccgcctggataccaagtctccttctgtcttgtgatggtcctcctgtttgctgtggacacaggactgtacttttacgtg

SEQ ID NO: 2143 - DNA, 1077 bp, synthetic construct
  source 1..1077: mol_type = other DNA
atggccttaccagtgaccgccttgctcctgccgctggccttgctgctccacgccgccaggccgcaggtccagctcgtcgagtccggcggcggcctcgtccaggccggcgactccgtcaccctctcctgcaccgcctccggccgcaccttctcctcctacgccctcgcctggttccgccagcgccccggcaaggagcgcgagttcgtcgccggcctccgctggggcggccccaccaactacgccgactccgtcaaggaccgcttcaccatctccggcgactccgccaagcacaccatgtacctccagatgaactccctcaagcccgaggacaccgccgtctactactgcggctacaaccccggcggctgggccgtcccctcccagtacgagtacgactcctggggccagggcacccaggtcaccgtctcctccacgcgtggaatgaggactgaggatcttcccaaagctgtcgtctttctcgaaccccaatggtatcgggtgctcgaaaaagactctgtgacactgaaatgccaaggggcctactctcccgaggacaactccacacagtggtttcataatgagtccctcatcagctctcaggccagctcttatttcattgatgccgctacagtggacgactccggcgagtatcggtgtcagaccaatctgtctacactgtctgaccccgtgcagcttgaggtccacattggatggttgctcttgcaagccccacgctgggttttcaaagaggaagatccaatccatctgcggtgccacagctggaaaaacaccgctctccacaaagtcacatacctgcaaaatggcaaaggacgcaaatacttccatcacaattccgatttttacattccgaaggctaccctgaaagacagcggcagctatttctgccggggactcgtcggctccaagaatgtgtcctccgaaaccgtgaatatcacgattacccaaggactggctgtgcctacaatctctagcttctttccgcctggataccaagtctccttctgtcttgtgatggtcctcctgtttgctgtggacacaggactgtacttttacgtg

SEQ ID NO: 2144 - DNA, 1062 bp, synthetic construct
  source 1..1062: mol_type = other DNA
atggccttaccagtgaccgccttgctcctgccgctggccttgctgctccacgccgccaggccgcaggttcagctgcaagagtctggcggaggacttgctcaagctggcggaagcctgagactgtcttgtgccgcctctggcagaaccttcagcatgggctggtttagacaggcccctggcaaagagagagagttcgtcgccgccatcacatacagcggcggcagcccttactacgcctcttctgtcagaggccggttcaccatcagccgggacaacgccaagaacaccgtgtacctccagatgaacagcctgaagccagaggacaccgccgtgtactactgtgccgccaatccaacctacggcagcgactggaatgccgagaattggggccagggcacccaagtgacagtgtctagtacgcgtggaatgaggactgaggatcttcccaaagctgtcgtctttctcgaaccccaatggtatcgggtgctcgaaaaagactctgtgacactgaaatgccaaggggcctactctcccgaggacaactccacacagtggtttcataatgagtccctcatcagctctcaggccagctcttatttcattgatgccgctacagtggacgactccggcgagtatcggtgtcagaccaatctgtctacactgtctgaccccgtgcagcttgaggtccacattggatggttgctcttgcaagccccacgctgggttttcaaagaggaagatccaatccatctgcggtgccacagctggaaaaacaccgctctccacaaagtcacatacctgcaaaatggcaaaggacgcaaatacttccatcacaattccgatttttacattccgaaggctaccctgaaagacagcggcagctatttctgccggggactcgtcggctccaagaatgtgtcctccgaaaccgtgaatatcacgattacccaaggactggctgtgcctacaatctctagcttctttccgcctggataccaagtctccttctgtcttgtgatggtcctcctgtttgctgtggacacaggactgtacttttacgtg

SEQ ID NO: 2145 - DNA, 1056 bp, synthetic construct
  source 1..1056: mol_type = other DNA
atggccttaccagtgaccgccttgctcctgccgctggccttgctgctccacgccgccaggccggaagtgcagctggttgaatctggcggaggactggttcagcctggcggatctctgagactgtcttgtgccgccagcggcttcagcttcagcgacttttggatgagctgggtccgacaggcccctggcaaaggacttgaatgggtcgccacaatcagccaggccggcagcgagaaggactacgtggactctgtgaagggcagattcaccatcagccgggacaacgccaagaagtccctgtacctccagatgaacagcctgagagccgaggacaccgccgtgtactattgtgcctctggcgtgtacagcttcgactacagaggccagggcaccctggtcacagtctcttctacgcgtggaatgaggactgaggatcttcccaaagctgtcgtctttctcgaaccccaatggtatcgggtgctcgaaaaagactctgtgacactgaaatgccaaggggcctactctcccgaggacaactccacacagtggtttcataatgagtccctcatcagctctcaggccagctcttatttcattgatgccgctacagtggacgactccggcgagtatcggtgtcagaccaatctgtctacactgtctgaccccgtgcagcttgaggtccacattggatggttgctcttgcaagccccacgctgggttttcaaagaggaagatccaatccatctgcggtgccacagctggaaaaacaccgctctccacaaagtcacatacctgcaaaatggcaaaggacgcaaatacttccatcacaattccgatttttacattccgaaggctaccctgaaagacagcggcagctatttctgccggggactcgtcggctccaagaatgtgtcctccgaaaccgtgaatatcacgattacccaaggactggctgtgcctacaatctctagcttctttccgcctggataccaagtctccttctgtcttgtgatggtcctcctgtttgctgtggacacaggactgtacttttacgtg

SEQ ID NO: 2146 - DNA, 1056 bp, synthetic construct
  source 1..1056: mol_type = other DNA
atggccttaccagtgaccgccttgctcctgccgctggccttgctgctccacgccgccaggccggaagtgcagctggttgaatctggcggaggactggttcagcctggcggatctctgagactgtcttgtgccgccagcggcttcaccttcagcaactactggatgagctgggtccgacaggcccctggaaagggacaagaatgggtcgccaccatcaaccaggacggcagcgacaaggattacgtggacagcgtgaagggcagattcaccatcagccgggacaacgccaagaagtccctgtacctccagatgaacagcctgagagccgaggacaccgccgtgtactattgtgcctctggcgtgtacagcttcgactacagaggccagggcaccctggtcacagtctcttctacgcgtggaatgaggactgaggatcttcccaaagctgtcgtctttctcgaaccccaatggtatcgggtgctcgaaaaagactctgtgacactgaaatgccaaggggcctactctcccgaggacaactccacacagtggtttcataatgagtccctcatcagctctcaggccagctcttatttcattgatgccgctacagtggacgactccggcgagtatcggtgtcagaccaatctgtctacactgtctgaccccgtgcagcttgaggtccacattggatggttgctcttgcaagccccacgctgggttttcaaagaggaagatccaatccatctgcggtgccacagctggaaaaacaccgctctccacaaagtcacatacctgcaaaatggcaaaggacgcaaatacttccatcacaattccgatttttacattccgaaggctaccctgaaagacagcggcagctatttctgccggggactcgtcggctccaagaatgtgtcctccgaaaccgtgaatatcacgattacccaaggactggctgtgcctacaatctctagcttctttccgcctggataccaagtctccttctgtcttgtgatggtcctcctgtttgctgtggacacaggactgtacttttacgtg

SEQ ID NO: 2147 - DNA, 1056 bp, synthetic construct
  source 1..1056: mol_type = other DNA
atggccttaccagtgaccgccttgctcctgccgctggccttgctgctccacgccgccaggccggaagtgcagctggttgaatctggcggaggactggttcagcctggcggatctctgagactgtcttgtgccgccagcggcatcgacttcagcagatactggatgagctgggtccgacaggcccctggcaaaggacttgaatgggtcgccacaatcagccaggccggcagcgagaaggactacgtggactctgtgaagggcagattcaccatcagccgggacaacgccaagaagtccctgtacctccagatgaacagcctgagagccgaggacaccgccgtgtactattgtgcctctggcgtgtacagcttcgactacagaggccagggcaccctggtcacagtctcttctacgcgtggaatgaggactgaggatcttcccaaagctgtcgtctttctcgaaccccaatggtatcgggtgctcgaaaaagactctgtgacactgaaatgccaaggggcctactctcccgaggacaactccacacagtggtttcataatgagtccctcatcagctctcaggccagctcttatttcattgatgccgctacagtggacgactccggcgagtatcggtgtcagaccaatctgtctacactgtctgaccccgtgcagcttgaggtccacattggatggttgctcttgcaagccccacgctgggttttcaaagaggaagatccaatccatctgcggtgccacagctggaaaaacaccgctctccacaaagtcacatacctgcaaaatggcaaaggacgcaaatacttccatcacaattccgatttttacattccgaaggctaccctgaaagacagcggcagctatttctgccggggactcgtcggctccaagaatgtgtcctccgaaaccgtgaatatcacgattacccaaggactggctgtgcctacaatctctagcttctttccgcctggataccaagtctccttctgtcttgtgatggtcctcctgtttgctgtggacacaggactgtacttttacgtg

SEQ ID NO: 2148 - DNA, 1056 bp, synthetic construct
  source 1..1056: mol_type = other DNA
atggccttaccagtgaccgccttgctcctgccgctggccttgctgctccacgccgccaggccggaagtgcagctggttgaatctggcggaggactggttcagcctggcggatctctgagactgtcttgtgccgccagcggcatcgacttcagcagatactggatgagctgggtccgacaggcccctggaaagggacaagaatgggtcgccaccatcaaccaggacggcagcgacaaggattacgtggacagcgtgaagggcagattcaccatcagccgggacaacgccaagaagtccctgtacctccagatgaacagcctgagagccgaggacaccgccgtgtactattgtgcctctggcgtgtacagcttcgactacagaggccagggcaccctggtcacagtctcttctacgcgtggaatgaggactgaggatcttcccaaagctgtcgtctttctcgaaccccaatggtatcgggtgctcgaaaaagactctgtgacactgaaatgccaaggggcctactctcccgaggacaactccacacagtggtttcataatgagtccctcatcagctctcaggccagctcttatttcattgatgccgctacagtggacgactccggcgagtatcggtgtcagaccaatctgtctacactgtctgaccccgtgcagcttgaggtccacattggatggttgctcttgcaagccccacgctgggttttcaaagaggaagatccaatccatctgcggtgccacagctggaaaaacaccgctctccacaaagtcacatacctgcaaaatggcaaaggacgcaaatacttccatcacaattccgatttttacattccgaaggctaccctgaaagacagcggcagctatttctgccggggactcgtcggctccaagaatgtgtcctccgaaaccgtgaatatcacgattacccaaggactggctgtgcctacaatctctagcttctttccgcctggataccaagtctccttctgtcttgtgatggtcctcctgtttgctgtggacacaggactgtacttttacgtg

SEQ ID NO: 2149 - DNA, 1068 bp, synthetic construct
  source 1..1068: mol_type = other DNA
atggccttaccagtgaccgccttgctcctgccgctggccttgctgctccacgccgccaggccggaggtgcagctggttgaatctggcggaggactggttcagcctggcggatctctgagactgtcctgcacattttccggcggcaccttcagcagctacacaatgggctggttcagacaggcccctggcaaagaacgggaatttgtggccgaagtccgatggggcggagtgaccacatacagcaacagcctgaaggacagattcagcatcagcgaggacagcgtgaagaacgccgtgtacctccagatgaactccctgaagcctgaggacacagccgtgtactattgtgccgctgtgcggcagatgtacatgaccgtggtgcctgattattggggccagggcacactggtcacagtgtctagcacgcgtggaatgaggactgaggatcttcccaaagctgtcgtctttctcgaaccccaatggtatcgggtgctcgaaaaagactctgtgacactgaaatgccaaggggcctactctcccgaggacaactccacacagtggtttcataatgagtccctcatcagctctcaggccagctcttatttcattgatgccgctacagtggacgactccggcgagtatcggtgtcagaccaatctgtctacactgtctgaccccgtgcagcttgaggtccacattggatggttgctcttgcaagccccacgctgggttttcaaagaggaagatccaatccatctgcggtgccacagctggaaaaacaccgctctccacaaagtcacatacctgcaaaatggcaaaggacgcaaatacttccatcacaattccgatttttacattccgaaggctaccctgaaagacagcggcagctatttctgccggggactcgtcggctccaagaatgtgtcctccgaaaccgtgaatatcacgattacccaaggactggctgtgcctacaatctctagcttctttccgcctggataccaagtctccttctgtcttgtgatggtcctcctgtttgctgtggacacaggactgtacttttacgtg

SEQ ID NO: 2150 - DNA, 1062 bp, synthetic construct
  source 1..1062: mol_type = other DNA
atggccttaccagtgaccgccttgctcctgccgctggccttgctgctccacgccgccaggccggaagtgcagctggttgaatctggcggaggactggttcaggctggcggatctctgagactgtcttgtgccgccagcggcagaacctttagcatgggctggtttagacaggcccctggcaaagagagagagttcgtcgccgccatcacatactctggcggcagcccttactacgccgactctgtgaagggcagattcaccatcagccgggacaacgccaagaacaccgtgtacctccagatgaacagcctgaagcctgaggacaccgccgtgtactactgcgccgccaatccaacatacggcagcgactggaacgccgagaattggggccagggaacccaagtgacagtgtctagcacgcgtggaatgaggactgaggatcttcccaaagctgtcgtctttctcgaaccccaatggtatcgggtgctcgaaaaagactctgtgacactgaaatgccaaggggcctactctcccgaggacaactccacacagtggtttcataatgagtccctcatcagctctcaggccagctcttatttcattgatgccgctacagtggacgactccggcgagtatcggtgtcagaccaatctgtctacactgtctgaccccgtgcagcttgaggtccacattggatggttgctcttgcaagccccacgctgggttttcaaagaggaagatccaatccatctgcggtgccacagctggaaaaacaccgctctccacaaagtcacatacctgcaaaatggcaaaggacgcaaatacttccatcacaattccgatttttacattccgaaggctaccctgaaagacagcggcagctatttctgccggggactcgtcggctccaagaatgtgtcctccgaaaccgtgaatatcacgattacccaaggactggctgtgcctacaatctctagcttctttccgcctggataccaagtctccttctgtcttgtgatggtcctcctgtttgctgtggacacaggactgtacttttacgtg

SEQ ID NO: 2151 - DNA, 1062 bp, synthetic construct
  source 1..1062: mol_type = other DNA
atggccttaccagtgaccgccttgctcctgccgctggccttgctgctccacgccgccaggccgcagctccagttgcaagagagcggccctggcttggtaaaaccttccgagacccttagcctcacatgcacggttagtgggggcagcatttcctcaggtgattactattggggatggattcggcaacccccgggtaaaggattggagtggattggtcatatttattatagtggagcgacgtactacaacccaagtctcaaatccagggttacaatatccgtcgatacgagcaggaaccaattcagcttgaaactttctagtgtcaccgcagcagacacagccgtctattactgtacgcgggatgactccagtaattggcggtcccgagggcaagggacactggtcacggtctcctcaacgcgtggaatgaggactgaggatcttcccaaagctgtcgtctttctcgaaccccaatggtatcgggtgctcgaaaaagactctgtgacactgaaatgccaaggggcctactctcccgaggacaactccacacagtggtttcataatgagtccctcatcagctctcaggccagctcttatttcattgatgccgctacagtggacgactccggcgagtatcggtgtcagaccaatctgtctacactgtctgaccccgtgcagcttgaggtccacattggatggttgctcttgcaagccccacgctgggttttcaaagaggaagatccaatccatctgcggtgccacagctggaaaaacaccgctctccacaaagtcacatacctgcaaaatggcaaaggacgcaaatacttccatcacaattccgatttttacattccgaaggctaccctgaaagacagcggcagctatttctgccggggactcgtcggctccaagaatgtgtcctccgaaaccgtgaatatcacgattacccaaggactggctgtgcctacaatctctagcttctttccgcctggataccaagtctccttctgtcttgtgatggtcctcctgtttgctgtggacacaggactgtacttttacgtg

SEQ ID NO: 2152 - DNA, 1062 bp, synthetic construct
  source 1..1062: mol_type = other DNA
atggccttaccagtgaccgccttgctcctgccgctggccttgctgctccacgccgccaggccgcagctccagctgcaagagtctggacctggcctggtcaagcctagcgagacactgagcctgacctgtaccgtgtccggcgatagcatcagcagcggcgattactactggggctggatcagacagcctcctggcaaaggactggaatggatcggccacatctactacagcggcgtgacctactacaaccccagcctgaagtccagagtgaccatcagcgtggacaccagccggaaccagttctccctgaagctgtctagcgtgacagccgccgataccgccgtgtactactgcaccagagaggacagcagcaactggcggagtagaggccagggaacactggtcacagttagctctacgcgtggaatgaggactgaggatcttcccaaagctgtcgtctttctcgaaccccaatggtatcgggtgctcgaaaaagactctgtgacactgaaatgccaaggggcctactctcccgaggacaactccacacagtggtttcataatgagtccctcatcagctctcaggccagctcttatttcattgatgccgctacagtggacgactccggcgagtatcggtgtcagaccaatctgtctacactgtctgaccccgtgcagcttgaggtccacattggatggttgctcttgcaagccccacgctgggttttcaaagaggaagatccaatccatctgcggtgccacagctggaaaaacaccgctctccacaaagtcacatacctgcaaaatggcaaaggacgcaaatacttccatcacaattccgatttttacattccgaaggctaccctgaaagacagcggcagctatttctgccggggactcgtcggctccaagaatgtgtcctccgaaaccgtgaatatcacgattacccaaggactggctgtgcctacaatctctagcttctttccgcctggataccaagtctccttctgtcttgtgatggtcctcctgtttgctgtggacacaggactgtacttttacgtg

SEQ ID NO: 2153 - DNA, 1062 bp, synthetic construct
  source 1..1062: mol_type = other DNA
atggccttaccagtgaccgccttgctcctgccgctggccttgctgctccacgccgccaggccgcaactgcaactgcaagagtctggccctggcctggtcaagccttctgaaaccctgagcctgacctgtaccgtgtccggcggctctatcagcagcggcgattactactggggctggatcagacagcctccaggcaagggactcgaatggatcggcagcatcagctacagcggctccacctactacaacccaagcctgaagtccagagtgaccatcagcgtggacaccagcagaaaccagttctccctgaagctgagcagcgtgacagccgccgatacagccgtgtattattgcaccagagaggacagcagcaactggcggagtagaggacagggcacactggtcacagtgtcctctacgcgtggaatgaggactgaggatcttcccaaagctgtcgtctttctcgaaccccaatggtatcgggtgctcgaaaaagactctgtgacactgaaatgccaaggggcctactctcccgaggacaactccacacagtggtttcataatgagtccctcatcagctctcaggccagctcttatttcattgatgccgctacagtggacgactccggcgagtatcggtgtcagaccaatctgtctacactgtctgaccccgtgcagcttgaggtccacattggatggttgctcttgcaagccccacgctgggttttcaaagaggaagatccaatccatctgcggtgccacagctggaaaaacaccgctctccacaaagtcacatacctgcaaaatggcaaaggacgcaaatacttccatcacaattccgatttttacattccgaaggctaccctgaaagacagcggcagctatttctgccggggactcgtcggctccaagaatgtgtcctccgaaaccgtgaatatcacgattacccaaggactggctgtgcctacaatctctagcttctttccgcctggataccaagtctccttctgtcttgtgatggtcctcctgtttgctgtggacacaggactgtacttttacgtg

SEQ ID NO: 2154 - DNA, 1080 bp, synthetic construct
  source 1..1080: mol_type = other DNA
atggccttaccagtgaccgccttgctcctgccgctggccttgctgctccacgccgccaggccgcagctgcaactgcaagagtctggccccggactggtcaagccttctgaaacactggccctgacctgcaatgtgtccggcggctctatcagcagcagctcctattactggggctggatcagacagcctccaggcaagagactggaatggatcggcagcatctactacagcggcagcacatacttcaaccccagcctgaagtccagagtgaccatcagcgtggacacctccaagaaccagttctccctgaagctgagcagcgtgacagccgccgatacagccgtgtattactgtgctggcggcgactactatggccccgttggacaatggcccagcgattacagaggacagggaacccttgtgaccgtgtcctctacgcgtggaatgaggactgaggatcttcccaaagctgtcgtctttctcgaaccccaatggtatcgggtgctcgaaaaagactctgtgacactgaaatgccaaggggcctactctcccgaggacaactccacacagtggtttcataatgagtccctcatcagctctcaggccagctcttatttcattgatgccgctacagtggacgactccggcgagtatcggtgtcagaccaatctgtctacactgtctgaccccgtgcagcttgaggtccacattggatggttgctcttgcaagccccacgctgggttttcaaagaggaagatccaatccatctgcggtgccacagctggaaaaacaccgctctccacaaagtcacatacctgcaaaatggcaaaggacgcaaatacttccatcacaattccgatttttacattccgaaggctaccctgaaagacagcggcagctatttctgccggggactcgtcggctccaagaatgtgtcctccgaaaccgtgaatatcacgattacccaaggactggctgtgcctacaatctctagcttctttccgcctggataccaagtctccttctgtcttgtgatggtcctcctgtttgctgtggacacaggactgtacttttacgtg

SEQ ID NO: 2155 - DNA, 1098 bp, synthetic construct
  source 1..1098: mol_type = other DNA
atggccttaccagtgaccgccttgctcctgccgctggccttgctgctccacgccgccaggccggaagttcagctgcttgagtctggcggaggactggttcaacctggcggaagcctgagactgtcttgtgccgccagcggcttcatcttcagcagctacgccatgagctgggtccgacaggctcctggaaagggccaagaatgggtttccggcgttagcggcacaggcgtgaacacctactacgccgatagcgtgaagggcagattcaccatcagccgggacaacagcaagaacaccctgtacctccagatgaacagcctgagagccgaggacaccgccgtgtactattgtgcctctggcaaaggctgggacagcggctcttggtacgaggactatagaggccagggcaccctggtcacagtttcttcaacgcgtcctcgactgtgccttctaacgcgtggaatgaggactgaggatcttcccaaagctgtcgtctttctcgaaccccaatggtatcgggtgctcgaaaaagactctgtgacactgaaatgccaaggggcctactctcccgaggacaactccacacagtggtttcataatgagtccctcatcagctctcaggccagctcttatttcattgatgccgctacagtggacgactccggcgagtatcggtgtcagaccaatctgtctacactgtctgaccccgtgcagcttgaggtccacattggatggttgctcttgcaagccccacgctgggttttcaaagaggaagatccaatccatctgcggtgccacagctggaaaaacaccgctctccacaaagtcacatacctgcaaaatggcaaaggacgcaaatacttccatcacaattccgatttttacattccgaaggctaccctgaaagacagcggcagctatttctgccggggactcgtcggctccaagaatgtgtcctccgaaaccgtgaatatcacgattacccaaggactggctgtgcctacaatctctagcttctttccgcctggataccaagtctccttctgtcttgtgatggtcctcctgtttgctgtggacacaggactgtacttttacgtg

SEQ ID NO: 2156 - DNA, 1080 bp, synthetic construct
  source 1..1080: mol_type = other DNA
atggccttaccagtgaccgccttgctcctgccgctggccttgctgctccacgccgccaggccgcagctccagctgcaagagtctggacctggcctggtcaagcctagcgagacactgagcctgacctgtacagttagcggcggctctgtgtccagcagcagctattactggggctggatcagacagcctcctggcaagagactggaactgatcggcagcatctactacggcggctccacctacttcaaccccagcctgaaaagcagagtgaccatcagcgtggacaccagcaagaaccagttcagcctgaagctgagcagcgtgacagccgccgatacagccgtgtactattgtgccggcggagacacatacggccctgttggacaatggcccagcgactatagaggccagggcacactggtcacagtgtctagcacgcgtggaatgaggactgaggatcttcccaaagctgtcgtctttctcgaaccccaatggtatcgggtgctcgaaaaagactctgtgacactgaaatgccaaggggcctactctcccgaggacaactccacacagtggtttcataatgagtccctcatcagctctcaggccagctcttatttcattgatgccgctacagtggacgactccggcgagtatcggtgtcagaccaatctgtctacactgtctgaccccgtgcagcttgaggtccacattggatggttgctcttgcaagccccacgctgggttttcaaagaggaagatccaatccatctgcggtgccacagctggaaaaacaccgctctccacaaagtcacatacctgcaaaatggcaaaggacgcaaatacttccatcacaattccgatttttacattccgaaggctaccctgaaagacagcggcagctatttctgccggggactcgtcggctccaagaatgtgtcctccgaaaccgtgaatatcacgattacccaaggactggctgtgcctacaatctctagcttctttccgcctggataccaagtctccttctgtcttgtgatggtcctcctgtttgctgtggacacaggactgtacttttacgtg

SEQ ID NO: 2157 - DNA, 1074 bp, synthetic construct
  source 1..1074: mol_type = other DNA
atggccttaccagtgaccgccttgctcctgccgctggccttgctgctccacgccgccaggccggaagttcagctgcttgaaagcggtggcggcctggttcaacctggcggatctctgagactgagctgtgccgccagcggcttcatcttctccatctacgccatgtcctgggtccgacaggcccctggaaaaggactggaatgggtgtccggcatctctggcagcggcgtgaacacctactacgccgattctgtgaagggccgcttcatcatcagccgggacaacagcagaaacaccgtgtacctccagatgaacagcctgagagccgatgacaccgccgtgtaccactgcgccaatggcaaaggctgggacggcaacacttggtacgaggattacagaggacagggaaccctcgtgaccgtgtctagtacgcgtggaatgaggactgaggatcttcccaaagctgtcgtctttctcgaaccccaatggtatcgggtgctcgaaaaagactctgtgacactgaaatgccaaggggcctactctcccgaggacaactccacacagtggtttcataatgagtccctcatcagctctcaggccagctcttatttcattgatgccgctacagtggacgactccggcgagtatcggtgtcagaccaatctgtctacactgtctgaccccgtgcagcttgaggtccacattggatggttgctcttgcaagccccacgctgggttttcaaagaggaagatccaatccatctgcggtgccacagctggaaaaacaccgctctccacaaagtcacatacctgcaaaatggcaaaggacgcaaatacttccatcacaattccgatttttacattccgaaggctaccctgaaagacagcggcagctatttctgccggggactcgtcggctccaagaatgtgtcctccgaaaccgtgaatatcacgattacccaaggactggctgtgcctacaatctctagcttctttccgcctggataccaagtctccttctgtcttgtgatggtcctcctgtttgctgtggacacaggactgtacttttacgtg

SEQ ID NO: 2158 - DNA, 1059 bp, synthetic construct
  source 1..1059: mol_type = other DNA
atggccttaccagtgaccgccttgctcctgccgctggccttgctgctccacgccgccaggccggaagtgcaggttttggagtctggcggaggactggttcagcctggcggatctctgagactgtcttgtgccgccagcggcttcaccttcagcaactttgccatgagctgggtccgacaggcccctggcaaaggacttgaatgggtgtccacaatcagcggcagcgccggcacaacagattacgccgattctgtgaagggcagattcaccatcagccgggacaacagcaagaaaaccctgtacctccagatgaacagcctgcgcgtggaagataccgccgtgtactactgtgccgatggcagaggccccttcttcgattatcgcggccagggcacactggtcaccgtttcttctacgcgtggaatgaggactgaggatcttcccaaagctgtcgtctttctcgaaccccaatggtatcgggtgctcgaaaaagactctgtgacactgaaatgccaaggggcctactctcccgaggacaactccacacagtggtttcataatgagtccctcatcagctctcaggccagctcttatttcattgatgccgctacagtggacgactccggcgagtatcggtgtcagaccaatctgtctacactgtctgaccccgtgcagcttgaggtccacattggatggttgctcttgcaagccccacgctgggttttcaaagaggaagatccaatccatctgcggtgccacagctggaaaaacaccgctctccacaaagtcacatacctgcaaaatggcaaaggacgcaaatacttccatcacaattccgatttttacattccgaaggctaccctgaaagacagcggcagctatttctgccggggactcgtcggctccaagaatgtgtcctccgaaaccgtgaatatcacgattacccaaggactggctgtgcctacaatctctagcttctttccgcctggataccaagtctccttctgtcttgtgatggtcctcctgtttgctgtggacacaggactgtacttttacgtg

SEQ ID NO: 2159 - DNA, 1065 bp, synthetic construct
  source 1..1065: mol_type = other DNA
atggccttaccagtgaccgccttgctcctgccgctggccttgctgctccacgccgccaggccggaggtgcagctggttgaatctggcggaggactggttcagcctggcggatctctgagactgtcttgtgccgccagcggcttcaacatcaaggatacctgtatcggctgggttcgcagagcccctggcaaagaggaagaactggtcgccaaaatctgcaagtacagcggccacaccagatacgccgacagcgtgaagggcagattcaccatcagcgccgacaccagcaagaacaccgcctacctccagatgaacagcctgagagccgaggacaccgccgtgtactattgtgccgctgtgtccgtcagagatgggcactacaattactggggccagggcaccaccgtgaccgtttcttcaacgcgtggaatgaggactgaggatcttcccaaagctgtcgtctttctcgaaccccaatggtatcgggtgctcgaaaaagactctgtgacactgaaatgccaaggggcctactctcccgaggacaactccacacagtggtttcataatgagtccctcatcagctctcaggccagctcttatttcattgatgccgctacagtggacgactccggcgagtatcggtgtcagaccaatctgtctacactgtctgaccccgtgcagcttgaggtccacattggatggttgctcttgcaagccccacgctgggttttcaaagaggaagatccaatccatctgcggtgccacagctggaaaaacaccgctctccacaaagtcacatacctgcaaaatggcaaaggacgcaaatacttccatcacaattccgatttttacattccgaaggctaccctgaaagacagcggcagctatttctgccggggactcgtcggctccaagaatgtgtcctccgaaaccgtgaatatcacgattacccaaggactggctgtgcctacaatctctagcttctttccgcctggataccaagtctccttctgtcttgtgatggtcctcctgtttgctgtggacacaggactgtacttttacgtg

SEQ ID NO: 2160 - DNA, 1065 bp, synthetic construct
  source 1..1065: mol_type = other DNA
atggccttaccagtgaccgccttgctcctgccgctggccttgctgctccacgccgccaggccggaagtgcaactggtggaaagcggaggcggacttgttcaaccaggcggaagcctgagactgagctgtgccgcttccggctttaatatcaaagacacatgcatcggatgggttcgccgcgctccagggaaagaagaggaactggttgccgacatctgtccctacaagggcagcacaagatatgccgactccgtgaaaggccggtttaccatctctgccgacacctctaagaatacggcctatctgcaaatgaactctctgcgggccgaagatacagccgtgtattactgcgccatcgtgtctgccagagatggctactataactattggggacagggaaccacagtcacagtgtcctctacgcgtggaatgaggactgaggatcttcccaaagctgtcgtctttctcgaaccccaatggtatcgggtgctcgaaaaagactctgtgacactgaaatgccaaggggcctactctcccgaggacaactccacacagtggtttcataatgagtccctcatcagctctcaggccagctcttatttcattgatgccgctacagtggacgactccggcgagtatcggtgtcagaccaatctgtctacactgtctgaccccgtgcagcttgaggtccacattggatggttgctcttgcaagccccacgctgggttttcaaagaggaagatccaatccatctgcggtgccacagctggaaaaacaccgctctccacaaagtcacatacctgcaaaatggcaaaggacgcaaatacttccatcacaattccgatttttacattccgaaggctaccctgaaagacagcggcagctatttctgccggggactcgtcggctccaagaatgtgtcctccgaaaccgtgaatatcacgattacccaaggactggctgtgcctacaatctctagcttctttccgcctggataccaagtctccttctgtcttgtgatggtcctcctgtttgctgtggacacaggactgtacttttacgtg

SEQ ID NO: 2161 - DNA, 1065 bp, synthetic construct
  source 1..1065: mol_type = other DNA
atggccttaccagtgaccgccttgctcctgccgctggccttgctgctccacgccgccaggccggaagtgcagctgcttgagtctggcggaggactggttcaacctggcggaagcctgagactgtcttgtgccgccagcggcttcacctttagcagctacgccatgagctgggtccgacaggctcctggcaaaggactggaatgggtgtccgccatcacaggctctggcggcagcacatattacgccgactctgtgaagggcagattcaccatcagccgggacaacagcaagaacaccctgtacctccagatgaacagcctgagagccgaggacaccgccgtgtactactgtgccaaggatgaggatggcggctctctgctgggacacagaggacagggaacactggtcaccgtgtctagcacgcgtggaatgaggactgaggatcttcccaaagctgtcgtctttctcgaaccccaatggtatcgggtgctcgaaaaagactctgtgacactgaaatgccaaggggcctactctcccgaggacaactccacacagtggtttcataatgagtccctcatcagctctcaggccagctcttatttcattgatgccgctacagtggacgactccggcgagtatcggtgtcagaccaatctgtctacactgtctgaccccgtgcagcttgaggtccacattggatggttgctcttgcaagccccacgctgggttttcaaagaggaagatccaatccatctgcggtgccacagctggaaaaacaccgctctccacaaagtcacatacctgcaaaatggcaaaggacgcaaatacttccatcacaattccgatttttacattccgaaggctaccctgaaagacagcggcagctatttctgccggggactcgtcggctccaagaatgtgtcctccgaaaccgtgaatatcacgattacccaaggactggctgtgcctacaatctctagcttctttccgcctggataccaagtctccttctgtcttgtgatggtcctcctgtttgctgtggacacaggactgtacttttacgtg

SEQ ID NO: 2162 - DNA, 1065 bp, synthetic construct
  source 1..1065: mol_type = other DNA
atggccttaccagtgaccgccttgctcctgccgctggccttgctgctccacgccgccaggccggaagtgcagctgcttgagtctggcggcggactgattcaacctggcggaagcctgagactgagctgtgccgcttccggcttcacctttagcagccacgccatgacctgggtccgacaggctcctggaaaaggactggaatgggtgtccgccatcagcagcggcggcagctacacatattacgccgacagcgtgaagggcagattcaccatctccagagacaacagcaagaacaccctgtacctccagatgaacagcctgagagccgaggacaccgccgtgtactactgtgccaaggatgaggatggcggctctctgctgggacacagaggacagggaacactggtcaccgtgtctagcacgcgtggaatgaggactgaggatcttcccaaagctgtcgtctttctcgaaccccaatggtatcgggtgctcgaaaaagactctgtgacactgaaatgccaaggggcctactctcccgaggacaactccacacagtggtttcataatgagtccctcatcagctctcaggccagctcttatttcattgatgccgctacagtggacgactccggcgagtatcggtgtcagaccaatctgtctacactgtctgaccccgtgcagcttgaggtccacattggatggttgctcttgcaagccccacgctgggttttcaaagaggaagatccaatccatctgcggtgccacagctggaaaaacaccgctctccacaaagtcacatacctgcaaaatggcaaaggacgcaaatacttccatcacaattccgatttttacattccgaaggctaccctgaaagacagcggcagctatttctgccggggactcgtcggctccaagaatgtgtcctccgaaaccgtgaatatcacgattacccaaggactggctgtgcctacaatctctagcttctttccgcctggataccaagtctccttctgtcttgtgatggtcctcctgtttgctgtggacacaggactgtacttttacgtg

SEQ ID NO: 2163 - DNA, 1065 bp, synthetic construct
  source 1..1065: mol_type = other DNA
atggccttaccagtgaccgccttgctcctgccgctggccttgctgctccacgccgccaggccggaagtgcagctggttgaatctggcggaggactggttcagcctggcggatctctgagactgtcttgtgccgccagcggcttcagcttcagcgacttttggatgagctgggtccgacaggcccctggcaaaggacttgaatgggtgtccgccatcagcggcagcggcgattatacacactacgccgacagcgtgaagggcagattcaccatcagccgggacaacagcaagaacaccgtgtacctccagatgaacagcctgagagccgaggacagcgccgtgtactactgtgccaaggatgaggatggcggctctctgctgggacacagaggacagggaacactggtcaccgtgtctagcacgcgtggaatgaggactgaggatcttcccaaagctgtcgtctttctcgaaccccaatggtatcgggtgctcgaaaaagactctgtgacactgaaatgccaaggggcctactctcccgaggacaactccacacagtggtttcataatgagtccctcatcagctctcaggccagctcttatttcattgatgccgctacagtggacgactccggcgagtatcggtgtcagaccaatctgtctacactgtctgaccccgtgcagcttgaggtccacattggatggttgctcttgcaagccccacgctgggttttcaaagaggaagatccaatccatctgcggtgccacagctggaaaaacaccgctctccacaaagtcacatacctgcaaaatggcaaaggacgcaaatacttccatcacaattccgatttttacattccgaaggctaccctgaaagacagcggcagctatttctgccggggactcgtcggctccaagaatgtgtcctccgaaaccgtgaatatcacgattacccaaggactggctgtgcctacaatctctagcttctttccgcctggataccaagtctccttctgtcttgtgatggtcctcctgtttgctgtggacacaggactgtacttttacgtg

SEQ ID NO: 2164 - DNA, 1071 bp, synthetic construct
  source 1..1071: mol_type = other DNA
atggccttaccagtgaccgccttgctcctgccgctggccttgctgctccacgccgccaggccggaagtgcagctgcttgagtctggcggaggactggttcaacctggcggaagcctgagactgtcttgtgccgcctctggcttcgccttcagcatctacgatatgagctgggtccgacaggcccctggcaaaggacttgaatgggtgtccagcatcagcggcagcggcgactacatctactacgccgatagcgtgaagggcagattcaccatcagccgggacatcagcaagaacaccctgtacctccagatgaacagcctgagagccgaggacaccgccgtgtactactgtgccaaagaaggcaccggcgctaacagcagcctggccgattatagaggccagggcacactggtcaccgtgtctagtacgcgtggaatgaggactgaggatcttcccaaagctgtcgtctttctcgaaccccaatggtatcgggtgctcgaaaaagactctgtgacactgaaatgccaaggggcctactctcccgaggacaactccacacagtggtttcataatgagtccctcatcagctctcaggccagctcttatttcattgatgccgctacagtggacgactccggcgagtatcggtgtcagaccaatctgtctacactgtctgaccccgtgcagcttgaggtccacattggatggttgctcttgcaagccccacgctgggttttcaaagaggaagatccaatccatctgcggtgccacagctggaaaaacaccgctctccacaaagtcacatacctgcaaaatggcaaaggacgcaaatacttccatcacaattccgatttttacattccgaaggctaccctgaaagacagcggcagctatttctgccggggactcgtcggctccaagaatgtgtcctccgaaaccgtgaatatcacgattacccaaggactggctgtgcctacaatctctagcttctttccgcctggataccaagtctccttctgtcttgtgatggtcctcctgtttgctgtggacacaggactgtacttttacgtg

SEQ ID NO: 2165 - DNA, 1071 bp, synthetic construct
  source 1..1071: mol_type = other DNA
atggccttaccagtgaccgccttgctcctgccgctggccttgctgctccacgccgccaggccggaggttcagctgcttgagtctggcggaggactggttcaacctggcggaagcctgagactgtcttgtgccgccagcggcttcacctttagcagctacgccatgagctgggtccgacaggctcctggcaaaggactggaatgggtgtccagcatcagcggcagcggcgactacatctactacgccgatagcgtgaagggcagattcaccatcagccgggacatcagcaagaacaccctgtacctccagatgaacagcctgagagccgaggacaccgccgtgtactactgtgccaaagaaggcaccggcgctaacagcagcctggccgattatagaggccagggcacactggtcaccgtgtctagtacgcgtggaatgaggactgaggatcttcccaaagctgtcgtctttctcgaaccccaatggtatcgggtgctcgaaaaagactctgtgacactgaaatgccaaggggcctactctcccgaggacaactccacacagtggtttcataatgagtccctcatcagctctcaggccagctcttatttcattgatgccgctacagtggacgactccggcgagtatcggtgtcagaccaatctgtctacactgtctgaccccgtgcagcttgaggtccacattggatggttgctcttgcaagccccacgctgggttttcaaagaggaagatccaatccatctgcggtgccacagctggaaaaacaccgctctccacaaagtcacatacctgcaaaatggcaaaggacgcaaatacttccatcacaattccgatttttacattccgaaggctaccctgaaagacagcggcagctatttctgccggggactcgtcggctccaagaatgtgtcctccgaaaccgtgaatatcacgattacccaaggactggctgtgcctacaatctctagcttctttccgcctggataccaagtctccttctgtcttgtgatggtcctcctgtttgctgtggacacaggactgtacttttacgtg

SEQ ID NO: 2166 - DNA, 1062 bp, synthetic construct
  source 1..1062: mol_type = other DNA
atggccttaccagtgaccgccttgctcctgccgctggccttgctgctccacgccgccaggccgcaggtgcagctggttgaatctggcggaggactggttcagcctggcggatctctgagactgtcttgtgccgccagcggcttcaccttcaccaatcacgccatgagctgggtccgacaggcccctggaaaaggactggaactggtgtctagcatcagcggcaacggcagaaccacctactacgccgatagcgtgaagggcagattcaccatcagccgggacatcagcaagaacaccctggacctccagatgaacagcctgagagccgaggataccgccgtgtactactgtgccaaggatggcggagagacactggtggatagcagaggccagggcacactggtcacagtgtcatctacgcgtggaatgaggactgaggatcttcccaaagctgtcgtctttctcgaaccccaatggtatcgggtgctcgaaaaagactctgtgacactgaaatgccaaggggcctactctcccgaggacaactccacacagtggtttcataatgagtccctcatcagctctcaggccagctcttatttcattgatgccgctacagtggacgactccggcgagtatcggtgtcagaccaatctgtctacactgtctgaccccgtgcagcttgaggtccacattggatggttgctcttgcaagccccacgctgggttttcaaagaggaagatccaatccatctgcggtgccacagctggaaaaacaccgctctccacaaagtcacatacctgcaaaatggcaaaggacgcaaatacttccatcacaattccgatttttacattccgaaggctaccctgaaagacagcggcagctatttctgccggggactcgtcggctccaagaatgtgtcctccgaaaccgtgaatatcacgattacccaaggactggctgtgcctacaatctctagcttctttccgcctggataccaagtctccttctgtcttgtgatggtcctcctgtttgctgtggacacaggactgtacttttacgtg

SEQ ID NO: 2167 - DNA, 1065 bp, synthetic construct
  source 1..1065: mol_type = other DNA
atggccttaccagtgaccgccttgctcctgccgctggccttgctgctccacgccgccaggccggaagtgcagctgcttgaaagtggcggcggactgattcagcctggcggatctctgagactgagctgtgccgccagcggcttcaccttttctagccacgccatgacctgggtccgacaggcacctggaaaagggcttgaatgggtgtccgccatcagcggctctggcgattacacacactacgccgacagcgtgaagggcagattcaccatcagcagagacaacagcaagaacaccgtgtacctccagatgaacagcctgagagccgaggacagcgccgtgtattattgcgccaaggatgaggatggcggcagcctgcttggacacagaggacaaggcaccctggtcaccgtttcttccacgcgtggaatgaggactgaggatcttcccaaagctgtcgtctttctcgaaccccaatggtatcgggtgctcgaaaaagactctgtgacactgaaatgccaaggggcctactctcccgaggacaactccacacagtggtttcataatgagtccctcatcagctctcaggccagctcttatttcattgatgccgctacagtggacgactccggcgagtatcggtgtcagaccaatctgtctacactgtctgaccccgtgcagcttgaggtccacattggatggttgctcttgcaagccccacgctgggttttcaaagaggaagatccaatccatctgcggtgccacagctggaaaaacaccgctctccacaaagtcacatacctgcaaaatggcaaaggacgcaaatacttccatcacaattccgatttttacattccgaaggctaccctgaaagacagcggcagctatttctgccggggactcgtcggctccaagaatgtgtcctccgaaaccgtgaatatcacgattacccaaggactggctgtgcctacaatctctagcttctttccgcctggataccaagtctccttctgtcttgtgatggtcctcctgtttgctgtggacacaggactgtacttttacgtg

SEQ ID NO: 2168 - DNA, 1068 bp, synthetic construct
  source 1..1068: mol_type = other DNA
atggccttaccagtgaccgccttgctcctgccgctggccttgctgctccacgccgccaggccgcaggttcagctgcaagagtctggcggaggactggttcaggctggcgatagcctgagactgtcttgtgccgcttctggcagagccgtgtccagcctgtttatgggctggtttcggagagcccctggcaaagagagagaactggttgccgccatcagccggtacagcctgtacacctactacgccgacagcgtgaagggcagattcaccatcagcgccgacaacgccaagaacgccgtgtacctccagatgaacagcctgaagcctgaggacacagccgtgtactactgcgccagcaaacttgagtacaccagcaacgactacgacagctggggccagggaacccaagtgacagtctcttctacgcgtggaatgaggactgaggatcttcccaaagctgtcgtctttctcgaaccccaatggtatcgggtgctcgaaaaagactctgtgacactgaaatgccaaggggcctactctcccgaggacaactccacacagtggtttcataatgagtccctcatcagctctcaggccagctcttatttcattgatgccgctacagtggacgactccggcgagtatcggtgtcagaccaatctgtctacactgtctgaccccgtgcagcttgaggtccacattggatggttgctcttgcaagccccacgctgggttttcaaagaggaagatccaatccatctgcggtgccacagctggaaaaacaccgctctccacaaagtcacatacctgcaaaatggcaaaggacgcaaatacttccatcacaattccgatttttacattccgaaggctaccctgaaagacagcggcagctatttctgccggggactcgtcggctccaagaatgtgtcctccgaaaccgtgaatatcacgattacccaaggactggctgtgcctacaatctctagcttctttccgcctggataccaagtctccttctgtcttgtgatggtcctcctgtttgctgtggacacaggactgtacttttacgtg

SEQ ID NO: 2169 - DNA, 1068 bp, synthetic construct
  source 1..1068: mol_type = other DNA
atggccttaccagtgaccgccttgctcctgccgctggccttgctgctccacgccgccaggccggaagttcagctgcaagagtctggcggaggactggttcaacctggcggaagcctgagactgtcttgtgccgcctctggcagaaccttcagcagcctgttcatgggctggttcagacaggcccctggcaaagagagagaactggtcgccgccatcagccggtacagcctgtacacctactacgccgacagcgtgaagggcagattcaccatcagcgccgacaacgccaagaacgccgtgtacctccagatgaacagcctgaagccagaggacacagccgtgtactactgcgccagcaaacttgagtacaccagcaacgactacgacagctggggccagggaacccaagtgacagtctcttctacgcgtggaatgaggactgaggatcttcccaaagctgtcgtctttctcgaaccccaatggtatcgggtgctcgaaaaagactctgtgacactgaaatgccaaggggcctactctcccgaggacaactccacacagtggtttcataatgagtccctcatcagctctcaggccagctcttatttcattgatgccgctacagtggacgactccggcgagtatcggtgtcagaccaatctgtctacactgtctgaccccgtgcagcttgaggtccacattggatggttgctcttgcaagccccacgctgggttttcaaagaggaagatccaatccatctgcggtgccacagctggaaaaacaccgctctccacaaagtcacatacctgcaaaatggcaaaggacgcaaatacttccatcacaattccgatttttacattccgaaggctaccctgaaagacagcggcagctatttctgccggggactcgtcggctccaagaatgtgtcctccgaaaccgtgaatatcacgattacccaaggactggctgtgcctacaatctctagcttctttccgcctggataccaagtctccttctgtcttgtgatggtcctcctgtttgctgtggacacaggactgtacttttacgtg

SEQ ID NO: 2170 - DNA, 1068 bp, synthetic construct
  source 1..1068: mol_type = other DNA
atggccttaccagtgaccgccttgctcctgccgctggccttgctgctccacgccgccaggccggaagttcagctgcaagagtctggcggaggactggttcaacctggcggaagcctgagactgtcttgtgccgcctctggcagaaccttcagcagcctgtttatgggctgggtccgacaggcccctggcaaaggactggaactggtgtctgccatcagccggtacagcctgtacacctactacgccgacagcgtgaagggcagattcaccatcagcagagacaacgccaagaacaccctgtacctccagatgaacagcctgcggcctgaggataccgccgtgtactactgcgccagcaaacttgagtacaccagcaacgactacgacagctggggccagggaacactggtcacagtctcttctacgcgtggaatgaggactgaggatcttcccaaagctgtcgtctttctcgaaccccaatggtatcgggtgctcgaaaaagactctgtgacactgaaatgccaaggggcctactctcccgaggacaactccacacagtggtttcataatgagtccctcatcagctctcaggccagctcttatttcattgatgccgctacagtggacgactccggcgagtatcggtgtcagaccaatctgtctacactgtctgaccccgtgcagcttgaggtccacattggatggttgctcttgcaagccccacgctgggttttcaaagaggaagatccaatccatctgcggtgccacagctggaaaaacaccgctctccacaaagtcacatacctgcaaaatggcaaaggacgcaaatacttccatcacaattccgatttttacattccgaaggctaccctgaaagacagcggcagctatttctgccggggactcgtcggctccaagaatgtgtcctccgaaaccgtgaatatcacgattacccaaggactggctgtgcctacaatctctagcttctttccgcctggataccaagtctccttctgtcttgtgatggtcctcctgtttgctgtggacacaggactgtacttttacgtg

SEQ ID NO: 2171 - DNA, 1092 bp, synthetic construct
  source 1..1092: mol_type = other DNA
atggccttaccagtgaccgccttgctcctgccgctggccttgctgctccacgccgccaggccggaagtgcagctggttgaatctggcggaggactggttcagcctggcggatctctgagactgagctgtgaagccagcggcttcgccagcgacgattacatcatcggctggttcagacaggcccctggcaaagagagagagggcgtcagctgcatcagctctaagtacgccaacaccgtgtacaccgacagcgtgaagggcagattcagactgagcagaggcaccgccaagaataccgtgtacctccagatgagcgccctgaagcctgaggataccgccgtgtactactgcgctatggacagccgcagagtgacatgccctgagatcagcaccatgcaccggaacttcgattcttggggccagggcacactggtcacagtgtcatctacgcgtggaatgaggactgaggatcttcccaaagctgtcgtctttctcgaaccccaatggtatcgggtgctcgaaaaagactctgtgacactgaaatgccaaggggcctactctcccgaggacaactccacacagtggtttcataatgagtccctcatcagctctcaggccagctcttatttcattgatgccgctacagtggacgactccggcgagtatcggtgtcagaccaatctgtctacactgtctgaccccgtgcagcttgaggtccacattggatggttgctcttgcaagccccacgctgggttttcaaagaggaagatccaatccatctgcggtgccacagctggaaaaacaccgctctccacaaagtcacatacctgcaaaatggcaaaggacgcaaatacttccatcacaattccgatttttacattccgaaggctaccctgaaagacagcggcagctatttctgccggggactcgtcggctccaagaatgtgtcctccgaaaccgtgaatatcacgattacccaaggactggctgtgcctacaatctctagcttctttccgcctggataccaagtctccttctgtcttgtgatggtcctcctgtttgctgtggacacaggactgtacttttacgtg

SEQ ID NO: 2172 - DNA, 1092 bp, synthetic construct
  source 1..1092: mol_type = other DNA
atggccttaccagtgaccgccttgctcctgccgctggccttgctgctccacgccgccaggccggaagtgcagctggttgaatctggcggaggactggttcagcctggcggatctctgagactgtcttgtgccgcctctggcttcgccagcgactactatatcatcggctggttcagacaggcccctggcaaagagagagagggcgtcagctgtatcagcagcagatacgccaacaccaactacgccgacagcgtgaagggcagattcaccatcagccgggacaacgccaagaacaccgtgtacctccagatgaacagcctgaagcctgaggacaccgccgtgtactactgtgccgccgacaccagaagatacacctgtcctgacattgccaccatgcaccggaacttcgattcttggggccagggcacactggtcaccgtttcttctacgcgtggaatgaggactgaggatcttcccaaagctgtcgtctttctcgaaccccaatggtatcgggtgctcgaaaaagactctgtgacactgaaatgccaaggggcctactctcccgaggacaactccacacagtggtttcataatgagtccctcatcagctctcaggccagctcttatttcattgatgccgctacagtggacgactccggcgagtatcggtgtcagaccaatctgtctacactgtctgaccccgtgcagcttgaggtccacattggatggttgctcttgcaagccccacgctgggttttcaaagaggaagatccaatccatctgcggtgccacagctggaaaaacaccgctctccacaaagtcacatacctgcaaaatggcaaaggacgcaaatacttccatcacaattccgatttttacattccgaaggctaccctgaaagacagcggcagctatttctgccggggactcgtcggctccaagaatgtgtcctccgaaaccgtgaatatcacgattacccaaggactggctgtgcctacaatctctagcttctttccgcctggataccaagtctccttctgtcttgtgatggtcctcctgtttgctgtggacacaggactgtacttttacgtg

SEQ ID NO: 2173 - DNA, 1080 bp, synthetic construct
  source 1..1080: mol_type = other DNA
atggccttaccagtgaccgccttgctcctgccgctggccttgctgctccacgccgccaggccggaagtgcaactggtggaatctggaggctctctggtgcagccagggggaagcctgagactgtcttgtgccgcttccggcttcaccttcgacgactacgccatgagctgggtgcgccaggtgccaggcaaaggcctggaatgggtgtccagcatcaactggagcggcacccacaccgattacgccgactccgtgaaaggcagattcacaatcagcagaaacaacgccaacaataccctgtacctgcagatgaactccctgaagtctgaggatacagcagtgtattattgcgccaagaactggcgggacgccggcaccacttggtttgagaaaagcggctctgccggacagggaacccaagtgacagtgtcctccacgcgtggaatgaggactgaggatcttcccaaagctgtcgtctttctcgaaccccaatggtatcgggtgctcgaaaaagactctgtgacactgaaatgccaaggggcctactctcccgaggacaactccacacagtggtttcataatgagtccctcatcagctctcaggccagctcttatttcattgatgccgctacagtggacgactccggcgagtatcggtgtcagaccaatctgtctacactgtctgaccccgtgcagcttgaggtccacattggatggttgctcttgcaagccccacgctgggttttcaaagaggaagatccaatccatctgcggtgccacagctggaaaaacaccgctctccacaaagtcacatacctgcaaaatggcaaaggacgcaaatacttccatcacaattccgatttttacattccgaaggctaccctgaaagacagcggcagctatttctgccggggactcgtcggctccaagaatgtgtcctccgaaaccgtgaatatcacgattacccaaggactggctgtgcctacaatctctagcttctttccgcctggataccaagtctccttctgtcttgtgatggtcctcctgtttgctgtggacacaggactgtacttttacgtg

SEQ ID NO: 2174 - DNA, 1062 bp, synthetic construct
  source 1..1062: mol_type = other DNA
atggccttaccagtgaccgccttgctcctgccgctggccttgctgctccacgccgccaggccggaggtgcaactggtggaaagcggcggaggcctggtgcaggctggcggatctctgagactgagctgtgccgccagcggcatcaccttcagcatcaacacaatgggctggtacagacaggcccctggcaagcagagggaactggtggccctgatctccagcatcggcgacacctactacgccgacagcgtgaagggccggttcaccatcagccgggacaacgccaagaacaccgtgtacctccagatgaacagcctgaagcccgaggacaccgccgtgtactactgcaagcggttcagaacagccgcccagggcaccgattattggggccagggaacacaagtgaccgtgtcctctacgcgtggaatgaggactgaggatcttcccaaagctgtcgtctttctcgaaccccaatggtatcgggtgctcgaaaaagactctgtgacactgaaatgccaaggggcctactctcccgaggacaactccacacagtggtttcataatgagtccctcatcagctctcaggccagctcttatttcattgatgccgctacagtggacgactccggcgagtatcggtgtcagaccaatctgtctacactgtctgaccccgtgcagcttgaggtccacattggatggttgctcttgcaagccccacgctgggttttcaaagaggaagatccaatccatctgcggtgccacagctggaaaaacaccgctctccacaaagtcacatacctgcaaaatggcaaaggacgcaaatacttccatcacaattccgatttttacattccgaaggctaccctgaaagacagcggcagctatttctgccggggactcgtcggctccaagaatgtgtcctccgaaaccgtgaatatcacgattacccaaggactggctgtgcctacaatctctagcttctttccgcctggataccaagtctccttctgtcttgtgatggtcctcctgtttgctgtggacacaggactgtacttttacgtg

SEQ ID NO: 2175 - DNA, 1065 bp, synthetic construct
  source 1..1065: mol_type = other DNA
atggccttaccagtgaccgccttgctcctgccgctggccttgctgctccacgccgccaggccggaagtgcaactggtggaatctgggggcggactggtgcagccaggcggaagtctgaggctgtcttgtgccgcctccggcagcatcttcggcttcaacgacatggcctggtatcggcaggctcccggaaaacagcgcgagctggtggctctgattagcagagtgggcgtgaccagcagcgccgactctgtgaagggcagattcacaatctccagagtgaacgccaaggatacagtgtacctccagatgaactctctgaaacctgaggatacagcagtgtactattgctacatggaccagcggctggacggcagcacactggcctactggggacagggaactcaagtgacagtgtctagcacgcgtggaatgaggactgaggatcttcccaaagctgtcgtctttctcgaaccccaatggtatcgggtgctcgaaaaagactctgtgacactgaaatgccaaggggcctactctcccgaggacaactccacacagtggtttcataatgagtccctcatcagctctcaggccagctcttatttcattgatgccgctacagtggacgactccggcgagtatcggtgtcagaccaatctgtctacactgtctgaccccgtgcagcttgaggtccacattggatggttgctcttgcaagccccacgctgggttttcaaagaggaagatccaatccatctgcggtgccacagctggaaaaacaccgctctccacaaagtcacatacctgcaaaatggcaaaggacgcaaatacttccatcacaattccgatttttacattccgaaggctaccctgaaagacagcggcagctatttctgccggggactcgtcggctccaagaatgtgtcctccgaaaccgtgaatatcacgattacccaaggactggctgtgcctacaatctctagcttctttccgcctggataccaagtctccttctgtcttgtgatggtcctcctgtttgctgtggacacaggactgtacttttacgtg

SEQ ID NO: 2176 - DNA, 1068 bp, synthetic construct
  source 1..1068: mol_type = other DNA
atggccttaccagtgaccgccttgctcctgccgctggccttgctgctccacgccgccaggccggacgtgcaactcgtggaatccggcggaggcctggtgcagcctggcggatctctgagactgagctgtgccgccagcggctctatcggcggactgaatgccatggcctggtacagacaggcccctggcaaagaacgggaactggtggccggcatctttggcgtgggcagcaccagatacgccgacagcgtgaagggccggttcaccatcagccgggacaacagcaagaacaccgtgtacctgcagatgaacagcctgcggcccgaggataccgccgtgtactactgcagaatgtccagcgtgaccagaggctccagcgactactggggccagggaacacttgtgaccgtgtccagtctcgagacgcgtggaatgaggactgaggatcttcccaaagctgtcgtctttctcgaaccccaatggtatcgggtgctcgaaaaagactctgtgacactgaaatgccaaggggcctactctcccgaggacaactccacacagtggtttcataatgagtccctcatcagctctcaggccagctcttatttcattgatgccgctacagtggacgactccggcgagtatcggtgtcagaccaatctgtctacactgtctgaccccgtgcagcttgaggtccacattggatggttgctcttgcaagccccacgctgggttttcaaagaggaagatccaatccatctgcggtgccacagctggaaaaacaccgctctccacaaagtcacatacctgcaaaatggcaaaggacgcaaatacttccatcacaattccgatttttacattccgaaggctaccctgaaagacagcggcagctatttctgccggggactcgtcggctccaagaatgtgtcctccgaaaccgtgaatatcacgattacccaaggactggctgtgcctacaatctctagcttctttccgcctggataccaagtctccttctgtcttgtgatggtcctcctgtttgctgtggacacaggactgtacttttacgtg

SEQ ID NO: 2177 - DNA, 1083 bp, synthetic construct
  source 1..1083: mol_type = other DNA
atggccttaccagtgaccgccttgctcctgccgctggccttgctgctccacgccgccaggccggaagtgcaactggtggagtccggcggtggactggtacagcctgggggttcactgcgcctgtcctgcgccgccagcggaagaacctattacctcaatgctatgggttggttccgccaggccccaggaaaggagcgcgagttcgtggcggctattgactggtccgaggggaacaaggactatgctgattccgtgaagggcaggtttaccatcagccgggataattcaaaaaatactgtttatttgcagatgaactctcttagaccagaagacactgctgtctattactgcgccgctgacacccctccttggggaccactgatttatatcgaaagctatgattcctgggggcagggcacactcgtcaccgtgagtagcacgcgtggaatgaggactgaggatcttcccaaagctgtcgtctttctcgaaccccaatggtatcgggtgctcgaaaaagactctgtgacactgaaatgccaaggggcctactctcccgaggacaactccacacagtggtttcataatgagtccctcatcagctctcaggccagctcttatttcattgatgccgctacagtggacgactccggcgagtatcggtgtcagaccaatctgtctacactgtctgaccccgtgcagcttgaggtccacattggatggttgctcttgcaagccccacgctgggttttcaaagaggaagatccaatccatctgcggtgccacagctggaaaaacaccgctctccacaaagtcacatacctgcaaaatggcaaaggacgcaaatacttccatcacaattccgatttttacattccgaaggctaccctgaaagacagcggcagctatttctgccggggactcgtcggctccaagaatgtgtcctccgaaaccgtgaatatcacgattacccaaggactggctgtgcctacaatctctagcttctttccgcctggataccaagtctccttctgtcttgtgatggtcctcctgtttgctgtggacacaggactgtacttttacgtg

SEQ ID NO: 2178 - DNA, 1077 bp, synthetic construct
  source 1..1077: mol_type = other DNA
atggccttaccagtgaccgccttgctcctgccgctggccttgctgctccacgccgccaggccggaggtgcaactggtggaatccgggggaggcagcgtgcaggctgggggatcactgagactgtcttgtgctgcctccggcgacacctacggcagctattggatgggatggtttcggcaggctcccggaaaagaacgggaaggcgtggccgccatcaacagaggcggcggatacaccgtgtacgccgactctgtgaagggcagattcacaatctccagagacacagccaagaatactgtgtacctgcagatgaactccctgcgccccgacgataccgccgactattattgcgccgcttccggcgtgctgggcggcctgcatgaggactggttcaattattggggacagggaacacttgtgacagtgtccagcacgcgtggaatgaggactgaggatcttcccaaagctgtcgtctttctcgaaccccaatggtatcgggtgctcgaaaaagactctgtgacactgaaatgccaaggggcctactctcccgaggacaactccacacagtggtttcataatgagtccctcatcagctctcaggccagctcttatttcattgatgccgctacagtggacgactccggcgagtatcggtgtcagaccaatctgtctacactgtctgaccccgtgcagcttgaggtccacattggatggttgctcttgcaagccccacgctgggttttcaaagaggaagatccaatccatctgcggtgccacagctggaaaaacaccgctctccacaaagtcacatacctgcaaaatggcaaaggacgcaaatacttccatcacaattccgatttttacattccgaaggctaccctgaaagacagcggcagctatttctgccggggactcgtcggctccaagaatgtgtcctccgaaaccgtgaatatcacgattacccaaggactggctgtgcctacaatctctagcttctttccgcctggataccaagtctccttctgtcttgtgatggtcctcctgtttgctgtggacacaggactgtacttttacgtg

SEQ ID NO: 2179 - DNA, 1074 bp, synthetic construct
  source 1..1074: mol_type = other DNA
atggccttaccagtgaccgccttgctcctgccgctggccttgctgctccacgccgccaggccggttcagctcgtggaaagcggtggcggaagtgtgcaggccggaggcagtttgcgcctgagctgcgctgcttccggcgatacatacgggtcttactggatgggctggtttaggcaggcacctggacaagaaagagaagctgtggccgctattaacaggggaggtggctataccgtttatgctgattccgtgaagggccgattcacaatctcccgggataacgccaaaaacactctgtacctgcagatgaactcccttaggcccgatgacacagccgattactattgtgcggcctccggcgtgctgggtggtctgcatgaggattggttcaactactgggggcaaggcaccctcgtaaccgtgagtagcacgcgtggaatgaggactgaggatcttcccaaagctgtcgtctttctcgaaccccaatggtatcgggtgctcgaaaaagactctgtgacactgaaatgccaaggggcctactctcccgaggacaactccacacagtggtttcataatgagtccctcatcagctctcaggccagctcttatttcattgatgccgctacagtggacgactccggcgagtatcggtgtcagaccaatctgtctacactgtctgaccccgtgcagcttgaggtccacattggatggttgctcttgcaagccccacgctgggttttcaaagaggaagatccaatccatctgcggtgccacagctggaaaaacaccgctctccacaaagtcacatacctgcaaaatggcaaaggacgcaaatacttccatcacaattccgatttttacattccgaaggctaccctgaaagacagcggcagctatttctgccggggactcgtcggctccaagaatgtgtcctccgaaaccgtgaatatcacgattacccaaggactggctgtgcctacaatctctagcttctttccgcctggataccaagtctccttctgtcttgtgatggtcctcctgtttgctgtggacacaggactgtacttttacgtg

SEQ ID NO: 2180 - DNA, 1080 bp, synthetic construct
  source 1..1080: mol_type = other DNA
atggccttaccagtgaccgccttgctcctgccgctggccttgctgctccacgccgccaggccggaggtgcaactggtggaaagcggcggaggctctgtgcagacaggcggctctctgagactgacctgtgccgccagcggcagaaccagcagatcctatggcatgggctggttcagacaggcccctggcaaagaacgcgagttcgtgtccggcatctcttggagaggcgacagcaccggctacgccgatagcgtgaagggccggttcaccatcagccgggacaacgccaagaacaccgtggacctgcagatgaacagcctgaagcccgaggacaccgccatctactactgtgccgctgccgccggatctgcttggtacggcacactgtacgagtacgactactggggccagggcacccttgtgaccgtgtcatctacgcgtggaatgaggactgaggatcttcccaaagctgtcgtctttctcgaaccccaatggtatcgggtgctcgaaaaagactctgtgacactgaaatgccaaggggcctactctcccgaggacaactccacacagtggtttcataatgagtccctcatcagctctcaggccagctcttatttcattgatgccgctacagtggacgactccggcgagtatcggtgtcagaccaatctgtctacactgtctgaccccgtgcagcttgaggtccacattggatggttgctcttgcaagccccacgctgggttttcaaagaggaagatccaatccatctgcggtgccacagctggaaaaacaccgctctccacaaagtcacatacctgcaaaatggcaaaggacgcaaatacttccatcacaattccgatttttacattccgaaggctaccctgaaagacagcggcagctatttctgccggggactcgtcggctccaagaatgtgtcctccgaaaccgtgaatatcacgattacccaaggactggctgtgcctacaatctctagcttctttccgcctggataccaagtctccttctgtcttgtgatggtcctcctgtttgctgtggacacaggactgtacttttacgtg

SEQ ID NO: 2181 - DNA, 1080 bp, synthetic construct
  source 1..1080: mol_type = other DNA
atggccttaccagtgaccgccttgctcctgccgctggccttgctgctccacgccgccaggccggaggtgcagctcgtagaatctggaggtggttccgtgcaagccggaggatcattgcgactgacctgcgcagcgagcggatctacttctcgctcttacggtatgggatggttcagacaggctcctgggaaagagcgcgagttcgtttcaggcatctcctggaggggggacagcaccggctacgcagatagcgtgaagggcaggttcacgatcagccgagacaacgccaaaaacaccgtcgatctgcaaatgaatagtctgaagcccgaagatactgcgatctactactgtgccgccgcagcagggtccacctggtacggcacactctacgagtacgactactgggggcagggaaccctggtaaccgtgtcctctacgcgtggaatgaggactgaggatcttcccaaagctgtcgtctttctcgaaccccaatggtatcgggtgctcgaaaaagactctgtgacactgaaatgccaaggggcctactctcccgaggacaactccacacagtggtttcataatgagtccctcatcagctctcaggccagctcttatttcattgatgccgctacagtggacgactccggcgagtatcggtgtcagaccaatctgtctacactgtctgaccccgtgcagcttgaggtccacattggatggttgctcttgcaagccccacgctgggttttcaaagaggaagatccaatccatctgcggtgccacagctggaaaaacaccgctctccacaaagtcacatacctgcaaaatggcaaaggacgcaaatacttccatcacaattccgatttttacattccgaaggctaccctgaaagacagcggcagctatttctgccggggactcgtcggctccaagaatgtgtcctccgaaaccgtgaatatcacgattacccaaggactggctgtgcctacaatctctagcttctttccgcctggataccaagtctccttctgtcttgtgatggtcctcctgtttgctgtggacacaggactgtacttttacgtg

SEQ ID NO: 2182 - DNA, 1083 bp, synthetic construct
  source 1..1083: mol_type = other DNA
atggccttaccagtgaccgccttgctcctgccgctggccttgctgctccacgccgccaggccggatgttcagttggtggagtctggtggcggtttggtgcagccaggtggctccctgcgactcagttgtgcagcctccgggttcattctggattactacgctattggttggtttcgacaggcccccggaaaggagagagagggcgtgctctgcattgatgccagcgacgacattacctactacgccgattctgtgaagggccgcttcaccatcagtagagacaatagcaagaatacagtctacctgcagatgaactccctgcgcccagaagacactgccgtctactactgtgctacccctatcgggctttcttcctcttgccttctcgaatatgactacgattactgggggcaggggacgctggtcaccgtgtctagcacgcgtggaatgaggactgaggatcttcccaaagctgtcgtctttctcgaaccccaatggtatcgggtgctcgaaaaagactctgtgacactgaaatgccaaggggcctactctcccgaggacaactccacacagtggtttcataatgagtccctcatcagctctcaggccagctcttatttcattgatgccgctacagtggacgactccggcgagtatcggtgtcagaccaatctgtctacactgtctgaccccgtgcagcttgaggtccacattggatggttgctcttgcaagccccacgctgggttttcaaagaggaagatccaatccatctgcggtgccacagctggaaaaacaccgctctccacaaagtcacatacctgcaaaatggcaaaggacgcaaatacttccatcacaattccgatttttacattccgaaggctaccctgaaagacagcggcagctatttctgccggggactcgtcggctccaagaatgtgtcctccgaaaccgtgaatatcacgattacccaaggactggctgtgcctacaatctctagcttctttccgcctggataccaagtctccttctgtcttgtgatggtcctcctgtttgctgtggacacaggactgtacttttacgtg

SEQ ID NO: 2183 - DNA, 1086 bp, synthetic construct
  source 1..1086: mol_type = other DNA
atggccttaccagtgaccgccttgctcctgccgctggccttgctgctccacgccgccaggccggaggtgcaactggtggaaagcggcggaggactggtgcaggctggcgatagcctgagactgagctgtgccgcctccggcagagccttcagcagatatgccatgggctggttcagacaggcccctggcaaagaacgcgagttcgtggccgccatcggctggggacctagcaagaccaactacgccgacagcgtgaagggccggttcaccatcagccgggacaacgccaagaacaccgtgtacctgcagatgaacaccctgaagcccgaggacaccgccgtgtactcttgcgccgccaagttcgtgaacaccgacagcacctggtcccgcagcgagatgtacacctattggggccagggcaccctcgtgaccgtgtctagtacgcgtggaatgaggactgaggatcttcccaaagctgtcgtctttctcgaaccccaatggtatcgggtgctcgaaaaagactctgtgacactgaaatgccaaggggcctactctcccgaggacaactccacacagtggtttcataatgagtccctcatcagctctcaggccagctcttatttcattgatgccgctacagtggacgactccggcgagtatcggtgtcagaccaatctgtctacactgtctgaccccgtgcagcttgaggtccacattggatggttgctcttgcaagccccacgctgggttttcaaagaggaagatccaatccatctgcggtgccacagctggaaaaacaccgctctccacaaagtcacatacctgcaaaatggcaaaggacgcaaatacttccatcacaattccgatttttacattccgaaggctaccctgaaagacagcggcagctatttctgccggggactcgtcggctccaagaatgtgtcctccgaaaccgtgaatatcacgattacccaaggactggctgtgcctacaatctctagcttctttccgcctggataccaagtctccttctgtcttgtgatggtcctcctgtttgctgtggacacaggactgtacttttacgtg

SEQ ID NO: 2184 - DNA, 1074 bp, synthetic construct
  source 1..1074: mol_type = other DNA
atggccttaccagtgaccgccttgctcctgccgctggccttgctgctccacgccgccaggccggaggtgcagctggtagaatccggcgggggacttgtacaggctggtggtagtctgagactgagctgtgtggcctccggcatcagcagcagcaagcggaacatgggatggtataggcaagcccctggtaagcagagggaatccgtggctacaatcagcagcggcggcaacaaggactacaccgacgccgtgaaggacaggttcaccatctccagggacaccaccaagaacaccgtgtacctgcagatgaactccctcaagcccgaggacaccgccgtgtactactgcaagatcgaggccggcacaggctgggccaccagaagaggctacacatactgggggcagggaacactggtgaccgtgagctccacgcgtggaatgaggactgaggatcttcccaaagctgtcgtctttctcgaaccccaatggtatcgggtgctcgaaaaagactctgtgacactgaaatgccaaggggcctactctcccgaggacaactccacacagtggtttcataatgagtccctcatcagctctcaggccagctcttatttcattgatgccgctacagtggacgactccggcgagtatcggtgtcagaccaatctgtctacactgtctgaccccgtgcagcttgaggtccacattggatggttgctcttgcaagccccacgctgggttttcaaagaggaagatccaatccatctgcggtgccacagctggaaaaacaccgctctccacaaagtcacatacctgcaaaatggcaaaggacgcaaatacttccatcacaattccgatttttacattccgaaggctaccctgaaagacagcggcagctatttctgccggggactcgtcggctccaagaatgtgtcctccgaaaccgtgaatatcacgattacccaaggactggctgtgcctacaatctctagcttctttccgcctggataccaagtctccttctgtcttgtgatggtcctcctgtttgctgtggacacaggactgtacttttacgtg

SEQ ID NO: 2185 - DNA, 1044 bp, synthetic construct
  source 1..1044: mol_type = other DNA
atggccttaccagtgaccgccttgctcctgccgctggccttgctgctccacgccgccaggccgcaggtgcaactggtgcagtctggcggagggctggtgcagccagggggatctctgagactgagctgtgccgccagcgacttcgacttcgccgcctacgagatgagctgggtgcgccaggctcctggacagggactggaatgggtggccatcatcagccacgacggcatcgacaagtattacaccgacagcgtgaagggccggttcaccatcagccgggacaacagcaagaacaccctgtacctgcagatgaataccctgcgggccgaggacaccgccacctactattgcctgagactgggagccgtgggccagggcacacttgtgacagtgtctagcacgcgtggaatgaggactgaggatcttcccaaagctgtcgtctttctcgaaccccaatggtatcgggtgctcgaaaaagactctgtgacactgaaatgccaaggggcctactctcccgaggacaactccacacagtggtttcataatgagtccctcatcagctctcaggccagctcttatttcattgatgccgctacagtggacgactccggcgagtatcggtgtcagaccaatctgtctacactgtctgaccccgtgcagcttgaggtccacattggatggttgctcttgcaagccccacgctgggttttcaaagaggaagatccaatccatctgcggtgccacagctggaaaaacaccgctctccacaaagtcacatacctgcaaaatggcaaaggacgcaaatacttccatcacaattccgatttttacattccgaaggctaccctgaaagacagcggcagctatttctgccggggactcgtcggctccaagaatgtgtcctccgaaaccgtgaatatcacgattacccaaggactggctgtgcctacaatctctagcttctttccgcctggataccaagtctccttctgtcttgtgatggtcctcctgtttgctgtggacacaggactgtacttttacgtg

SEQ ID NO: 2186 - DNA, 1068 bp, synthetic construct
  source 1..1068: mol_type = other DNA
atggccttaccagtgaccgccttgctcctgccgctggccttgctgctccacgccgccaggccgcaggtgcaactggtgcagagcggaggcggactggtgcagcctgggggcagtctgaggctgtcttgtgccgcctccgatttcgccttcgatgattacgagatgtcttgggtgcggcaggccccaggcaaagccctggaatggatcggcgacatcaaccacagcggcaccaccatctacaaccccagcctgaagtccagagtgaccatctccagagacaactccaagaatactctgtacctgcagatgaacacactgagagccgaagatacagccatctactactgcgccagaccccactacggcgactacagcgacgccttcgacatctggggccagggaaccatggtcaccgtgtcctctacgcgtggaatgaggactgaggatcttcccaaagctgtcgtctttctcgaaccccaatggtatcgggtgctcgaaaaagactctgtgacactgaaatgccaaggggcctactctcccgaggacaactccacacagtggtttcataatgagtccctcatcagctctcaggccagctcttatttcattgatgccgctacagtggacgactccggcgagtatcggtgtcagaccaatctgtctacactgtctgaccccgtgcagcttgaggtccacattggatggttgctcttgcaagccccacgctgggttttcaaagaggaagatccaatccatctgcggtgccacagctggaaaaacaccgctctccacaaagtcacatacctgcaaaatggcaaaggacgcaaatacttccatcacaattccgatttttacattccgaaggctaccctgaaagacagcggcagctatttctgccggggactcgtcggctccaagaatgtgtcctccgaaaccgtgaatatcacgattacccaaggactggctgtgcctacaatctctagcttctttccgcctggataccaagtctccttctgtcttgtgatggtcctcctgtttgctgtggacacaggactgtacttttacgtg

SEQ ID NO: 2187 - DNA, 1053 bp, synthetic construct
  source 1..1053: mol_type = other DNA
atggccttaccagtgaccgccttgctcctgccgctggccttgctgctccacgccgccaggccggaggtgcagctcgtggaatcaggcggaggtcttgtacagccaggaaattctcttcggctgtcttgcgccgcgagcgggttcaccttcagcagcttcggaatgagctgggtaagacaggcaccggggaaaggcctggagtgggtgagctcaatcagtgggagcgggtcagataccctgtacgcggattccgtgaagggcagattcacaatctctcgggacaatgctaagacaacactttaccttcagatgaactctctgcgacccgaggataccgctgtctactactgtacaataggaggttctctgtccagaagttctcaagggacactggtgaccgtctccagcacgcgtggaatgaggactgaggatcttcccaaagctgtcgtctttctcgaaccccaatggtatcgggtgctcgaaaaagactctgtgacactgaaatgccaaggggcctactctcccgaggacaactccacacagtggtttcataatgagtccctcatcagctctcaggccagctcttatttcattgatgccgctacagtggacgactccggcgagtatcggtgtcagaccaatctgtctacactgtctgaccccgtgcagcttgaggtccacattggatggttgctcttgcaagccccacgctgggttttcaaagaggaagatccaatccatctgcggtgccacagctggaaaaacaccgctctccacaaagtcacatacctgcaaaatggcaaaggacgcaaatacttccatcacaattccgatttttacattccgaaggctaccctgaaagacagcggcagctatttctgccggggactcgtcggctccaagaatgtgtcctccgaaaccgtgaatatcacgattacccaaggactggctgtgcctacaatctctagcttctttccgcctggataccaagtctccttctgtcttgtgatggtcctcctgtttgctgtggacacaggactgtacttttacgtg

SEQ ID NO: 2188 - DNA, 1056 bp, synthetic construct
  source 1..1056: mol_type = other DNA
atggccttaccagtgaccgccttgctcctgccgctggccttgctgctccacgccgccaggccggaagttcaactggtggaatccggtggaggactggtgcaagcgggcggctcactgcgccttagctgtgctgccagcggcagtatcttcagcggcaatgtaatgggttggtacaggcgacaagccccaggcaaggagcgagagtgggtagccgcgattgcaagtgggggcagcatctactacagagattctgtgaaaggccgcttcactattagtcgggacaacgcaaaaaacacggtgtatctccaaatgaacagcttgaagccagaggacactgctgtctactattgtaacagtcatcccccaactctcccctattgggggctgggcactcaggtcaccgtgagttccacgcgtggaatgaggactgaggatcttcccaaagctgtcgtctttctcgaaccccaatggtatcgggtgctcgaaaaagactctgtgacactgaaatgccaaggggcctactctcccgaggacaactccacacagtggtttcataatgagtccctcatcagctctcaggccagctcttatttcattgatgccgctacagtggacgactccggcgagtatcggtgtcagaccaatctgtctacactgtctgaccccgtgcagcttgaggtccacattggatggttgctcttgcaagccccacgctgggttttcaaagaggaagatccaatccatctgcggtgccacagctggaaaaacaccgctctccacaaagtcacatacctgcaaaatggcaaaggacgcaaatacttccatcacaattccgatttttacattccgaaggctaccctgaaagacagcggcagctatttctgccggggactcgtcggctccaagaatgtgtcctccgaaaccgtgaatatcacgattacccaaggactggctgtgcctacaatctctagcttctttccgcctggataccaagtctccttctgtcttgtgatggtcctcctgtttgctgtggacacaggactgtacttttacgtg

SEQ ID NO: 2189 - DNA, 1086 bp, synthetic construct
  source 1..1086: mol_type = other DNA
atggccttaccagtgaccgccttgctcctgccgctggccttgctgctccacgccgccaggccggaagtgcaactggtggaatctggagggggaagcgtgcaggcaggcggatctctgagactgtcctgcaccacatctggcagagccctgaatatgtacgtgatgggatggtttcggcaggctcccggcaacgagcgggaatttgtggccgctacaagcagcagcggcggcagcacaagctaccccgattctgtgaagggcagattcacaatctcccgcgataatgccaagaatactgtgtacctgcagatgaatagtctgaagcctgaagatacagccgcctacagatgtgccgccagcccctacgtgtccacccccaccatgaacatcctggaagagtacagatactggggcctgggaacacaagtgacagtgtccagcacgcgtggaatgaggactgaggatcttcccaaagctgtcgtctttctcgaaccccaatggtatcgggtgctcgaaaaagactctgtgacactgaaatgccaaggggcctactctcccgaggacaactccacacagtggtttcataatgagtccctcatcagctctcaggccagctcttatttcattgatgccgctacagtggacgactccggcgagtatcggtgtcagaccaatctgtctacactgtctgaccccgtgcagcttgaggtccacattggatggttgctcttgcaagccccacgctgggttttcaaagaggaagatccaatccatctgcggtgccacagctggaaaaacaccgctctccacaaagtcacatacctgcaaaatggcaaaggacgcaaatacttccatcacaattccgatttttacattccgaaggctaccctgaaagacagcggcagctatttctgccggggactcgtcggctccaagaatgtgtcctccgaaaccgtgaatatcacgattacccaaggactggctgtgcctacaatctctagcttctttccgcctggataccaagtctccttctgtcttgtgatggtcctcctgtttgctgtggacacaggactgtacttttacgtg

SEQ ID NO: 2190 - DNA, 1071 bp, synthetic construct
  source 1..1071: mol_type = other DNA
atggccttaccagtgaccgccttgctcctgccgctggccttgctgctccacgccgccaggccggaggttcagttggtcgaatcaggcgggggcctcgtccaacccggcggaagcctgcggctgtcttgcgcagcaagtggtagtgtgttcaagatcaacgttatggcctggtatcgccaggctccgggaaaagggagagagctggttgcggggatcattagcggtggctccaccagctacgctgacagtgtgaagggaaggttcactatatcacgcgacaacgcaaagaatacattgtacctccagatgaatagcttgcggcccgaagacacggcagtctactattgtgcctttatcacaacagagagcgactatgacctgggccgccggtattgggggcagggaacccttgtgaccgtttcatccacgcgtggaatgaggactgaggatcttcccaaagctgtcgtctttctcgaaccccaatggtatcgggtgctcgaaaaagactctgtgacactgaaatgccaaggggcctactctcccgaggacaactccacacagtggtttcataatgagtccctcatcagctctcaggccagctcttatttcattgatgccgctacagtggacgactccggcgagtatcggtgtcagaccaatctgtctacactgtctgaccccgtgcagcttgaggtccacattggatggttgctcttgcaagccccacgctgggttttcaaagaggaagatccaatccatctgcggtgccacagctggaaaaacaccgctctccacaaagtcacatacctgcaaaatggcaaaggacgcaaatacttccatcacaattccgatttttacattccgaaggctaccctgaaagacagcggcagctatttctgccggggactcgtcggctccaagaatgtgtcctccgaaaccgtgaatatcacgattacccaaggactggctgtgcctacaatctctagcttctttccgcctggataccaagtctccttctgtcttgtgatggtcctcctgtttgctgtggacacaggactgtacttttacgtg

SEQ ID NO: 2191 - DNA, 1506 bp, synthetic construct
  source 1..1506: mol_type = other DNA
atggccttaccagtgaccgccttgctcctgccgctggccttgctgctccacgccgccaggccggaggtgcaactggtggaaagcggcggaggctctgtgcagacaggcggctctctgagactgacctgtgccgccagcggcagaaccagcagatcctatggcatgggctggttcagacaggcccctggcaaagaacgcgagttcgtgtccggcatctcttggagaggcgacagcaccggctacgccgatagcgtgaagggccggttcaccatcagccgggacaacgccaagaacaccgtggacctgcagatgaacagcctgaagcccgaggacaccgccatctactactgtgccgctgccgccggatctgcttggtacggcacactgtacgagtacgactactggggccagggcacccttgtgaccgtgtcatctctcgagggcggaggcggaagtggaggcggaggatctggcggcggaggctctttcgaagaggtgcaactggtggaatccgggggaggcagcgtgcaggctgggggatcactgagactgtcttgtgctgcctccggcgacacctacggcagctattggatgggatggtttcggcaggctcccggaaaagaacgggaaggcgtggccgccatcaacagaggcggcggatacaccgtgtacgccgactctgtgaagggcagattcacaatctccagagacacagccaagaatactgtgtacctgcagatgaactccctgcgccccgacgataccgccgactattattgcgccgcttccggcgtgctgggcggcctgcatgaggactggttcaattattggggacagggaacacttgtgacagtgtccagcacgcgtggaatgaggactgaggatcttcccaaagctgtcgtctttctcgaaccccaatggtatcgggtgctcgaaaaagactctgtgacactgaaatgccaaggggcctactctcccgaggacaactccacacagtggtttcataatgagtccctcatcagctctcaggccagctcttatttcattgatgccgctacagtggacgactccggcgagtatcggtgtcagaccaatctgtctacactgtctgaccccgtgcagcttgaggtccacattggatggttgctcttgcaagccccacgctgggttttcaaagaggaagatccaatccatctgcggtgccacagctggaaaaacaccgctctccacaaagtcacatacctgcaaaatggcaaaggacgcaaatacttccatcacaattccgatttttacattccgaaggctaccctgaaagacagcggcagctatttctgccggggactcgtcggctccaagaatgtgtcctccgaaaccgtgaatatcacgattacccaaggactggctgtgcctacaatctctagcttctttccgcctggataccaagtctccttctgtcttgtgatggtcctcctgtttgctgtggacacaggactgtacttttacgtg

SEQ ID NO: 2192 - DNA, 1563 bp, synthetic construct
  source 1..1563: mol_type = other DNA
atggccttaccagtgaccgccttgctcctgccgctggccttgctgctccacgccgccaggccggaggtgcagctcgtagaatctggaggtggttccgtgcaagccggaggatcattgcgactgacctgcgcagcgagcggatctacttctcgctcttacggtatgggatggttcagacaggctcctgggaaagagcgcgagttcgtttcaggcatctcctggaggggggacagcaccggctacgcagatagcgtgaagggcaggttcacgatcagccgagacaacgccaaaaacaccgtcgatctgcaaatgaatagtctgaagcccgaagatactgcgatctactactgtgccgccgcagcagggtccacctggtacggcacactctacgagtacgactactgggggcagggaaccctggtaaccgtgtcctctctcgagggaggaggcggctccgggggaggcggaagtggaggcggaggatctgggtctggaggaagcggatctggaggctcagggtcagggggctcaggcagtggaggctctttcgaagttcagctcgtggaaagcggtggcggaagtgtgcaggccggaggcagtttgcgcctgagctgcgctgcttccggcgatacatacgggtcttactggatgggctggtttaggcaggcacctggacaagaaagagaagctgtggccgctattaacaggggaggtggctataccgtttatgctgattccgtgaagggccgattcacaatctcccgggataacgccaaaaacactctgtacctgcagatgaactcccttaggcccgatgacacagccgattactattgtgcggcctccggcgtgctgggtggtctgcatgaggattggttcaactactgggggcaaggcaccctcgtaaccgtgagtagcacgcgtggaatgaggactgaggatcttcccaaagctgtcgtctttctcgaaccccaatggtatcgggtgctcgaaaaagactctgtgacactgaaatgccaaggggcctactctcccgaggacaactccacacagtggtttcataatgagtccctcatcagctctcaggccagctcttatttcattgatgccgctacagtggacgactccggcgagtatcggtgtcagaccaatctgtctacactgtctgaccccgtgcagcttgaggtccacattggatggttgctcttgcaagccccacgctgggttttcaaagaggaagatccaatccatctgcggtgccacagctggaaaaacaccgctctccacaaagtcacatacctgcaaaatggcaaaggacgcaaatacttccatcacaattccgatttttacattccgaaggctaccctgaaagacagcggcagctatttctgccggggactcgtcggctccaagaatgtgtcctccgaaaccgtgaatatcacgattacccaaggactggctgtgcctacaatctctagcttctttccgcctggataccaagtctccttctgtcttgtgatggtcctcctgtttgctgtggacacaggactgtacttttacgtg

SEQ ID NO: 2193 - DNA, 1533 bp, synthetic construct
  source 1..1533: mol_type = other DNA
atggccttaccagtgaccgccttgctcctgccgctggccttgctgctccacgccgccaggccggaggtgcaactggtggaaagcggcggaggcctggtgcaggctggcggatctctgagactgagctgtgccgccagcggcatcaccttcagcatcaacacaatgggctggtacagacaggcccctggcaagcagagggaactggtggccctgatctccagcatcggcgacacctactacgccgacagcgtgaagggccggttcaccatcagccgggacaacgccaagaacaccgtgtacctccagatgaacagcctgaagcccgaggacaccgccgtgtactactgcaagcggttcagaacagccgcccagggcaccgattattggggccagggaacacaagtgaccgtgtcctctctcgagggaggaggcggctccgggggaggcggaagtggaggcggaggatctgggtctggaggaagcggatctggaggctcagggtcagggggctcaggcagtggaggctctttcgaagtgcaactggtggaatctgggggcggactggtgcagccaggcggaagtctgaggctgtcttgtgccgcctccggcagcatcttcggcttcaacgacatggcctggtatcggcaggctcccggaaaacagcgcgagctggtggctctgattagcagagtgggcgtgaccagcagcgccgactctgtgaagggcagattcacaatctccagagtgaacgccaaggatacagtgtacctccagatgaactctctgaaacctgaggatacagcagtgtactattgctacatggaccagcggctggacggcagcacactggcctactggggacagggaactcaagtgacagtgtctagcacgcgtggaatgaggactgaggatcttcccaaagctgtcgtctttctcgaaccccaatggtatcgggtgctcgaaaaagactctgtgacactgaaatgccaaggggcctactctcccgaggacaactccacacagtggtttcataatgagtccctcatcagctctcaggccagctcttatttcattgatgccgctacagtggacgactccggcgagtatcggtgtcagaccaatctgtctacactgtctgaccccgtgcagcttgaggtccacattggatggttgctcttgcaagccccacgctgggttttcaaagaggaagatccaatccatctgcggtgccacagctggaaaaacaccgctctccacaaagtcacatacctgcaaaatggcaaaggacgcaaatacttccatcacaattccgatttttacattccgaaggctaccctgaaagacagcggcagctatttctgccggggactcgtcggctccaagaatgtgtcctccgaaaccgtgaatatcacgattacccaaggactggctgtgcctacaatctctagcttctttccgcctggataccaagtctccttctgtcttgtgatggtcctcctgtttgctgtggacacaggactgtacttttacgtg

SEQ ID NO: 2194 - DNA, 1434 bp, synthetic construct; identical to SEQ ID NO: 2009
  source 1..1434: mol_type = other DNA

SEQ ID NO: 2195 - DNA, 1548 bp, synthetic construct
  source 1..1548: mol_type = other DNA
atggccttaccagtgaccgccttgctcctgccgctggccttgctgctccacgccgccaggccggacgtgcaactcgtggaatccggcggaggcctggtgcagcctggcggatctctgagactgagctgtgccgccagcggctctatcggcggactgaatgccatggcctggtacagacaggcccctggcaaagaacgggaactggtggccggcatctttggcgtgggcagcaccagatacgccgacagcgtgaagggccggttcaccatcagccgggacaacagcaagaacaccgtgtacctgcagatgaacagcctgcggcccgaggataccgccgtgtactactgcagaatgtccagcgtgaccagaggctccagcgactactggggccagggaacacttgtgaccgtgtccagtctcgagggaggaggcggctccgggggaggcggaagtggaggcggaggatctgggtctggaggaagcggatctggaggctcagggtcagggggctcaggcagtggaggctctttcgaagtgcaactggtggaatctggaggctctctggtgcagccagggggaagcctgagactgtcttgtgccgcttccggcttcaccttcgacgactacgccatgagctgggtgcgccaggtgccaggcaaaggcctggaatgggtgtccagcatcaactggagcggcacccacaccgattacgccgactccgtgaaaggcagattcacaatcagcagaaacaacgccaacaataccctgtacctgcagatgaactccctgaagtctgaggatacagcagtgtattattgcgccaagaactggcgggacgccggcaccacttggtttgagaaaagcggctctgccggacagggaacccaagtgacagtgtcctccacgcgtggaatgaggactgaggatcttcccaaagctgtcgtctttctcgaaccccaatggtatcgggtgctcgaaaaagactctgtgacactgaaatgccaaggggcctactctcccgaggacaactccacacagtggtttcataatgagtccctcatcagctctcaggccagctcttatttcattgatgccgctacagtggacgactccggcgagtatcggtgtcagaccaatctgtctacactgtctgaccccgtgcagcttgaggtccacattggatggttgctcttgcaagccccacgctgggttttcaaagaggaagatccaatccatctgcggtgccacagctggaaaaacaccgctctccacaaagtcacatacctgcaaaatggcaaaggacgcaaatacttccatcacaattccgatttttacattccgaaggctaccctgaaagacagcggcagctatttctgccggggactcgtcggctccaagaatgtgtcctccgaaaccgtgaatatcacgattacccaaggactggctgtgcctacaatctctagcttctttccgcctggataccaagtctccttctgtcttgtgatggtcctcctgtttgctgtggacacaggactgtacttttacgtg

SEQ ID NO: 2196 - DNA, 1572 bp, synthetic construct
  source 1..1572: mol_type = other DNA
atggccttaccagtgaccgccttgctcctgccgctggccttgctgctccacgccgccaggccggatgttcagttggtggagtctggtggcggtttggtgcagccaggtggctccctgcgactcagttgtgcagcctccgggttcattctggattactacgctattggttggtttcgacaggcccccggaaaggagagagagggcgtgctctgcattgatgccagcgacgacattacctactacgccgattctgtgaagggccgcttcaccatcagtagagacaatagcaagaatacagtctacctgcagatgaactccctgcgcccagaagacactgccgtctactactgtgctacccctatcgggctttcttcctcttgccttctcgaatatgactacgattactgggggcaggggacgctggtcaccgtgtctagcctcgagggaggtagcggctccgggggaggcggaagtggaggcggaggatctgggtctggaggaagcggatctggaggctcagggtcagggggctcaggcagtggaggctctttcgaagtgcaactggtggagtccggcggtggactggtacagcctgggggttcactgcgcctgtcctgcgccgccagcggaagaacctattacctcaatgctatgggttggttccgccaggccccaggaaaggagcgcgagttcgtggcggctattgactggtccgaggggaacaaggactatgctgattccgtgaagggcaggtttaccatcagccgggataattcaaaaaatactgtttatttgcagatgaactctcttagaccagaagacactgctgtctattactgcgccgctgacacccctccttggggaccactgatttatatcgaaagctatgattcctgggggcagggcacactcgtcaccgtgagtagcacgcgtggaatgaggactgaggatcttcccaaagctgtcgtctttctcgaaccccaatggtatcgggtgctcgaaaaagactctgtgacactgaaatgccaaggggcctactctcccgaggacaactccacacagtggtttcataatgagtccctcatcagctctcaggccagctcttatttcattgatgccgctacagtggacgactccggcgagtatcggtgtcagaccaatctgtctacactgtctgaccccgtgcagcttgaggtccacattggatggttgctcttgcaagccccacgctgggttttcaaagaggaagatccaatccatctgcggtgccacagctggaaaaacaccgctctccacaaagtcacatacctgcaaaatggcaaaggacgcaaatacttccatcacaattccgatttttacattccgaaggctaccctgaaagacagcggcagctatttctgccggggactcgtcggctccaagaatgtgtcctccgaaaccgtgaatatcacgattacccaaggactggctgtgcctacaatctctagcttctttccgcctggataccaagtctccttctgtcttgtgatggtcctcctgtttgctgtggacacaggactgtacttttacgtg

SEQ ID NO: 2197 - DNA, 1521 bp, synthetic construct
  source 1..1521: mol_type = other DNA
atggccttaccagtgaccgccttgctcctgccgctggccttgctgctccacgccgccaggccgcaggtgcaactggtgcagtctggcggagggctggtgcagccagggggatctctgagactgagctgtgccgccagcgacttcgacttcgccgcctacgagatgagctgggtgcgccaggctcctggacagggactggaatgggtggccatcatcagccacgacggcatcgacaagtattacaccgacagcgtgaagggccggttcaccatcagccgggacaacagcaagaacaccctgtacctgcagatgaataccctgcgggccgaggacaccgccacctactattgcctgagactgggagccgtgggccagggcacacttgtgacagtgtctagcctcgagggaggaggcggctccgggggaggcggaagtggaggcggaggatctgggtctggaggaagcggatctggaggctcagggtcagggggctcaggcagtggaggcagcttcgaacaggtgcaactggtgcagagcggaggcggactggtgcagcctgggggcagtctgaggctgtcttgtgccgcctccgatttcgccttcgatgattacgagatgtcttgggtgcggcaggccccaggcaaagccctggaatggatcggcgacatcaaccacagcggcaccaccatctacaaccccagcctgaagtccagagtgaccatctccagagacaactccaagaatactctgtacctgcagatgaacacactgagagccgaagatacagccatctactactgcgccagaccccactacggcgactacagcgacgccttcgacatctggggccagggaaccatggtcaccgtgtcctctacgcgtggaatgaggactgaggatcttcccaaagctgtcgtctttctcgaaccccaatggtatcgggtgctcgaaaaagactctgtgacactgaaatgccaaggggcctactctcccgaggacaactccacacagtggtttcataatgagtccctcatcagctctcaggccagctcttatttcattgatgccgctacagtggacgactccggcgagtatcggtgtcagaccaatctgtctacactgtctgaccccgtgcagcttgaggtccacattggatggttgctcttgcaagccccacgctgggttttcaaagaggaagatccaatccatctgcggtgccacagctggaaaaacaccgctctccacaaagtcacatacctgcaaaatggcaaaggacgcaaatacttccatcacaattccgatttttacattccgaaggctaccctgaaagacagcggcagctatttctgccggggactcgtcggctccaagaatgtgtcctccgaaaccgtgaatatcacgattacccaaggactggctgtgcctacaatctctagcttctttccgcctggataccaagtctccttctgtcttgtgatggtcctcctgtttgctgtggacacaggactgtacttttacgtg

SEQ ID NO: 2198 - DNA, 1065 bp, synthetic construct
  source 1..1065: mol_type = other DNA
atggccttaccagtgaccgccttgctcctgccgctggccttgctgctccacgccgccaggccgcaagtgaagctggaagagtctggcggaggactggtgcaggctggaagaagcctgagactgtcttgtgccgccagcgagcacacctttagctctcacgtgatgggctggttcagacaggcccctggcaaagaaagggaaagcgtggccgttatcggctggcgggatattagcaccagctacgccgatagcgtgaagggcagattcaccatcagccgggacaacgccaagaaaaccctgtacctccagatgaacagcctgaagccagaggacaccgccgtgtactactgcgccgccagaagaattgacgccgccgactttgattcttggggccagggaacccaagtgaccgtttctagcacgcgtggaatgaggactgaggatcttcccaaagctgtcgtctttctcgaaccccaatggtatcgggtgctcgaaaaagactctgtgacactgaaatgccaaggggcctactctcccgaggacaactccacacagtggtttcataatgagtccctcatcagctctcaggccagctcttatttcattgatgccgctacagtggacgactccggcgagtatcggtgtcagaccaatctgtctacactgtctgaccccgtgcagcttgaggtccacattggatggttgctcttgcaagccccacgctgggttttcaaagaggaagatccaatccatctgcggtgccacagctggaaaaacaccgctctccacaaagtcacatacctgcaaaatggcaaaggacgcaaatacttccatcacaattccgatttttacattccgaaggctaccctgaaagacagcggcagctatttctgccggggactcgtcggctccaagaatgtgtcctccgaaaccgtgaatatcacgattacccaaggactggctgtgcctacaatctctagcttctttccgcctggataccaagtctccttctgtcttgtgatggtcctcctgtttgctgtggacacaggactgtacttttacgtg

SEQ ID NO: 2199 - DNA, 1062 bp, synthetic construct
  source 1..1062: mol_type = other DNA
atggccttaccagtgaccgccttgctcctgccgctggccttgctgctccacgccgccaggccggaagtgcaactggttgaatccggtggcggcctggtgcaagcaggcggatctctcagacttagctgtgccgcctccggcagaaccttcacaatgggatggtttaggcaggctccagggaaagagagagagttcgtcgccgccatctctctgtctcccacactggcctactacgccgagtctgtgaaaggccggttcaccatctccagagataatgccaagaacaccgtggtgctgcaaatgaactctctgaaacccgaggatacagccctgtactattgtgccgctgaccggaagtccgtgatgagcatcagacccgattactggggacagggcacacaagtcacagtgtcctctacgcgtggaatgaggactgaggatcttcccaaagctgtcgtctttctcgaaccccaatggtatcgggtgctcgaaaaagactctgtgacactgaaatgccaaggggcctactctcccgaggacaactccacacagtggtttcataatgagtccctcatcagctctcaggccagctcttatttcattgatgccgctacagtggacgactccggcgagtatcggtgtcagaccaatctgtctacactgtctgaccccgtgcagcttgaggtccacattggatggttgctcttgcaagccccacgctgggttttcaaagaggaagatccaatccatctgcggtgccacagctggaaaaacaccgctctccacaaagtcacatacctgcaaaatggcaaaggacgcaaatacttccatcacaattccgatttttacattccgaaggctaccctgaaagacagcggcagctatttctgccggggactcgtcggctccaagaatgtgtcctccgaaaccgtgaatatcacgattacccaaggactggctgtgcctacaatctctagcttctttccgcctggataccaagtctccttctgtcttgtgatggtcctcctgtttgctgtggacacaggactgtacttttacgtg

SEQ ID NO: 2200 - DNA, 1464 bp, synthetic construct
  source 1..1464: mol_type = other DNA
atggccttaccagtgaccgccttgctcctgccgctggccttgctgctccacgccgccaggccgcaagtgaagctggaagagtctggcggaggactggtgcaggctggaagaagcctgagactgtcttgtgccgccagcgagcacacctttagctctcacgtgatgggctggttcagacaggcccctggcaaagaaagggaaagcgtggccgttatcggctggcgggatattagcaccagctacgccgatagcgtgaagggcagattcaccatcagccgggacaacgccaagaaaaccctgtacctccagatgaacagcctgaagccagaggacaccgccgtgtactactgcgccgccagaagaattgacgccgccgactttgattcttggggccagggaacccaagtgaccgtttctagcggaggcggtggaagtggcggcggtggttcaggcggcggaggatctgaagtgcaactggttgaatccggtggcggcctggtgcaagcaggcggatctctcagacttagctgtgccgcctccggcagaaccttcacaatgggatggtttaggcaggctccagggaaagagagagagttcgtcgccgccatctctctgtctcccacactggcctactacgccgagtctgtgaaaggccggttcaccatctccagagataatgccaagaacaccgtggtgctgcaaatgaactctctgaaacccgaggatacagccctgtactattgtgccgctgaccggaagtccgtgatgagcatcagacccgattactggggacagggcacacaagtcacagtgtcctctacgcgtggaatgaggactgaggatcttcccaaagctgtcgtctttctcgaaccccaatggtatcgggtgctcgaaaaagactctgtgacactgaaatgccaaggggcctactctcccgaggacaactccacacagtggtttcataatgagtccctcatcagctctcaggccagctcttatttcattgatgccgctacagtggacgactccggcgagtatcggtgtcagaccaatctgtctacactgtctgaccccgtgcagcttgaggtccacattggatggttgctcttgcaagccccacgctgggttttcaaagaggaagatccaatccatctgcggtgccacagctggaaaaacaccgctctccacaaagtcacatacctgcaaaatggcaaaggacgcaaatacttccatcacaattccgatttttacattccgaaggctaccctgaaagacagcggcagctatttctgccggggactcgtcggctccaagaatgtgtcctccgaaaccgtgaatatcacgattacccaaggactggctgtgcctacaatctctagcttctttccgcctggataccaagtctccttctgtcttgtgatggtcctcctgtttgctgtggacacaggactgtacttttacgtg

SEQ ID NO: 2201 - DNA, 1056 bp, synthetic construct
  source 1..1056: mol_type = other DNA
atggccttaccagtgaccgccttgctcctgccgctggccttgctgctccacgccgccaggccggaggtgcaactggttgagtctggcggaggactggttcaggcaggcggatctctgagactgagctgtatcgccaccggcaaggtgttcagcatctacgacatgggctggtacagacaggcccctggcaagcagagagagctggttgccgagatcacaagcagcggcaccacacactacgacgacttcgtgtccggcagattcaccatcagccgggacaacgccaagaacaccgtgtacctccagatgaacaccctgaaggccgaggacaccgccgtgtactactgtagagccaaccacgtgttcggcggcagctattggggacagggaacccaagtgacagtgtctagtacgcgtggaatgaggactgaggatcttcccaaagctgtcgtctttctcgaaccccaatggtatcgggtgctcgaaaaagactctgtgacactgaaatgccaaggggcctactctcccgaggacaactccacacagtggtttcataatgagtccctcatcagctctcaggccagctcttatttcattgatgccgctacagtggacgactccggcgagtatcggtgtcagaccaatctgtctacactgtctgaccccgtgcagcttgaggtccacattggatggttgctcttgcaagccccacgctgggttttcaaagaggaagatccaatccatctgcggtgccacagctggaaaaacaccgctctccacaaagtcacatacctgcaaaatggcaaaggacgcaaatacttccatcacaattccgatttttacattccgaaggctaccctgaaagacagcggcagctatttctgccggggactcgtcggctccaagaatgtgtcctccgaaaccgtgaatatcacgattacccaaggactggctgtgcctacaatctctagcttctttccgcctggataccaagtctccttctgtcttgtgatggtcctcctgtttgctgtggacacaggactgtacttttacgtg

SEQ ID NO: 2202 - DNA, 1074 bp, synthetic construct
  source 1..1074: mol_type = other DNA
atggccttaccagtgaccgccttgctcctgccgctggccttgctgctccacgccgccaggccgcaggtgcagcttgttgaaagcggaggtggcctggttcaacctggcggaagcctgagactgtcctgtgaagccagcggctttaccctggactactacgccatcggctggtttagacaagctcccggcaaagagagagagggcgtcatctgcatcagcagatccgacggcagcacctactatgccgacagcgtgaagggacgcttcaccatctccagagacaatgccaaaaagacggtctacctgcaaatgatctccctcaagcctgaggataccgccgcctactattgtgccgctggcgctgattgcagcggctacctgagagactacgagttcagaggccagggcacacaagtgaccgtcagctctacgcgtggaatgaggactgaggatcttcccaaagctgtcgtctttctcgaaccccaatggtatcgggtgctcgaaaaagactctgtgacactgaaatgccaaggggcctactctcccgaggacaactccacacagtggtttcataatgagtccctcatcagctctcaggccagctcttatttcattgatgccgctacagtggacgactccggcgagtatcggtgtcagaccaatctgtctacactgtctgaccccgtgcagcttgaggtccacattggatggttgctcttgcaagccccacgctgggttttcaaagaggaagatccaatccatctgcggtgccacagctggaaaaacaccgctctccacaaagtcacatacctgcaaaatggcaaaggacgcaaatacttccatcacaattccgatttttacattccgaaggctaccctgaaagacagcggcagctatttctgccggggactcgtcggctccaagaatgtgtcctccgaaaccgtgaatatcacgattacccaaggactggctgtgcctacaatctctagcttctttccgcctggataccaagtctccttctgtcttgtgatggtcctcctgtttgctgtggacacaggactgtacttttacgtg

SEQ ID NO: 2203 - DNA, 1443 bp, synthetic construct
  source 1..1443: mol_type = other DNA
atggccttaccagtgaccgccttgctcctgccgctggccttgctgctccacgccgccaggccggaggtgcaactggttgagtctggcggaggactggttcaggcaggcggatctctgagactgagctgtatcgccaccggcaaggtgttcagcatctacgacatgggctggtacagacaggcccctggcaagcagagagagctggttgccgagatcacaagcagcggcaccacacactacgacgacttcgtgtccggcagattcaccatcagccgggacaacgccaagaacaccgtgtacctccagatgaacaccctgaaggccgaggacaccgccgtgtactactgtagagccaaccacgtgttcggcggcagctattggggacagggaacccaagtgacagtgtctagtgaggtggccgctttggagaaacaggtgcagcttgttgaaagcggaggtggcctggttcaacctggcggaagcctgagactgtcctgtgaagccagcggctttaccctggactactacgccatcggctggtttagacaagctcccggcaaagagagagagggcgtcatctgcatcagcagatccgacggcagcacctactatgccgacagcgtgaagggacgcttcaccatctccagagacaatgccaaaaagacggtctacctgcaaatgatctccctcaagcctgaggataccgccgcctactattgtgccgctggcgctgattgcagcggctacctgagagactacgagttcagaggccagggcacacaagtgaccgtcagctctacgcgtggaatgaggactgaggatcttcccaaagctgtcgtctttctcgaaccccaatggtatcgggtgctcgaaaaagactctgtgacactgaaatgccaaggggcctactctcccgaggacaactccacacagtggtttcataatgagtccctcatcagctctcaggccagctcttatttcattgatgccgctacagtggacgactccggcgagtatcggtgtcagaccaatctgtctacactgtctgaccccgtgcagcttgaggtccacattggatggttgctcttgcaagccccacgctgggttttcaaagaggaagatccaatccatctgcggtgccacagctggaaaaacaccgctctccacaaagtcacatacctgcaaaatggcaaaggacgcaaatacttccatcacaattccgatttttacattccgaaggctaccctgaaagacagcggcagctatttctgccggggactcgtcggctccaagaatgtgtcctccgaaaccgtgaatatcacgattacccaaggactggctgtgcctacaatctctagcttctttccgcctggataccaagtctccttctgtcttgtgatggtcctcctgtttgctgtggacacaggactgtacttttacgtg

SEQ ID NO: 2204 - DNA, 1092 bp, synthetic construct
  source 1..1092: mol_type = other DNA
atggccttaccagtgaccgccttgctcctgccgctggccttgctgctccacgccgccaggccgcaagtgaagctggaagagtctggcggcagactggtgcagcctagaggaagcctgagactgtcttgtgccggcagcggcagaacctttagcacatacggcatggcctggttcagacaggcccctggaaaagagagagagttcgtcgccagcaaggccagcatgaactactccggcaggacctactacgccgacagcgtgaagggcagattcacaatcgccagagacaacgccaagaacatggtgttcctccagatgaacaatctgaagcccgaggacaccgccgtgtactattgtgccgctggcacaggctgtagcacctacggctgtttcgacgcccagatcatcgactactggggcaagggcacactggtcacagtttctagcacgcgtggaatgaggactgaggatcttcccaaagctgtcgtctttctcgaaccccaatggtatcgggtgctcgaaaaagactctgtgacactgaaatgccaaggggcctactctcccgaggacaactccacacagtggtttcataatgagtccctcatcagctctcaggccagctcttatttcattgatgccgctacagtggacgactccggcgagtatcggtgtcagaccaatctgtctacactgtctgaccccgtgcagcttgaggtccacattggatggttgctcttgcaagccccacgctgggttttcaaagaggaagatccaatccatctgcggtgccacagctggaaaaacaccgctctccacaaagtcacatacctgcaaaatggcaaaggacgcaaatacttccatcacaattccgatttttacattccgaaggctaccctgaaagacagcggcagctatttctgccggggactcgtcggctccaagaatgtgtcctccgaaaccgtgaatatcacgattacccaaggactggctgtgcctacaatctctagcttctttccgcctggataccaagtctccttctgtcttgtgatggtcctcctgtttgctgtggacacaggactgtacttttacgtg

SEQ ID NO: 2205 - DNA, 1065 bp, synthetic construct
  source 1..1065: mol_type = other DNA
atggccttaccagtgaccgccttgctcctgccgctggccttgctgctccacgccgccaggccgcaagtcaaactggaagaaagcggtggcggcctggtgcaacctggcgaatctctgagactgagctgtagcgccagcggctccatcttcaaggtgttcagagtgttcgccatgagctggtacaggcaaggccctggcaagcagagagagctggtcgcctctatcagcagcggcgagacaaccacatacgccgactctgtgaaaggccggttcaccatcagccgggataatgccaagaataccgcctatctccagatggactccctgaagcctgaagatacagctgtgtactactgcaacgccgaccataccttcaccggcgatttttggggccagggaacccaagtgaccgtgtctagtacgcgtggaatgaggactgaggatcttcccaaagctgtcgtctttctcgaaccccaatggtatcgggtgctcgaaaaagactctgtgacactgaaatgccaaggggcctactctcccgaggacaactccacacagtggtttcataatgagtccctcatcagctctcaggccagctcttatttcattgatgccgctacagtggacgactccggcgagtatcggtgtcagaccaatctgtctacactgtctgaccccgtgcagcttgaggtccacattggatggttgctcttgcaagccccacgctgggttttcaaagaggaagatccaatccatctgcggtgccacagctggaaaaacaccgctctccacaaagtcacatacctgcaaaatggcaaaggacgcaaatacttccatcacaattccgatttttacattccgaaggctaccctgaaagacagcggcagctatttctgccggggactcgtcggctccaagaatgtgtcctccgaaaccgtgaatatcacgattacccaaggactggctgtgcctacaatctctagcttctttccgcctggataccaagtctccttctgtcttgtgatggtcctcctgtttgctgtggacacaggactgtacttttacgtg

SEQ ID NO: 2206 - DNA, 1470 bp, synthetic construct
  source 1..1470: mol_type = other DNA
atggccttaccagtgaccgccttgctcctgccgctggccttgctgctccacgccgccaggccgcaagtgaagctggaagagtctggcggcagactggtgcagcctagaggaagcctgagactgtcttgtgccggcagcggcagaacctttagcacatacggcatggcctggttcagacaggcccctggaaaagagagagagttcgtcgccagcaaggccagcatgaactactccggcaggacctactacgccgacagcgtgaagggcagattcacaatcgccagagacaacgccaagaacatggtgttcctccagatgaacaatctgaagcccgaggacaccgccgtgtactattgtgccgctggcacaggctgtagcacctacggctgtttcgacgcccagatcatcgactactggggcaagggcacactggtcacagtttctagcgaggtggccgctttggagaaacaagtcaaactggaagaaagcggtggcggcctggtgcaacctggcgaatctctgagactgagctgtagcgccagcggctccatcttcaaggtgttcagagtgttcgccatgagctggtacaggcaaggccctggcaagcagagagagctggtcgcctctatcagcagcggcgagacaaccacatacgccgactctgtgaaaggccggttcaccatcagccgggataatgccaagaataccgcctatctccagatggactccctgaagcctgaagatacagctgtgtactactgcaacgccgaccataccttcaccggcgatttttggggccagggaacccaagtgaccgtgtctagtacgcgtggaatgaggactgaggatcttcccaaagctgtcgtctttctcgaaccccaatggtatcgggtgctcgaaaaagactctgtgacactgaaatgccaaggggcctactctcccgaggacaactccacacagtggtttcataatgagtccctcatcagctctcaggccagctcttatttcattgatgccgctacagtggacgactccggcgagtatcggtgtcagaccaatctgtctacactgtctgaccccgtgcagcttgaggtccacattggatggttgctcttgcaagccccacgctgggttttcaaagaggaagatccaatccatctgcggtgccacagctggaaaaacaccgctctccacaaagtcacatacctgcaaaatggcaaaggacgcaaatacttccatcacaattccgatttttacattccgaaggctaccctgaaagacagcggcagctatttctgccggggactcgtcggctccaagaatgtgtcctccgaaaccgtgaatatcacgattacccaaggactggctgtgcctacaatctctagcttctttccgcctggataccaagtctccttctgtcttgtgatggtcctcctgtttgctgtggacacaggactgtacttttacgtg

SEQ ID NO: 2207 - DNA, 1059 bp, synthetic construct
  source 1..1059: mol_type = other DNA
atggccttaccagtgaccgccttgctcctgccgctggccttgctgctccacgccgccaggccgcaagtgaagctggaagagtctggcggagagctggttcaacctggcggacctctgagactgtcttgtgccgccagcggcaacatcttcagcatcaaccggatgggctggtacagacaggcccctggaaaacagagagccttcgtcgcctctatcaccgtgcggggcatcaccaattacgccgactctgtgaagggcagattcaccatcagcgtggacaagagcaagaacaccatctacctccagatgaacgccctgaagcctgaggacaccgccgtgtactactgcaatgccgtgtccagcaacagggaccccgattattggggccagggcacccaagtgacagtgtctagtacgcgtggaatgaggactgaggatcttcccaaagctgtcgtctttctcgaaccccaatggtatcgggtgctcgaaaaagactctgtgacactgaaatgccaaggggcctactctcccgaggacaactccacacagtggtttcataatgagtccctcatcagctctcaggccagctcttatttcattgatgccgctacagtggacgactccggcgagtatcggtgtcagaccaatctgtctacactgtctgaccccgtgcagcttgaggtccacattggatggttgctcttgcaagccccacgctgggttttcaaagaggaagatccaatccatctgcggtgccacagctggaaaaacaccgctctccacaaagtcacatacctgcaaaatggcaaaggacgcaaatacttccatcacaattccgatttttacattccgaaggctaccctgaaagacagcggcagctatttctgccggggactcgtcggctccaagaatgtgtcctccgaaaccgtgaatatcacgattacccaaggactggctgtgcctacaatctctagcttctttccgcctggataccaagtctccttctgtcttgtgatggtcctcctgtttgctgtggacacaggactgtacttttacgtg

SEQ ID NO: 2208 - DNA, 1095 bp, synthetic construct
  source 1..1095: mol_type = other DNA
atggccttaccagtgaccgccttgctcctgccgctggccttgctgctccacgccgccaggccgcctgttcaactggttgaatctggcggcggactggtgcaggctggcgatagtctcagactgagctgtgccgcctccggcagaacatttggcatcggcacaatgggatggttccggcagcctcctggaaaagaacgcgaatttgtggccgccatcagatggtctacaggcggcaccagatacgccgacagcgtgaaaggccggtttaccatcagcagagacaacgccaagctgaccgtggatctccagatggatagcctgaaaccagaggatacagccgtctattactgcgccgctgacaggctgagcctggatctgtctggcagataccactacaaccctgccgtgtacgactactggggacagggaacacaagtcaccgtgtcctctacgcgtggaatgaggactgaggatcttcccaaagctgtcgtctttctcgaaccccaatggtatcgggtgctcgaaaaagactctgtgacactgaaatgccaaggggcctactctcccgaggacaactccacacagtggtttcataatgagtccctcatcagctctcaggccagctcttatttcattgatgccgctacagtggacgactccggcgagtatcggtgtcagaccaatctgtctacactgtctgaccccgtgcagcttgaggtccacattggatggttgctcttgcaagccccacgctgggttttcaaagaggaagatccaatccatctgcggtgccacagctggaaaaacaccgctctccacaaagtcacatacctgcaaaatggcaaaggacgcaaatacttccatcacaattccgatttttacattccgaaggctaccctgaaagacagcggcagctatttctgccggggactcgtcggctccaagaatgtgtcctccgaaaccgtgaatatcacgattacccaaggactggctgtgcctacaatctctagcttctttccgcctggataccaagtctccttctgtcttgtgatggtcctcctgtttgctgtggacacaggactgtacttttacgtg

SEQ ID NO: 2209 - DNA, 1491 bp, synthetic construct
  source 1..1491: mol_type = other DNA
atggccttaccagtgaccgccttgctcctgccgctggccttgctgctccacgccgccaggccgcaagtgaagctggaagagtctggcggagagctggttcaacctggcggacctctgagactgtcttgtgccgccagcggcaacatcttcagcatcaaccggatgggctggtacagacaggcccctggaaaacagagagccttcgtcgcctctatcaccgtgcggggcatcaccaattacgccgactctgtgaagggcagattcaccatcagcgtggacaagagcaagaacaccatctacctccagatgaacgccctgaagcctgaggacaccgccgtgtactactgcaatgccgtgtccagcaacagggaccccgattattggggccagggcacccaagtgacagtgtctagtggaggcggtggaagtggcggcggtggttcaggcggcggaggatctcctgttcaactggttgaatctggcggcggactggtgcaggctggcgatagtctcagactgagctgtgccgcctccggcagaacatttggcatcggcacaatgggatggttccggcagcctcctggaaaagaacgcgaatttgtggccgccatcagatggtctacaggcggcaccagatacgccgacagcgtgaaaggccggtttaccatcagcagagacaacgccaagctgaccgtggatctccagatggatagcctgaaaccagaggatacagccgtctattactgcgccgctgacaggctgagcctggatctgtctggcagataccactacaaccctgccgtgtacgactactggggacagggaacacaagtcaccgtgtcctctacgcgtggaatgaggactgaggatcttcccaaagctgtcgtctttctcgaaccccaatggtatcgggtgctcgaaaaagactctgtgacactgaaatgccaaggggcctactctcccgaggacaactccacacagtggtttcataatgagtccctcatcagctctcaggccagctcttatttcattgatgccgctacagtggacgactccggcgagtatcggtgtcagaccaatctgtctacactgtctgaccccgtgcagcttgaggtccacattggatggttgctcttgcaagccccacgctgggttttcaaagaggaagatccaatccatctgcggtgccacagctggaaaaacaccgctctccacaaagtcacatacctgcaaaatggcaaaggacgcaaatacttccatcacaattccgatttttacattccgaaggctaccctgaaagacagcggcagctatttctgccggggactcgtcggctccaagaatgtgtcctccgaaaccgtgaatatcacgattacccaaggactggctgtgcctacaatctctagcttctttccgcctggataccaagtctccttctgtcttgtgatggtcctcctgtttgctgtggacacaggactgtacttttacgtg

SEQ ID NO: 2210 - DNA, 1065 bp, synthetic construct
  source 1..1065: mol_type = other DNA
atggccttaccagtgaccgccttgctcctgccgctggccttgctgctccacgccgccaggccggccgtgcaactggttgaatctggcggaggactggtgcaggctggcgattctctgagactgacctgtacagccagcggcagagccttcagcacctacttcatggcctggttcagacaggcccctggcaaagagagagagttcgtcgccggaatcgcttggagcggaggctctacagcctacgccgattctgtgaagggcagattcaccatcagccgggacaacgccaagaacaccgtgtacctccagatgaacagcctgaagtccgaggacaccgccgtgtactactgtgccagcagaggcatcgaggtggaagagtttggagcctggggccagggaacccaagtgacagtttcttctacgcgtggaatgaggactgaggatcttcccaaagctgtcgtctttctcgaaccccaatggtatcgggtgctcgaaaaagactctgtgacactgaaatgccaaggggcctactctcccgaggacaactccacacagtggtttcataatgagtccctcatcagctctcaggccagctcttatttcattgatgccgctacagtggacgactccggcgagtatcggtgtcagaccaatctgtctacactgtctgaccccgtgcagcttgaggtccacattggatggttgctcttgcaagccccacgctgggttttcaaagaggaagatccaatccatctgcggtgccacagctggaaaaacaccgctctccacaaagtcacatacctgcaaaatggcaaaggacgcaaatacttccatcacaattccgatttttacattccgaaggctaccctgaaagacagcggcagctatttctgccggggactcgtcggctccaagaatgtgtcctccgaaaccgtgaatatcacgattacccaaggactggctgtgcctacaatctctagcttctttccgcctggataccaagtctccttctgtcttgtgatggtcctcctgtttgctgtggacacaggactgtacttttacgtg

SEQ ID NO: 2211 - DNA, 1068 bp, synthetic construct
  source 1..1068: mol_type = other DNA
atggccttaccagtgaccgccttgctcctgccgctggccttgctgctccacgccgccaggccgcaggttcaactggtggaaagtggcggtggcttggtgcaagcaggcggctctcttagactgtcttgtgctgcctctggcggcaccctgagcaagaataccgtggcatggtttaggcaggctcccggaaaagagcggggctttgtcgccagcatcacctgggatggcagaaccacctactacgccgacagcgtgaaaggccggttcaccatctccagagataatgccaagaatacggtctacttgcaaatgaactccctgaagcctgaagatacagccgtgtacgtgtgcgccgatctcggcaaatggcctgctggacctgccgattattggggacagggcacacaagtcaccgtgtcctctacgcgtggaatgaggactgaggatcttcccaaagctgtcgtctttctcgaaccccaatggtatcgggtgctcgaaaaagactctgtgacactgaaatgccaaggggcctactctcccgaggacaactccacacagtggtttcataatgagtccctcatcagctctcaggccagctcttatttcattgatgccgctacagtggacgactccggcgagtatcggtgtcagaccaatctgtctacactgtctgaccccgtgcagcttgaggtccacattggatggttgctcttgcaagccccacgctgggttttcaaagaggaagatccaatccatctgcggtgccacagctggaaaaacaccgctctccacaaagtcacatacctgcaaaatggcaaaggacgcaaatacttccatcacaattccgatttttacattccgaaggctaccctgaaagacagcggcagctatttctgccggggactcgtcggctccaagaatgtgtcctccgaaaccgtgaatatcacgattacccaaggactggctgtgcctacaatctctagcttctttccgcctggataccaagtctccttctgtcttgtgatggtcctcctgtttgctgtggacacaggactgtacttttacgtg

SEQ ID NO: 2212 - DNA, 1080 bp, synthetic construct
  source 1..1080: mol_type = other DNA
atggccttaccagtgaccgccttgctcctgccgctggccttgctgctccacgccgccaggccgggctctgacctgggcatcaagctgctgttcgccgctgccaagggccaggacgacgaagtgcggattctgctggctgctggggccgacgtgaacgccaaggatttcgagggctacacccccctgcacgtggccgcctatgatggacacctggaaatcgtggaagtgctgctgaaggctggcgctgatgtgaatgccaaagacagccagggccggacccctctgcatgaagccgcctacagcggccatctggaaattgtggaagtgctgctgaaagccggggcagacgtgaacgctcaggacgacgctggcgagacaccagccgatctggctgcagcttggggccacgaagatatcgccgaggtgctgcagaagacgcgtggaatgaggactgaggatcttcccaaagctgtcgtctttctcgaaccccaatggtatcgggtgctcgaaaaagactctgtgacactgaaatgccaaggggcctactctcccgaggacaactccacacagtggtttcataatgagtccctcatcagctctcaggccagctcttatttcattgatgccgctacagtggacgactccggcgagtatcggtgtcagaccaatctgtctacactgtctgaccccgtgcagcttgaggtccacattggatggttgctcttgcaagccccacgctgggttttcaaagaggaagatccaatccatctgcggtgccacagctggaaaaacaccgctctccacaaagtcacatacctgcaaaatggcaaaggacgcaaatacttccatcacaattccgatttttacattccgaaggctaccctgaaagacagcggcagctatttctgccggggactcgtcggctccaagaatgtgtcctccgaaaccgtgaatatcacgattacccaaggactggctgtgcctacaatctctagcttctttccgcctggataccaagtctccttctgtcttgtgatggtcctcctgtttgctgtggacacaggactgtacttttacgtg

SEQ ID NO: 2213 - DNA, 1086 bp, synthetic construct
  source 1..1086: mol_type = other DNA
atggccttaccagtgaccgccttgctcctgccgctggccttgctgctccacgccgccaggccgagaagcgatctgggaaagaagctgctggaagctgccagagccggacaggatgatgaagtgcgcatcctgatggcaaacggcgcagatgtgaacgcaaaggacgagtacggcctgacccccctgtacctggctacagcccacgggcacctggaaattgtggaagtgctgctgaagaacggcgctgacgtgaacgccgtggacgccatcggctttaccccactgcatctggccgctttcatcgggcatctcgaaatcgcagaggtgctgctgaaacacggggccgatgtgaatgcccaggacaagttcggcaagaccgccttcgacatcagcatcggcaacggcaacgaggacctggccgagatcctgcagaaactgaacacgcgtggaatgaggactgaggatcttcccaaagctgtcgtctttctcgaaccccaatggtatcgggtgctcgaaaaagactctgtgacactgaaatgccaaggggcctactctcccgaggacaactccacacagtggtttcataatgagtccctcatcagctctcaggccagctcttatttcattgatgccgctacagtggacgactccggcgagtatcggtgtcagaccaatctgtctacactgtctgaccccgtgcagcttgaggtccacattggatggttgctcttgcaagccccacgctgggttttcaaagaggaagatccaatccatctgcggtgccacagctggaaaaacaccgctctccacaaagtcacatacctgcaaaatggcaaaggacgcaaatacttccatcacaattccgatttttacattccgaaggctaccctgaaagacagcggcagctatttctgccggggactcgtcggctccaagaatgtgtcctccgaaaccgtgaatatcacgattacccaaggactggctgtgcctacaatctctagcttctttccgcctggataccaagtctccttctgtcttgtgatggtcctcctgtttgctgtggacacaggactgtacttttacgtg

SEQ ID NO: 2214 - DNA, 882 bp, synthetic construct
  source 1..882: mol_type = other DNA
atggccttaccagtgaccgccttgctcctgccgctggccttgctgctccacgccgccaggccggtggacaacaagttcaacaaagagcggtacagcgcctactacgagatttggcaactgcccaacctgaacgtgcggcagaaggccgccttcatcggatctctgcaggacgaccctagccagagcgccaatctgctggccgaggccaagaagctgaacgacgcccaggcccctaaaacgcgtggaatgaggactgaggatcttcccaaagctgtcgtctttctcgaaccccaatggtatcgggtgctcgaaaaagactctgtgacactgaaatgccaaggggcctactctcccgaggacaactccacacagtggtttcataatgagtccctcatcagctctcaggccagctcttatttcattgatgccgctacagtggacgactccggcgagtatcggtgtcagaccaatctgtctacactgtctgaccccgtgcagcttgaggtccacattggatggttgctcttgcaagccccacgctgggttttcaaagaggaagatccaatccatctgcggtgccacagctggaaaaacaccgctctccacaaagtcacatacctgcaaaatggcaaaggacgcaaatacttccatcacaattccgatttttacattccgaaggctaccctgaaagacagcggcagctatttctgccggggactcgtcggctccaagaatgtgtcctccgaaaccgtgaatatcacgattacccaaggactggctgtgcctacaatctctagcttctttccgcctggataccaagtctccttctgtcttgtgatggtcctcctgtttgctgtggacacaggactgtacttttacgtg

SEQ ID NO: 2215 - DNA, 861 bp, synthetic construct
  source 1..861: mol_type = other DNA
atggccttaccagtgaccgccttgctcctgccgctggccttgctgctccacgccgccaggccgtacgccaaagagatgcggaacgcctactgggagatcgccctgctgcccaatctgaccaaccagcagaagagagcccccatcagaaagctgtacgacgacccctcccagagcagcgagctgctgtctgaggctaaaaaactgaacgatagccagacgcgtggaatgaggactgaggatcttcccaaagctgtcgtctttctcgaaccccaatggtatcgggtgctcgaaaaagactctgtgacactgaaatgccaaggggcctactctcccgaggacaactccacacagtggtttcataatgagtccctcatcagctctcaggccagctcttatttcattgatgccgctacagtggacgactccggcgagtatcggtgtcagaccaatctgtctacactgtctgaccccgtgcagcttgaggtccacattggatggttgctcttgcaagccccacgctgggttttcaaagaggaagatccaatccatctgcggtgccacagctggaaaaacaccgctctccacaaagtcacatacctgcaaaatggcaaaggacgcaaatacttccatcacaattccgatttttacattccgaaggctaccctgaaagacagcggcagctatttctgccggggactcgtcggctccaagaatgtgtcctccgaaaccgtgaatatcacgattacccaaggactggctgtgcctacaatctctagcttctttccgcctggataccaagtctccttctgtcttgtgatggtcctcctgtttgctgtggacacaggactgtacttttacgtg

SEQ ID NO: 2216 - DNA, 861 bp, synthetic construct
  source 1..861: mol_type = other DNA
atggccttaccagtgaccgccttgctcctgccgctggccttgctgctccacgccgccaggccgtatgccaaagaaatgtggattgcctgggaggaaatccgcaacctgcctaatctgaatggctggcagatgaccgcctttatcgctaagctgctggatgaccccagccagtcctctgagctgctgagcgaagcaaagaaactgaatgactcccagacgcgtggaatgaggactgaggatcttcccaaagctgtcgtctttctcgaaccccaatggtatcgggtgctcgaaaaagactctgtgacactgaaatgccaaggggcctactctcccgaggacaactccacacagtggtttcataatgagtccctcatcagctctcaggccagctcttatttcattgatgccgctacagtggacgactccggcgagtatcggtgtcagaccaatctgtctacactgtctgaccccgtgcagcttgaggtccacattggatggttgctcttgcaagccccacgctgggttttcaaagaggaagatccaatccatctgcggtgccacagctggaaaaacaccgctctccacaaagtcacatacctgcaaaatggcaaaggacgcaaatacttccatcacaattccgatttttacattccgaaggctaccctgaaagacagcggcagctatttctgccggggactcgtcggctccaagaatgtgtcctccgaaaccgtgaatatcacgattacccaaggactggctgtgcctacaatctctagcttctttccgcctggataccaagtctccttctgtcttgtgatggtcctcctgtttgctgtggacacaggactgtacttttacgtg

SEQ ID NO: 2217 - DNA, 975 bp, synthetic construct
  source 1..975: mol_type = other DNA
atggccttaccagtgaccgccttgctcctgccgctggccttgctgctccacgccgccaggccgctgccagccccgaagaatttggtcgtttcccgtgtcactgaggactctgcacgtctgagctggaccgcaccggacgcggcgttcgacagctttgcaatcggctactgggagtgggatgatgacggcgaggccattgtgctgaccgttccgggtagcgagcgcagctacgatctgaccggtctgaagccgggtacggaatatccggtgtatattgcgggcgtgaagggtggccagtggagcttcccgctgagcgcgatctttaccaccacgcgtggaatgaggactgaggatcttcccaaagctgtcgtctttctcgaaccccaatggtatcgggtgctcgaaaaagactctgtgacactgaaatgccaaggggcctactctcccgaggacaactccacacagtggtttcataatgagtccctcatcagctctcaggccagctcttatttcattgatgccgctacagtggacgactccggcgagtatcggtgtcagaccaatctgtctacactgtctgaccccgtgcagcttgaggtccacattggatggttgctcttgcaagccccacgctgggttttcaaagaggaagatccaatccatctgcggtgccacagctggaaaaacaccgctctccacaaagtcacatacctgcaaaatggcaaaggacgcaaatacttccatcacaattccgatttttacattccgaaggctaccctgaaagacagcggcagctatttctgccggggactcgtcggctccaagaatgtgtcctccgaaaccgtgaatatcacgattacccaaggactggctgtgcctacaatctctagcttctttccgcctggataccaagtctccttctgtcttgtgatggtcctcctgtttgctgtggacacaggactgtacttttacgtg

SEQ ID NO: 2218 - DNA, 981 bp, synthetic construct
  source 1..981: mol_type = other DNA
atggccttaccagtgaccgccttgctcctgccgctggccttgctgctccacgccgccaggccgctgccggctccgaaaaacctggtcgtttcccgtgtcactgaagattctgcacgcttgagctgggcgatcgacgagcagcgtgactggtttgagagcttcctgattcagtatcaagaatcggaaaaagttggcgaggccatcgtgctgaccgttccgggtagcgagcgcagctatgatctgacgggtctgaagccaggcaccgagtatacggtgagcatttacggtgtctaccatgtgtaccgtagcaatccgctgagcgcgatcttcaccaccacgcgtggaatgaggactgaggatcttcccaaagctgtcgtctttctcgaaccccaatggtatcgggtgctcgaaaaagactctgtgacactgaaatgccaaggggcctactctcccgaggacaactccacacagtggtttcataatgagtccctcatcagctctcaggccagctcttatttcattgatgccgctacagtggacgactccggcgagtatcggtgtcagaccaatctgtctacactgtctgaccccgtgcagcttgaggtccacattggatggttgctcttgcaagccccacgctgggttttcaaagaggaagatccaatccatctgcggtgccacagctggaaaaacaccgctctccacaaagtcacatacctgcaaaatggcaaaggacgcaaatacttccatcacaattccgatttttacattccgaaggctaccctgaaagacagcggcagctatttctgccggggactcgtcggctccaagaatgtgtcctccgaaaccgtgaatatcacgattacccaaggactggctgtgcctacaatctctagcttctttccgcctggataccaagtctccttctgtcttgtgatggtcctcctgtttgctgtggacacaggactgtacttttacgtg

SEQ ID NO: 2219 - DNA, 975 bp, synthetic construct
  source 1..975: mol_type = other DNA
atggccttaccagtgaccgccttgctcctgccgctggccttgctgctccacgccgccaggccgctgccagccccgaaaaacttagttgtctcccgcgtgaccgaagattctgctcgtctgagctggactgcaccggacgcggcgttcgacagctttccgattggctactgggagtgggatgatgacggtgaagcgatcgtgctgaccgttccgggtagcgagcgtagctatgacctgacgggtttgaaacctggtaccgagtatcacgtttacattgcgggcgtcaagggtggccagtggtcgttcccgctgagcgcaatctttacgaccacgcgtggaatgaggactgaggatcttcccaaagctgtcgtctttctcgaaccccaatggtatcgggtgctcgaaaaagactctgtgacactgaaatgccaaggggcctactctcccgaggacaactccacacagtggtttcataatgagtccctcatcagctctcaggccagctcttatttcattgatgccgctacagtggacgactccggcgagtatcggtgtcagaccaatctgtctacactgtctgaccccgtgcagcttgaggtccacattggatggttgctcttgcaagccccacgctgggttttcaaagaggaagatccaatccatctgcggtgccacagctggaaaaacaccgctctccacaaagtcacatacctgcaaaatggcaaaggacgcaaatacttccatcacaattccgatttttacattccgaaggctaccctgaaagacagcggcagctatttctgccggggactcgtcggctccaagaatgtgtcctccgaaaccgtgaatatcacgattacccaaggactggctgtgcctacaatctctagcttctttccgcctggataccaagtctccttctgtcttgtgatggtcctcctgtttgctgtggacacaggactgtacttttacgtg

SEQ ID NO: 2220 - DNA, 990 bp, synthetic construct
  source 1..990: mol_type = other DNA
atggccttaccagtgaccgccttgctcctgccgctggccttgctgctccacgccgccaggccgctgcccgctcctaagaatctggtggtgtccgaagtgaccgaggacagcgctagactgagctgggatgatccctgggccttctacgagagcttcctgatccagtaccaagagagcgagaaagtcggcgaggccatcgtgcttacagtgcctggaagcgagagaagctacgacctgacaggcctgaagcctggcaccgagtacaccgtgtctatctacggcgtgcacaacgtgtacaaggacaccaacatgcggggcctgcctctgagcgccatctttacaacaacgcgtggaatgaggactgaggatcttcccaaagctgtcgtctttctcgaaccccaatggtatcgggtgctcgaaaaagactctgtgacactgaaatgccaaggggcctactctcccgaggacaactccacacagtggtttcataatgagtccctcatcagctctcaggccagctcttatttcattgatgccgctacagtggacgactccggcgagtatcggtgtcagaccaatctgtctacactgtctgaccccgtgcagcttgaggtccacattggatggttgctcttgcaagccccacgctgggttttcaaagaggaagatccaatccatctgcggtgccacagctggaaaaacaccgctctccacaaagtcacatacctgcaaaatggcaaaggacgcaaatacttccatcacaattccgatttttacattccgaaggctaccctgaaagacagcggcagctatttctgccggggactcgtcggctccaagaatgtgtcctccgaaaccgtgaatatcacgattacccaaggactggctgtgcctacaatctctagcttctttccgcctggataccaagtctccttctgtcttgtgatggtcctcctgtttgctgtggacacaggactgtacttttacgtg

SEQ ID NO: 2221 - DNA, 975 bp, synthetic construct
  source 1..975: mol_type = other DNA
atggccttaccagtgaccgccttgctcctgccgctggccttgctgctccacgccgccaggccgttgcctgctccaaaaaacctggtcgtcagcagagtgacagaggactccgccagactgtcttggacagcccctgatgccgccttcgacagcttctggatcagatacttcgagttcctcggcagcggagaagccattgtgctgaccgttccaggcagcgagagatcctatgatctgaccggactgaagcccggaacagagtatgtggtcaacatcatgggcgtgaaaggcggcaagatcagccctcctctgtccgccattttcaccaccacgcgtggaatgaggactgaggatcttcccaaagctgtcgtctttctcgaaccccaatggtatcgggtgctcgaaaaagactctgtgacactgaaatgccaaggggcctactctcccgaggacaactccacacagtggtttcataatgagtccctcatcagctctcaggccagctcttatttcattgatgccgctacagtggacgactccggcgagtatcggtgtcagaccaatctgtctacactgtctgaccccgtgcagcttgaggtccacattggatggttgctcttgcaagccccacgctgggttttcaaagaggaagatccaatccatctgcggtgccacagctggaaaaacaccgctctccacaaagtcacatacctgcaaaatggcaaaggacgcaaatacttccatcacaattccgatttttacattccgaaggctaccctgaaagacagcggcagctatttctgccggggactcgtcggctccaagaatgtgtcctccgaaaccgtgaatatcacgattacccaaggactggctgtgcctacaatctctagcttctttccgcctggataccaagtctccttctgtcttgtgatggtcctcctgtttgctgtggacacaggactgtacttttacgtg

SEQ ID NO: 2222 - DNA, 1287 bp, synthetic construct
  source 1..1287: mol_type = other DNA
atggccttaccagtgaccgccttgctcctgccgctggccttgctgctccacgccgccaggccgctgcccgctcctaagaatctggtggtgtccgaagtgaccgaggacagcgctagactgagctgggatgatccctgggccttctacgagagcttcctgatccagtaccaagagagcgagaaagtcggcgaggccatcgtgcttacagtgcctggaagcgagagaagctacgacctgacaggcctgaagcctggcaccgagtacaccgtgtctatctacggcgtgcacaacgtgtacaaggacaccaacatgcggggcctgcctctgagcgccatctttacaacagctcccgctcctgctccagcaccagctccattgcctgctccaaaaaacctggtcgtcagcagagtgacagaggactccgccagactgtcttggacagcccctgatgccgccttcgacagcttctggatcagatacttcgagttcctcggcagcggagaagccattgtgctgaccgttccaggcagcgagagatcctatgatctgaccggactgaagcccggaacagagtatgtggtcaacatcatgggcgtgaaaggcggcaagatcagccctcctctgtccgccattttcaccaccacgcgtggaatgaggactgaggatcttcccaaagctgtcgtctttctcgaaccccaatggtatcgggtgctcgaaaaagactctgtgacactgaaatgccaaggggcctactctcccgaggacaactccacacagtggtttcataatgagtccctcatcagctctcaggccagctcttatttcattgatgccgctacagtggacgactccggcgagtatcggtgtcagaccaatctgtctacactgtctgaccccgtgcagcttgaggtccacattggatggttgctcttgcaagccccacgctgggttttcaaagaggaagatccaatccatctgcggtgccacagctggaaaaacaccgctctccacaaagtcacatacctgcaaaatggcaaaggacgcaaatacttccatcacaattccgatttttacattccgaaggctaccctgaaagacagcggcagctatttctgccggggactcgtcggctccaagaatgtgtcctccgaaaccgtgaatatcacgattacccaaggactggctgtgcctacaatctctagcttctttccgcctggataccaagtctccttctgtcttgtgatggtcctcctgtttgctgtggacacaggactgtacttttacgtg

SEQ ID NO: 2223 - DNA, 978 bp, synthetic construct
  source 1..978: mol_type = other DNA
atggccttaccagtgaccgccttgctcctgccgctggccttgctgctccacgccgccaggccgatgctgcccgctcctaagaatctggtggtgtccagaatcaccgaggacagcgccagactgtcttggacagctcctgatgccgccttcgacagcttccccatccggtacatcgagacactgatctggggcgaagccatctggctggatgtgcctggaagcgagagaagctacgacctgaccggactgaagcctggcacagagtatgccgtggtcatcaccggcgtgaaaggcggcagattctctagccctctggtggcctctttcaccaccacgcgtggaatgaggactgaggatcttcccaaagctgtcgtctttctcgaaccccaatggtatcgggtgctcgaaaaagactctgtgacactgaaatgccaaggggcctactctcccgaggacaactccacacagtggtttcataatgagtccctcatcagctctcaggccagctcttatttcattgatgccgctacagtggacgactccggcgagtatcggtgtcagaccaatctgtctacactgtctgaccccgtgcagcttgaggtccacattggatggttgctcttgcaagccccacgctgggttttcaaagaggaagatccaatccatctgcggtgccacagctggaaaaacaccgctctccacaaagtcacatacctgcaaaatggcaaaggacgcaaatacttccatcacaattccgatttttacattccgaaggctaccctgaaagacagcggcagctatttctgccggggactcgtcggctccaagaatgtgtcctccgaaaccgtgaatatcacgattacccaaggactggctgtgcctacaatctctagcttctttccgcctggataccaagtctccttctgtcttgtgatggtcctcctgtttgctgtggacacaggactgtacttttacgtg

SEQ ID NO: 2224 - DNA, 2406 bp, synthetic construct
  source 1..2406: mol_type = other DNA
atggccttaccagtgaccgccttgctcctgccgctggccttgctgctccacgccgccaggccggagtgggtcaagttcgccaagccttgcagagaaggcgaggacaacagcaagcggaaccctatcgccaagatcaccagcgactaccaggccacacagaagatcacctaccggatctctggcgtgggcatcgaccagcctccattcggcatcttcgtggtggacaagaacaccggcgacatcaacatcaccgccatcgtggacagagaggaaacccctagcttcctgattacctgtagagccctgaacgcccagggcctcgatgtggaaaagcctctgatcctgaccgtgaagatcctggacatcaacgacaaccctccagtgttcagccagcagattttcatgggcgagatcgaggaaaacagcgccagcaacagcctggtcatgatcctgaatgccaccgacgccgacgagcccaaccacctgaatagcaagatcgccttcaagatcgtgtcccaagagcctgccggcacacccatgtttctgctgtccagaaataccggcgaagtgcggaccctgaccaatagcctggatagagagcaggccagcagctacagactggtggtgtctggcgctgacaaggatggcgagggactgagcacccagtgcgagtgcaacatcaaagtgaaggacgtgaacgacaacttccccatgttccgggacagccagtatagcgcccggatcgaagagaacatcctgagcagcgagctgctgcggttccaagtgaccgacctggacgaagagtacaccgacaactggctggccgtgtacttcttcaccagcggcaacgaaggcaactggttcgagatccagacagaccccaggaccaacgagggcatcctgaaggttgtgaaggccctggactacgagcagctccagagcgtgaagctgtctatcgccgtgaagaacaaggccgagttccaccagtccgtgatctcccggtacagagtgcagagcacccctgtgaccatccaagtgattaacgtgcgcgagggcattgccttcagacccgccagcaagaccttcaccgtgcagaagggcatcagcagcaagaaactggtggactacatcctgggcacctatcaggccatcgacgaggacacaaacaaagccgcctccaacgtgaaatacgtgatgggcagaaacgacggcggctacctgatgatcgactccaagaccgccgagatcaagttcgtgaagaatatgaaccgggactccaccttcatcgtgaacaagaccatcacagccgaggtgctggctatcgacgagtataccggcaagaccagcaccggcacagtgtatgtgcgggtgcccgacttcaacgataactgccctacagccgtgctggaaaaggacgccgtgtgtagctctagccctagcgtggtcgtgtccgccagaacactgaacaacagatacacaggcccctacacattcgccctggaagatcagcctgtgaagctgcctgccgtgtggtccatcaccacactgaatgctacaagcgccctgctgagagcccaagagcaaattcctcctggcgtgtaccacatcagcctggtgctgacagacagccagaacaatagatgcgagatgcctcggagcctgacactggaagtgtgccagtgcgacaacagaggcatctgcggcacaagctaccccacaacaagccccggcacaagatacggcagacctcactctggaagaacgcgtggaatgaggactgaggatcttcccaaagctgtcgtctttctcgaaccccaatggtatcgggtgctcgaaaaagactctgtgacactgaaatgccaaggggcctactctcccgaggacaactccacacagtggtttcataatgagtccctcatcagctctcaggccagctcttatttcattgatgccgctacagtggacgactccggcgagtatcggtgtcagaccaatctgtctacactgtctgaccccgtgcagcttgaggtccacattggatggttgctcttgcaagccccacgctgggttttcaaagaggaagatccaatccatctgcggtgccacagctggaaaaacaccgctctccacaaagtcacatacctgcaaaatggcaaaggacgcaaatacttccatcacaattccgatttttacattccgaaggctaccctgaaagacagcggcagctatttctgccggggactcgtcggctccaagaatgtgtcctccgaaaccgtgaatatcacgattacccaaggactggctgtgcctacaatctctagcttctttccgcctggataccaagtctccttctgtcttgtgatggtcctcctgtttgctgtggacacaggactgtacttttacgtg

SEQ ID NO: 2225 - DNA, 1629 bp, synthetic construct
  source 1..1629: mol_type = other DNA
atggccttaccagtgaccgccttgctcctgccgctggccttgctgctccacgccgccaggccgatggccttaccagtgaccgccttgctcctgccgctggccttgctgctccacgccgccaggccgctgttcaatcaagaggtgcagatccctctgaccgagagctactgtggcccctgtcctaagaactggatctgctacaagaacaactgctaccagttcttcgacgagagcaagaattggtacgagagccaggccagctgcatgagccagaatgccagcctgctgaaggtgtacagcaaagaggaccaggacctgctgaaactggtcaagagctaccactggatgggccttgtgcacatccccaccaatggctcttggcagtgggaggacggcagcattctgagccctaacctgctgaccatcatcgagatgcagaagggcgactgcgccctgtacgccagcagctttaagggctacatcgagaattgcagcaccccgaacacctacatctgtatgcagagaaccgttggcggaggcggaagtggaggcggaggatctggcggcggaggctctgacctctttaatcaagaagtccagattccactcaccgaatcctactgcggaccttgtccaaaaaattggatttgttataagaacaactgttatcaattctttgatgagtctaaaaattggtatgagtcccaggcttcctgcatgtctcagaacgcttctctgctgaaagtctactctaaagaagatcaggatctcctgaagctcgtcaagtcttatcattggatggggctcgtccacattcctaccaacggaagctggcaatgggaagatggctccatcctgtctccaaatctgctcacgattattgaaatgcagaaaggggattgtgctctctacgccagctccttcaagggatatattgagaactgtagcacgcccaatacttatatctgtatgcaacggaccgtgacgcgtggaatgaggactgaggatcttcccaaagctgtcgtctttctcgaaccccaatggtatcgggtgctcgaaaaagactctgtgacactgaaatgccaaggggcctactctcccgaggacaactccacacagtggtttcataatgagtccctcatcagctctcaggccagctcttatttcattgatgccgctacagtggacgactccggcgagtatcggtgtcagaccaatctgtctacactgtctgaccccgtgcagcttgaggtccacattggatggttgctcttgcaagccccacgctgggttttcaaagaggaagatccaatccatctgcggtgccacagctggaaaaacaccgctctccacaaagtcacatacctgcaaaatggcaaaggacgcaaatacttccatcacaattccgatttttacattccgaaggctaccctgaaagacagcggcagctatttctgccggggactcgtcggctccaagaatgtgtcctccgaaaccgtgaatatcacgattacccaaggactggctgtgcctacaatctctagcttctttccgcctggataccaagtctccttctgtcttgtgatggtcctcctgtttgctgtggacacaggactgtacttttacgtg

SEQ ID NO: 2226 - DNA, 1269 bp, synthetic construct
  source 1..1269: mol_type = other DNA
atggccttaccagtgaccgccttgctcctgccgctggccttgctgctccacgccgccaggccgatggagctgactgatttgctcctggcggccatgcttcttgcagtggcaagactaactctgtccagccccgtagctcctgcctgtgaccccagactcctaaataaactgctgcgtgactcccacctccttcacagccgactgagtcagtgtcccgacgtggaccctttgtctatccctgttctgctgcctgctgtggactttagcctgggagaatggaaaacccagacggaacagagcaaggcacaggacattctaggggcagtgtcccttctactggagggagtgatggcagcacgaggacagttggaaccctcctgcctctcatccctcctgggacagctttctgggcaggttcgcctcctcttgggggccctgcagggcctcctaggaacccagcttcctctacagggcaggaccacagctcacaaggaccccaatgccctcttcttgagcttgcaacaactgcttcggggaaaggtgcgcttcctgcttctggtagaaggtcccaccctctgtgtcagacggaccctgccaaccacagctgtcccaagcagtacttctacgcgtggaatgaggactgaggatcttcccaaagctgtcgtctttctcgaaccccaatggtatcgggtgctcgaaaaagactctgtgacactgaaatgccaaggggcctactctcccgaggacaactccacacagtggtttcataatgagtccctcatcagctctcaggccagctcttatttcattgatgccgctacagtggacgactccggcgagtatcggtgtcagaccaatctgtctacactgtctgaccccgtgcagcttgaggtccacattggatggttgctcttgcaagccccacgctgggttttcaaagaggaagatccaatccatctgcggtgccacagctggaaaaacaccgctctccacaaagtcacatacctgcaaaatggcaaaggacgcaaatacttccatcacaattccgatttttacattccgaaggctaccctgaaagacagcggcagctatttctgccggggactcgtcggctccaagaatgtgtcctccgaaaccgtgaatatcacgattacccaaggactggctgtgcctacaatctctagcttctttccgcctggataccaagtctccttctgtcttgtgatggtcctcctgtttgctgtggacacaggactgtacttttacgtg

SEQ ID NO: 2227 - DNA, 867 bp, synthetic construct
  source 1..867: mol_type = other DNA
atggccttaccagtgaccgccttgctcctgccgctggccttgctgctccacgccgccaggccgatggaccccgacctggaaatcagagccgccttcctgcggcagagaaacacagccctgagaacagaggtggccgagctggaacaagaggtgcagcggctggaaaacgaggtgtcccagtacgagacaagatacggccctctcggaggcggaaaaacgcgtacgcgtggaatgaggactgaggatcttcccaaagctgtcgtctttctcgaaccccaatggtatcgggtgctcgaaaaagactctgtgacactgaaatgccaaggggcctactctcccgaggacaactccacacagtggtttcataatgagtccctcatcagctctcaggccagctcttatttcattgatgccgctacagtggacgactccggcgagtatcggtgtcagaccaatctgtctacactgtctgaccccgtgcagcttgaggtccacattggatggttgctcttgcaagccccacgctgggttttcaaagaggaagatccaatccatctgcggtgccacagctggaaaaacaccgctctccacaaagtcacatacctgcaaaatggcaaaggacgcaaatacttccatcacaattccgatttttacattccgaaggctaccctgaaagacagcggcagctatttctgccggggactcgtcggctccaagaatgtgtcctccgaaaccgtgaatatcacgattacccaaggactggctgtgcctacaatctctagcttctttccgcctggataccaagtctccttctgtcttgtgatggtcctcctgtttgctgtggacacaggactgtacttttacgtg

SEQ ID NO: 2228 - DNA, 792 bp, synthetic construct
  source 1..792: mol_type = other DNA
atggccttaccagtgaccgccttgctcctgccgctggccttgctgctccacgccgccaggccggaagttgctgccctcgagaaggaggtagcagctttggaaaaagaagtcgcagcccttgagaaagaagttgcggctctggagaagacgcgtggaatgaggactgaggatcttcccaaagctgtcgtctttctcgaaccccaatggtatcgggtgctcgaaaaagactctgtgacactgaaatgccaaggggcctactctcccgaggacaactccacacagtggtttcataatgagtccctcatcagctctcaggccagctcttatttcattgatgccgctacagtggacgactccggcgagtatcggtgtcagaccaatctgtctacactgtctgaccccgtgcagcttgaggtccacattggatggttgctcttgcaagccccacgctgggttttcaaagaggaagatccaatccatctgcggtgccacagctggaaaaacaccgctctccacaaagtcacatacctgcaaaatggcaaaggacgcaaatacttccatcacaattccgatttttacattccgaaggctaccctgaaagacagcggcagctatttctgccggggactcgtcggctccaagaatgtgtcctccgaaaccgtgaatatcacgattacccaaggactggctgtgcctacaatctctagcttctttccgcctggataccaagtctccttctgtcttgtgatggtcctcctgtttgctgtggacacaggactgtacttttacgtg

SEQ ID NO: 2229 - DNA, 1566 bp, synthetic construct
  source 1..1566: mol_type = other DNA
atggccttaccagtgaccgccttgctcctgccgctggccttgctgctccacgccgccaggccgctgttcaatcaagaggtgcagatccctctgaccgagagctactgtggcccctgtcctaagaactggatctgctacaagaacaactgctaccagttcttcgacgagagcaagaattggtacgagagccaggccagctgcatgagccagaatgccagcctgctgaaggtgtacagcaaagaggaccaggacctgctgaaactggtcaagagcgcccactggatgggccttgtgcacatccccaccaatggctcttggcagtgggaggacggcagcattctgagccctaacctgctgaccatcatcgagatgcagaagggcgactgcgccctgtacgccagcagctttaagggcttcatcgagaattgcagcaccccgaacacctacatctgtatgcagagaaccgttggcggaggcggaagtggaggcggaggatctggcggcggaggctctgacctctttaatcaagaagtccagattccactcaccgaatcctactgcggaccttgtccaaaaaattggatttgttataagaacaactgttatcaattctttgatgagtctaaaaattggtatgagtcccaggcttcctgcatgtctcagaacgcttctctgctgaaagtctactctaaagaagatcaggatctcctgaagctcgtcaagtctgcccattggatggggctcgtccacattcctaccaacggaagctggcaatgggaagatggctccatcctgtctccaaatctgctcacgattattgaaatgcagaaaggggattgtgctctctacgccagctccttcaagggatttattgagaactgtagcacgcccaatacttatatctgtatgcaacggaccgtgacgcgtggaatgaggactgaggatcttcccaaagctgtcgtctttctcgaaccccaatggtatcgggtgctcgaaaaagactctgtgacactgaaatgccaaggggcctactctcccgaggacaactccacacagtggtttcataatgagtccctcatcagctctcaggccagctcttatttcattgatgccgctacagtggacgactccggcgagtatcggtgtcagaccaatctgtctacactgtctgaccccgtgcagcttgaggtccacattggatggttgctcttgcaagccccacgctgggttttcaaagaggaagatccaatccatctgcggtgccacagctggaaaaacaccgctctccacaaagtcacatacctgcaaaatggcaaaggacgcaaatacttccatcacaattccgatttttacattccgaaggctaccctgaaagacagcggcagctatttctgccggggactcgtcggctccaagaatgtgtcctccgaaaccgtgaatatcacgattacccaaggactggctgtgcctacaatctctagcttctttccgcctggataccaagtctccttctgtcttgtgatggtcctcctgtttgctgtggacacaggactgtacttttacgtg

SEQ ID NO: 2230 - DNA, 1566 bp, synthetic construct
  source 1..1566: mol_type = other DNA
atggccttaccagtgaccgccttgctcctgccgctggccttgctgctccacgccgccaggccgctgttcaatcaagaggtgcagatccctctgaccgagagctactgtggcccctgtcctaagaactggatctgctacaagaacaactgctaccagttcttcgacgagagcaagaattggtacgagagccaggccagctgcatgagccagaatgccagcctgctgaaggtgtacagcaaagaggaccaggacctgctgaaactggtcaagagcgcccactggatgggccttgtgcacatccccaccaatggctcttggcagtgggaggacggcagcattctgagccctaacctgctgaccatcatcgagatgcagaagggcgactgcgccctgtacgccagcagctttaagggctacatcgagaattgcagcaccccgaacacctacatctgtatgcagagaaccgtttctggcggaggcggctctggaggaggcggaagtggcggcggaggcgacctctttaatcaagaagtccagattccactcaccgaatcctactgcggaccttgtccaaaaaattggatttgttataagaacaactgttatcaattctttgatgagtctaaaaattggtatgagtcccaggcttcctgcatgtctcagaacgcttctctgctgaaagtctactctaaagaagatcaggatctcctgaagctcgtcaagtctgcccattggatggggctcgtccacattcctaccaacggaagctggcaatgggaagatggctccatcctgtctccaaatctgctcacgattattgaaatgcagaaaggggattgtgctctctacgccagctccttcaagggatatattgagaactgtagcacgcccaatacttatatctgtatgcaacggaccgtgacgcgtggaatgaggactgaggatcttcccaaagctgtcgtctttctcgaaccccaatggtatcgggtgctcgaaaaagactctgtgacactgaaatgccaaggggcctactctcccgaggacaactccacacagtggtttcataatgagtccctcatcagctctcaggccagctcttatttcattgatgccgctacagtggacgactccggcgagtatcggtgtcagaccaatctgtctacactgtctgaccccgtgcagcttgaggtccacattggatggttgctcttgcaagccccacgctgggttttcaaagaggaagatccaatccatctgcggtgccacagctggaaaaacaccgctctccacaaagtcacatacctgcaaaatggcaaaggacgcaaatacttccatcacaattccgatttttacattccgaaggctaccctgaaagacagcggcagctatttctgccggggactcgtcggctccaagaatgtgtcctccgaaaccgtgaatatcacgattacccaaggactggctgtgcctacaatctctagcttctttccgcctggataccaagtctccttctgtcttgtgatggtcctcctgtttgctgtggacacaggactgtacttttacgtg

SEQ ID NO: 2231 - DNA, 2124 bp, synthetic construct
  source 1..2124: mol_type = other DNA
atggccttaccagtgaccgccttgctcctgccgctggccttgctgctccacgccgccaggccggacatccagatgacacagagccctagcagcctgtctgccagcgtgggagacagagtgaccatcacatgcaaggccagccaggatgtgggcacagccgtggattggtatcagcagaagcctggcaaggcccctaagctgctgatctactgggccagcacaagacacacaggcgtgcccagcagattttctggcagcggctctggcaccgacttcaccctgacaatatccagcctccagcctgaggacttcgccacctactactgccagcagtacaacagctaccctctgaccttcggccagggcaccaaggtggaaatcaaaagactcgaggacctgaagaacgtgttcccacctgaggtggccgtgttcgagcctagcgaggccgagatcagccacacccagaaagccaccctcgtgtgcctggctaccggcttctaccccgaccatgtggaactgtcttggtgggtcaacggcaaagaggtgcacagcggcgtgtctaccgacccccagccactgaaagaacagcccgccctgaacgacagccggtactgcctgagcagcagactgagagtgtccgccaccttctggcagaacccccggaaccacttcagatgccaggtgcagttctacggcctgagcgagaacgacgagtggacccaggacagagccaagcccgtgacccagatcgtgtctgccgaagcctggggcagagccgattgcggatcccagagcttcggcctgctggaccccaagctgtgctacctgctggatggcatcctgttcatctacggcgtgatcctgaccgccctgttcctgagagtgaagttcagcagaagcgccgacgcccctgcctaccagcagggacagaaccaactgtacaacgagctgaacctgggcagacgggaagagtacgacgtgctggacaagcggagaggcagggaccctgagatgggcggaaagccccagcggagaaagaacccccaggaaggactgtataacgaactccagaaagacaagatggccgaagcctacagcgagatcggcatgaagggcgagcggagaagaggcaagggccacgatggcctgtaccagggcctgagcaccgccaccaaggacacctatgacgccctgcacatgcaggccctgcctccaagaagggccaagcgatctggatctggagcaacaaacttctcactactcaaacaagcaggtgacgtggaggagaatcccgggcctactagtatggactggatttggcgcatccttttccttgtcggcgctgctaccggcgcgcattccttcgaagtgcagctggttgaatcaggtggcggcctggttcaacctggcggatctctgagactgagctgtgccgccagcggctacacctttaccgagtacacaatccactgggtccgacaggcccctggcaaaggacttgagtgggtcgccaacatcaaccccaacaatggcggcaccacctacaaccagaagttcgaggacagattcaccatcagccgggacaacagcaagaacaccctgtacctccagatgaactccctgagagccgaggacaccgccgtgtactattgtgccagaggctggaacttcgactactggggccagggaacactggtcaccgttagctctacgcgtatccagaaccctgatcctgccgtgtaccagctgcgggatagcaagagcagcgacaagagcgtgtgtctgttcaccgacttcgacagccagaccaacgtgtcccagagcaaggactccgacgtgtacatcaccgataagaccgtgctggacatgcggagcatggacttcaagagcaactccgccgtggcctggtccaacaagtccgatttcgcctgcgccaacgccttcaacaacagcattatccccgaggacacattcttcccaagccccgagagcagctgcggtaccattacccaaggactggctgtgcctacaatctctagcttctttccgcctggataccaagtctccttctgtcttgtgatggtcctcctgtttgctgtggacacaggactgtacttttacgtg

SEQ ID NO: 2232 - DNA, 1899 bp, synthetic construct
  source 1..1899: mol_type = other DNA
atggccttaccagtgaccgccttgctcctgccgctggccttgctgctccacgccgccaggccggacatccagatgacacagagccctagcagcctgtctgccagcgtgggagacagagtgaccatcacatgcaaggccagccaggatgtgggcacagccgtggattggtatcagcagaagcctggcaaggcccctaagctgctgatctactgggccagcacaagacacacaggcgtgcccagcagattttctggcagcggctctggcaccgacttcaccctgacaatatccagcctccagcctgaggacttcgccacctactactgccagcagtacaacagctaccctctgaccttcggccagggcaccaaggtggaaatcaaaagactcgaggacctgaagaacgtgttcccacctgaggtggccgtgttcgagcctagcgaggccgagatcagccacacccagaaagccaccctcgtgtgcctggctaccggcttctaccccgaccatgtggaactgtcttggtgggtcaacggcaaagaggtgcacagcggcgtgtctaccgacccccagccactgaaagaacagcccgccctgaacgacagccggtactgcctgagcagcagactgagagtgtccgccaccttctggcagaacccccggaaccacttcagatgccaggtgcagttctacggcctgagcgagaacgacgagtggacccaggacagagccaagcccgtgacccagatcgtgtctgccgaagcctggggcagagccgattgcggatccctgggagagcctcagctgtgctatatcctggacgccatcctgtttctgtacggcatcgtgctgaccctgctgtactgccggctgaagatccaagtgcggaaggccgccatcaccagctacgagaaatccgacggcgtgtacaccggcctgagcaccagaaatcaagagacatacgagacactgaagcacgaaaagcctccacaaagggccaagcgatctggatctggagcaacaaacttctcactactcaaacaagcaggtgacgtggaggagaatcccgggcctactagtatggactggatttggcgcatccttttccttgtcggcgctgctaccggcgcgcattccttcgaagtgcagctggttgaatcaggtggcggcctggttcaacctggcggatctctgagactgagctgtgccgccagcggctacacctttaccgagtacacaatccactgggtccgacaggcccctggcaaaggacttgagtgggtcgccaacatcaaccccaacaatggcggcaccacctacaaccagaagttcgaggacagattcaccatcagccgggacaacagcaagaacaccctgtacctccagatgaactccctgagagccgaggacaccgccgtgtactattgtgccagaggctggaacttcgactactggggccagggaacactggtcaccgttagctctacgcgtatccagaaccctgatcctgccgtgtaccagctgcgggatagcaagagcagcgacaagagcgtgtgtctgttcaccgacttcgacagccagaccaacgtgtcccagagcaaggactccgacgtgtacatcaccgataagaccgtgctggacatgcggagcatggacttcaagagcaactccgccgtggcctggtccaacaagtccgatttcgcctgcgccaacgccttcaacaacagcattatccccgaggacacattcttcccaagccccgagagcagctgcggtaccattacccaaggactggctgtgcctacaatctctagcttctttccgcctggataccaagtctccttctgtcttgtgatggtcctcctgtttgctgtggacacaggactgtacttttacgtg

SEQ ID NO: 2233 - DNA, 1827 bp, synthetic construct
  source 1..1827: mol_type = other DNA
atggccttaccagtgaccgccttgctcctgccgctggccttgctgctccacgccgccaggccggacatccagatgacacagagccctagcagcctgtctgccagcgtgggagacagagtgaccatcacatgcaaggccagccaggatgtgggcacagccgtggattggtatcagcagaagcctggcaaggcccctaagctgctgatctactgggccagcacaagacacacaggcgtgcccagcagattttctggcagcggctctggcaccgacttcaccctgacaatatccagcctccagcctgaggacttcgccacctactactgccagcagtacaacagctaccctctgaccttcggccagggcaccaaggtggaaatcaaaagactcgagggacagcctaaggccaatcctaccgtgacactgttccctccaagcagcgaagaactccaggccaacaaggccacacttgtgtgcctgatctccgacttctaccctggggctgtgacagtggcttggaaggccgatggatctcctgtgaaagccggcgtggaaaccaccaagccatccaagcagagcaacaacaaatacgccgccagctcctacctgagcctgacacctgagcagtggaagtcccacagatcctacagctgccaagtgacccacgaaggcagcaccgtggaaaagacagtggcccctacagagtgcagcggatccctgggagagcctcagctgtgctatatcctggacgccatcctgtttctgtacggcatcgtgctgaccctgctgtactgccggctgaagatccaagtgcggaaggccgccatcaccagctacgagaaatccgacggcgtgtacaccggcctgagcaccagaaatcaagagacatacgagacactgaagcacgaaaagcctccacaaagggccaagcgatctggatctggagcaacaaacttctcactactcaaacaagcaggtgacgtggaggagaatcccgggcctactagtatggactggatttggcgcatccttttccttgtcggcgctgctaccggcgcgcattccttcgaagtgcagctggttgaatcaggtggcggcctggttcaacctggcggatctctgagactgagctgtgccgccagcggctacacctttaccgagtacacaatccactgggtccgacaggcccctggcaaaggacttgagtgggtcgccaacatcaaccccaacaatggcggcaccacctacaaccagaagttcgaggacagattcaccatcagccgggacaacagcaagaacaccctgtacctccagatgaactccctgagagccgaggacaccgccgtgtactattgtgccagaggctggaacttcgactactggggccagggaacactggtcaccgttagctctacgcgtatccagaaccctgatcctgccgtgtaccagctgcgggatagcaagagcagcgacaagagcgtgtgtctgttcaccgacttcgacagccagaccaacgtgtcccagagcaaggactccgacgtgtacatcaccgataagaccgtgctggacatgcggagcatggacttcaagagcaactccgccgtggcctggtccaacaagtccgatttcgcctgcgccaacgccttcaacaacagcattatccccgaggacacattcttcccaagccccgagagcagctgcggtaccattacccaaggactggctgtgcctacaatctctagcttctttccgcctggataccaagtctccttctgtcttgtgatggtcctcctgtttgctgtggacacaggactgtacttttacgtg

SEQ ID NO: 2234 - DNA, 1854 bp, synthetic construct
  source 1..1854: mol_type = other DNA
atggccttaccagtgaccgccttgctcctgccgctggccttgctgctccacgccgccaggccggacatccagatgacacagagccctagcagcctgtctgccagcgtgggagacagagtgaccatcacatgcaaggccagccaggatgtgggcacagccgtggattggtatcagcagaagcctggcaaggcccctaagctgctgatctactgggccagcacaagacacacaggcgtgcccagcagattttctggcagcggctctggcaccgacttcaccctgacaatatccagcctccagcctgaggacttcgccacctactactgccagcagtacaacagctaccctctgaccttcggccagggcaccaaggtggaaatcaaaagactcgagggacagcctaaggccaatcctaccgtgacactgttccctccaagcagcgaagaactccaggccaacaaggccacacttgtgtgcctgatctccgacttctaccctggggctgtgacagtggcttggaaggccgatggatctcctgtgaaagccggcgtggaaaccaccaagccatccaagcagagcaacaacaaatacgccgccagctcctacctgagcctgacacctgagcagtggaagtcccacagatcctacagctgccaagtgacccacgaaggcagcaccgtggaaaagacagtggcccctacagagtgcagcggatccctgggagagcctcagctgtgctatatcctggacgccatcctgtttctgtacggcatcgtgctgaccctgctgtactgccggctgaagatccaagtgcggaaggccgccatcaccagctacgagaaatccgacggcgtgtacaccggcctgagcaccagaaatcaagagacatacgagacactgaagcacgaaaagcctccacaaagggccaagcgatctggatctggagcaacaaacttctcactactcaaacaagcaggtgacgtggaggagaatcccgggcctactagtatggactggatttggcgcatccttttccttgtcggcgctgctaccggcgcgcattccttcgaagtgcagctggttgaatcaggtggcggcctggttcaacctggcggatctctgagactgagctgtgccgccagcggctacacctttaccgagtacacaatccactgggtccgacaggcccctggcaaaggacttgagtgggtcgccaacatcaaccccaacaatggcggcaccacctacaaccagaagttcgaggacagattcaccatcagccgggacaacagcaagaacaccctgtacctccagatgaactccctgagagccgaggacaccgccgtgtactattgtgccagaggctggaacttcgactactggggccagggaacactggtcaccgttagctctacgcgtgcctctacaaagggaccctccgtgtttcctctggctcccagcagcaagtctacaagcggaggaacagccgctctgggctgcctggtcaaggattactttcccgagcctgtgaccgtgtcctggaatagcggagcactgacaagcggcgtgcacacctttccagccgtgctgcaaagcagcggcctgtactctctgagcagcgtggtcacagtgcctagctctagcctgggcacccagacctacatctgcaatgtgaaccacaagcctagcaacaccaaggtggacaagagagtggaacccaagagctgtggtaccattacccaaggactggctgtgcctacaatctctagcttctttccgcctggataccaagtctccttctgtcttgtgatggtcctcctgtttgctgtggacacaggactgtacttttacgtg

SEQ ID NO: 2235 - DNA, 33 bp, synthetic construct
  source 1..33: mol_type = other DNA
ggggggggggggggggggggggggggggggggg

SEQ ID NO: 2236 - DNA, 33 bp, synthetic construct; identical to SEQ ID NO: 2235
  source 1..33: mol_type = other DNA

SEQ ID NO: 2237 - DNA, 33 bp, synthetic construct; identical to SEQ ID NO: 2235
  source 1..33: mol_type = other DNA

SEQ ID NO: 2238 - DNA, 33 bp, synthetic construct; identical to SEQ ID NO: 2235
  source 1..33: mol_type = other DNA

SEQ ID NO: 2239 - DNA, 33 bp, synthetic construct; identical to SEQ ID NO: 2235
  source 1..33: mol_type = other DNA

SEQ ID NO: 2240 - DNA, 33 bp, synthetic construct; identical to SEQ ID NO: 2235
  source 1..33: mol_type = other DNA

SEQ ID NO: 2241 - DNA, 2388 bp, synthetic construct
  source 1..2388: mol_type = other DNA
atggccttaccagtgaccgccttgctcctgccgctggccttgctgctccacgccgccaggccgaatgctggcgtgacccagacacctaagttccaggtgctgaaaaccggccagagcatgaccctgcaatgcgcccaggacatgaaccatgagtacatgagctggtacagacaggaccccggcatgggcctgagactgatccactactctgtggctatccagaccaccgaccagggcgaagtgcccaatggctacaacgtgtccagaagcaccatcgaggacttcccactgagactgctgtctgccgctcctagccagaccagcgtgtacttttgtgccagcagctacctgggcaacaccggcgagctgttttttggcgagggcagcagactgaccgtgggacagcctaaggccaatcctaccgtgacactgttccctccaagcagcgaagaactccaggccaacaaggccacacttgtgtgcctgatctccgacttctaccctggggctgtgacagtggcttggaaggccgatggatctcctgtgaaagccggcgtggaaaccaccaagccatccaagcagagcaacaacaaatacgccgccagctcctacctgagcctgacacctgagcagtggaagtcccacagatcctacagctgccaagtgacccacgaaggcagcaccgtggaaaagacagtggcccctacagagtgcagcggatcccagagcttcggcctgctggaccccaagctgtgctacctgctggatggcatcctgttcatctacggcgtgatcctgaccgccctgttcctgagagtgaagttcagcagaagcgccgacgcccctgcctaccagcagggacagaaccaactgtacaacgagctgaacctgggcagacgggaagagtacgacgtgctggacaagcggagaggcagggaccctgagatgggcggaaagccccagcggagaaagaacccccaggaaggactgtataacgaactccagaaagacaagatggccgaagcctacagcgagatcggcatgaagggcgagcggagaagaggcaagggccacgatggcctgtaccagggcctgagcaccgccaccaaggacacctatgacgccctgcacatgcaggccctgcctccaagaagggccaagcgatctggatctggagcaacaaacttctcactactcaaacaagcaggtgacgtggaggagaatcccgggcctactagtatggactggatttggcgcatccttttccttgtcggcgctgctaccggcgcgcattccttcgaacaagaagtgacacagatccctgccgctctgtctgtgcctgagggcgaaaacctggtgctgaactgctccttcaccgacagcgccatctacaacctccagtggttcaggcaggaccctggaaagggactgacaagcctgctgctgatccagagcagccagagagagcagacctccggcagactgaatgccagcctggataagagcagcggcaggtctaccctgtatatcgccgcttctcagcctggcgatagcgccacatatctgtgtgctgtgcggcctacaagcggcggcagctacatccctacatttggcagaggcaccagcctgatcgtgcacccttatgcctctacaaagggaccctccgtgtttcctctggctcccagcagcaagtctacaagcggaggaacagccgctctgggctgcctggtcaaggattactttcccgagcctgtgaccgtgtcctggaatagcggagcactgacaagcggcgtgcacacctttccagccgtgctgcaaagcagcggcctgtactctctgagcagcgtggtcacagtgcctagctctagcctgggcacccagacctacatctgcaatgtgaaccacaagcctagcaacaccaaggtggacaagagagtggaacccaagagctgtggtacccagagttttgggttgttggaccctaaattgtgctatctgttggacggaatcctgttcatttacggagtgatcctgaccgcattgttcctgcgggttaagttttccagatccgcagacgcacccgcttaccaacaagggcagaaccaactctacaatgaacttaatttggggcggagggaagagtacgacgttctggacaaaaggaggggacgagatcccgagatgggcggaaagcctcagcgaaggaagaatccgcaagaggggctttataacgaactccagaaagataaaatggcagaagcctatagtgagattgggatgaagggagaaaggaggaggggtaaaggtcacgatgggttgtaccaaggattgagcacagccactaaagatacctatgatgcgctccacatgcaggccctgccgccaaga

SEQ ID NO: 2242 - DNA, 1686 bp, synthetic construct
  source 1..1686: mol_type = other DNA
atggccttaccagtgaccgccttgctcctgccgctggccttgctgctccacgccgccaggccgaatgctggcgtgacccagacacctaagttccaggtgctgaaaaccggccagagcatgaccctgcaatgcgcccaggacatgaaccatgagtacatgagctggtacagacaggaccccggcatgggcctgagactgatccactactctgtggctatccagaccaccgaccagggcgaagtgcccaatggctacaacgtgtccagaagcaccatcgaggacttcccactgagactgctgtctgccgctcctagccagaccagcgtgtacttttgtgccagcagctacctgggcaacaccggcgagctgttttttggcgagggcagcagactgaccgtgctcgagcagagcttcggcctgctggaccccaagctgtgctacctgctggatggcatcctgttcatctacggcgtgatcctgaccgccctgttcctgagagtgaagttcagcagaagcgccgacgcccctgcctaccagcagggacagaaccaactgtacaacgagctgaacctgggcagacgggaagagtacgacgtgctggacaagcggagaggcagggaccctgagatgggcggaaagccccagcggagaaagaacccccaggaaggactgtataacgaactccagaaagacaagatggccgaagcctacagcgagatcggcatgaagggcgagcggagaagaggcaagggccacgatggcctgtaccagggcctgagcaccgccaccaaggacacctatgacgccctgcacatgcaggccctgcctccaagaagggccaagcgatctggatctggagcaacaaacttctcactactcaaacaagcaggtgacgtggaggagaatcccgggcctactagtatggactggatttggcgcatccttttccttgtcggcgctgctaccggcgcgcattccttcgaacaagaagtgacacagatccctgccgctctgtctgtgcctgagggcgaaaacctggtgctgaactgctccttcaccgacagcgccatctacaacctccagtggttcaggcaggaccctggaaagggactgacaagcctgctgctgatccagagcagccagagagagcagacctccggcagactgaatgccagcctggataagagcagcggcaggtctaccctgtatatcgccgcttctcagcctggcgatagcgccacatatctgtgtgctgtgcggcctacaagcggcggcagctacatccctacatttggcagaggcaccagcctgatcgtgcacccttatacgcgtcagagttttgggttgttggaccctaaattgtgctatctgttggacggaatcctgttcatttacggagtgatcctgaccgcattgttcctgcgggttaagttttccagatccgcagacgcacccgcttaccaacaagggcagaaccaactctacaatgaacttaatttggggcggagggaagagtacgacgttctggacaaaaggaggggacgagatcccgagatgggcggaaagcctcagcgaaggaagaatccgcaagaggggctttataacgaactccagaaagataaaatggcagaagcctatagtgagattgggatgaagggagaaaggaggaggggtaaaggtcacgat

SEQ ID NO: 2243 - DNA, 2838 bp, synthetic construct
  source 1..2838: mol_type = other DNA
atggccttaccagtgaccgccttgctcctgccgctggccttgctgctccacgccgccaggccgaatgctggcgtgacccagacacctaagttccaggtgctgaaaaccggccagagcatgaccctgcaatgcgcccaggacatgaaccatgagtacatgagctggtacagacaggaccccggcatgggcctgagactgatccactactctgtggctatccagaccaccgaccagggcgaagtgcccaatggctacaacgtgtccagaagcaccatcgaggacttcccactgagactgctgtctgccgctcctagccagaccagcgtgtacttttgtgccagcagctacctgggcaacaccggcgagctgttttttggcgagggcagcagactgaccgtgctcgagacaacacctggcgagagaagtagcctgcctgccttctatcctggcaccagcggctcttgttctggctgtggatctctgagcctgcctctgctggctggactggttgctgctgatgctgtggcctctctgctgattgtgggagccgtgttcctgtgcgccagacctagaagaagccccgctcaagaggacggcaaggtgtacatcaacatgcccggcagaggaagcactagtagagtgaagttcagcagaagcgccgacgcccctgcctaccagcagggacagaaccaactgtacaacgagctgaacctgggcagacgggaagagtacgacgtgctggacaagcggagaggcagggaccctgagatgggcggaaagccccagcggagaaagaacccccaggaaggactgtataacgaactccagaaagacaagatggccgaagcctacagcgagatcggcatgaagggcgagcggagaagaggcaagggccacgatggcctgtaccagggcctgagcaccgccaccaaggacacctatgacgccctgcacatgcaggccctgcctccaagaagggccaagcgatctggatctggagcaacaaacttctcactactcaaacaagcaggtgacgtggaggagaatcccgggcctatggactggatttggcgcatccttttccttgtcggcgctgctaccggcgcgcattccttcgaacaagaagtgacacagatccctgccgctctgtctgtgcctgagggcgaaaacctggtgctgaactgctccttcaccgacagcgccatctacaacctccagtggttcaggcaggaccctggaaagggactgacaagcctgctgctgatccagagcagccagagagagcagacctccggcagactgaatgccagcctggataagagcagcggcaggtctaccctgtatatcgccgcttctcagcctggcgatagcgccacatatctgtgtgctgtgcggcctacaagcggcggcagctacatccctacatttggcagaggcaccagcctgatcgtgcacccttatacgcgtacaacgccgggcgaaaggagttccttgccggccttttaccccggcacaagcggaagctgtagtgggtgtggaagcctcagcctcccacttcttgcgggcctcgtcgcggcagatgcagtagcttcacttcttattgtaggcgcggtatttctctgtgctcgaccaaggaggtcacccgctcaggaggatggtaaggtgtatataaatatgccaggacgcggaagctctagacgggttaagttttccagatccgcagacgcacccgcttaccaacaagggcagaaccaactctacaatgaacttaatttggggcggagggaagagtacgacgttctggacaaaaggaggggacgagatcccgagatgggcggaaagcctcagcgaaggaagaatccgcaagaggggctttataacgaactccagaaagataaaatggcagaagcctatagtgagattgggatgaagggagaaaggaggaggggtaaaggtcacgatgggttgtaccaaggattgagcacagccactaaagatacctatgatgcgctccacatgcaggccctgccgccaagacgcgccaagagaagcggatctggcgtgaagcagaccctgaatttcgacctgctgaagctggctggcgacgtggaatccaacccaggccctggccatatggctctgcctgtgacagctctgctgctgcctctggcactgctgcttcatgctgctagacctagccagtttagagtgtcccctctggacagaacctggaacctgggcgagacagtggaactgaagtgccaggtgctgctgagcaaccctacaagcggctgctcctggctgtttcagcctagaggtgcagccgcctctcctacctttctgctgtacctgagccagaacaagcccaaggccgccgaaggactggacacccagagattcagcggcaagagactgggcgacaccttcgtgctgaccctgagcgacttcagaagagagaacgagggctactacttctgtagcgccctgagcaacagcatcatgtacttcagccacttcgtgcccgtgtttctgcccgccaagcctacaacaacccctgctcctagacctcctacaccagctcctacaatcgccagccagcctctgtctctcagacccgaagcctgtagacctgctgctggcggagctgtgcataccagaggactggatttcgcctgcgacatctacatctgggctcctctggctggcacatgtggcgtgctgctgctgtccctggtcatcaccctgtactgcaaccaccggaacaggcggagagtgtgcaagtgccctagacctgtggtcaagagcggcgacaagcctagcctgagcgccagatatgtt

SEQ ID NO: 2244 - DNA, 2838 bp, synthetic construct; identical to SEQ ID NO: 2243
  source 1..2838: mol_type = other DNA

SEQ ID NO: 2245 - DNA, 3336 bp, synthetic construct
  source 1..3336: mol_type = other DNA
atggccttaccagtgaccgccttgctcctgccgctggccttgctgctccacgccgccaggccgaatgctggcgtgacccagacacctaagttccaggtgctgaaaaccggccagagcatgaccctgcaatgcgcccaggacatgaaccatgagtacatgagctggtacagacaggaccccggcatgggcctgagactgatccactactctgtggctatccagaccaccgaccagggcgaagtgcccaatggctacaacgtgtccagaagcaccatcgaggacttcccactgagactgctgtctgccgctcctagccagaccagcgtgtacttttgtgccagcagctacctgggcaacaccggcgagctgttttttggcgagggcagcagactgaccgtgctcgagggacagcctaaggccaatcctaccgtgacactgttccctccaagcagcgaagaactccaggccaacaaggccacacttgtgtgcctgatctccgacttctaccctggggctgtgacagtggcttggaaggccgatggatctcctgtgaaagccggcgtggaaaccaccaagccatccaagcagagcaacaacaaatacgccgccagctcctacctgagcctgacacctgagcagtggaagtcccacagatcctacagctgccaagtgacccacgaaggcagcaccgtggaaaagacagtggcccctacagagtgcagcggatccacaacacctggcgagagaagtagcctgcctgccttctatcctggcaccagcggctcttgttctggctgtggatctctgagcctgcctctgctggctggactggttgctgctgatgctgtggcctctctgctgattgtgggagccgtgttcctgtgcgccagacctagaagaagccccgctcaagaggacggcaaggtgtacatcaacatgcccggcagaggaagcactagtagagtgaagttcagcagaagcgccgacgcccctgcctaccagcagggacagaaccaactgtacaacgagctgaacctgggcagacgggaagagtacgacgtgctggacaagcggagaggcagggaccctgagatgggcggaaagccccagcggagaaagaacccccaggaaggactgtataacgaactccagaaagacaagatggccgaagcctacagcgagatcggcatgaagggcgagcggagaagaggcaagggccacgatggcctgtaccagggcctgagcaccgccaccaaggacacctatgacgccctgcacatgcaggccctgcctccaagaagggccaagcgatctggatctggagcaacaaacttctcactactcaaacaagcaggtgacgtggaggagaatcccgggcctatggactggatttggcgcatccttttccttgtcggcgctgctaccggcgcgcattccttcgaacaagaagtgacacagatccctgccgctctgtctgtgcctgagggcgaaaacctggtgctgaactgctccttcaccgacagcgccatctacaacctccagtggttcaggcaggaccctggaaagggactgacaagcctgctgctgatccagagcagccagagagagcagacctccggcagactgaatgccagcctggataagagcagcggcaggtctaccctgtatatcgccgcttctcagcctggcgatagcgccacatatctgtgtgctgtgcggcctacaagcggcggcagctacatccctacatttggcagaggcaccagcctgatcgtgcacccttatacgcgtgcctctacaaagggaccctccgtgtttcctctggctcccagcagcaagtctacaagcggaggaacagccgctctgggctgcctggtcaaggattactttcccgagcctgtgaccgtgtcctggaatagcggagcactgacaagcggcgtgcacacctttccagccgtgctgcaaagcagcggcctgtactctctgagcagcgtggtcacagtgcctagctctagcctgggcacccagacctacatctgcaatgtgaaccacaagcctagcaacaccaaggtggacaagagagtggaacccaagagctgtggtaccacaacgccgggcgaaaggagttccttgccggccttttaccccggcacaagcggaagctgtagtgggtgtggaagcctcagcctcccacttcttgcgggcctcgtcgcggcagatgcagtagcttcacttcttattgtaggcgcggtatttctctgtgctcgaccaaggaggtcacccgctcaggaggatggtaaggtgtatataaatatgccaggacgcggaagctctagacgggttaagttttccagatccgcagacgcacccgcttaccaacaagggcagaaccaactctacaatgaacttaatttggggcggagggaagagtacgacgttctggacaaaaggaggggacgagatcccgagatgggcggaaagcctcagcgaaggaagaatccgcaagaggggctttataacgaactccagaaagataaaatggcagaagcctatagtgagattgggatgaagggagaaaggaggaggggtaaaggtcacgatgggttgtaccaaggattgagcacagccactaaagatacctatgatgcgctccacatgcaggccctgccgccaagacgcgccaagagaagcggatctggcgtgaagcagaccctgaatttcgacctgctgaagctggctggcgacgtggaatccaacccaggccctggccatatggctacctacgaggtgctgtgcgaggtggcaagaaagctgggcaccgacgacagagaagtggtgctgttcctgctgaacgtgttcatccctcagcctacactggcccagctgatcggtgcactgagagccctgaaagaggaaggccggctgacctttcctctgctggccgaatgcctgttcagagccggaagaagggatctgctgcgggacctgctgcatctggaccccagatttctggaaagacacctggccggcaccatgagctacttcagcccttaccagctgaccgtgctgcacgttgacggcgaactgtgcgccagagatattcggagcctgatcttcctgagcaaggacaccatcggcagccggtctacccctcagacatttctgcactgggtgtactgcatggaaaacctggacctgctcggccccacagatgtggatgccctgatgtccatgctgagaagcctgagcagagtggacctccagagacaggtgcagacactgatgggactgcacctgagcggacctagccacagccagcactacagacacacccct

SEQ ID NO: 2246 - DNA, 3495 bp, synthetic construct
  source 1..3495: mol_type = other DNA
atggccttaccagtgaccgccttgctcctgccgctggccttgctgctccacgccgccaggccgaatgctggcgtgacccagacacctaagttccaggtgctgaaaaccggccagagcatgaccctgcaatgcgcccaggacatgaaccatgagtacatgagctggtacagacaggaccccggcatgggcctgagactgatccactactctgtggctatccagaccaccgaccagggcgaagtgcccaatggctacaacgtgtccagaagcaccatcgaggacttcccactgagactgctgtctgccgctcctagccagaccagcgtgtacttttgtgccagcagctacctgggcaacaccggcgagctgttttttggcgagggcagcagactgaccgtgctcgagggacagcctaaggccaatcctaccgtgacactgttccctccaagcagcgaagaactccaggccaacaaggccacacttgtgtgcctgatctccgacttctaccctggggctgtgacagtggcttggaaggccgatggatctcctgtgaaagccggcgtggaaaccaccaagccatccaagcagagcaacaacaaatacgccgccagctcctacctgagcctgacacctgagcagtggaagtcccacagatcctacagctgccaagtgacccacgaaggcagcaccgtggaaaagacagtggcccctacagagtgcagcggatccacaacacctggcgagagaagtagcctgcctgccttctatcctggcaccagcggctcttgttctggctgtggatctctgagcctgcctctgctggctggactggttgctgctgatgctgtggcctctctgctgattgtgggagccgtgttcctgtgcgccagacctagaagaagccccgctcaagaggacggcaaggtgtacatcaacatgcccggcagaggaagcactagtagagtgaagttcagcagaagcgccgacgcccctgcctaccagcagggacagaaccaactgtacaacgagctgaacctgggcagacgggaagagtacgacgtgctggacaagcggagaggcagggaccctgagatgggcggaaagccccagcggagaaagaacccccaggaaggactgtataacgaactccagaaagacaagatggccgaagcctacagcgagatcggcatgaagggcgagcggagaagaggcaagggccacgatggcctgtaccagggcctgagcaccgccaccaaggacacctatgacgccctgcacatgcaggccctgcctccaagaagggccaagcgatctggatctggagcaacaaacttctcactactcaaacaagcaggtgacgtggaggagaatcccgggcctatggactggatttggcgcatccttttccttgtcggcgctgctaccggcgcgcattccttcgaacaagaagtgacacagatccctgccgctctgtctgtgcctgagggcgaaaacctggtgctgaactgctccttcaccgacagcgccatctacaacctccagtggttcaggcaggaccctggaaagggactgacaagcctgctgctgatccagagcagccagagagagcagacctccggcagactgaatgccagcctggataagagcagcggcaggtctaccctgtatatcgccgcttctcagcctggcgatagcgccacatatctgtgtgctgtgcggcctacaagcggcggcagctacatccctacatttggcagaggcaccagcctgatcgtgcacccttatacgcgtgcctctacaaagggaccctccgtgtttcctctggctcccagcagcaagtctacaagcggaggaacagccgctctgggctgcctggtcaaggattactttcccgagcctgtgaccgtgtcctggaatagcggagcactgacaagcggcgtgcacacctttccagccgtgctgcaaagcagcggcctgtactctctgagcagcgtggtcacagtgcctagctctagcctgggcacccagacctacatctgcaatgtgaaccacaagcctagcaacaccaaggtggacaagagagtggaacccaagagctgtggtaccacaacgccgggcgaaaggagttccttgccggccttttaccccggcacaagcggaagctgtagtgggtgtggaagcctcagcctcccacttcttgcgggcctcgtcgcggcagatgcagtagcttcacttcttattgtaggcgcggtatttctctgtgctcgaccaaggaggtcacccgctcaggaggatggtaaggtgtatataaatatgccaggacgcggaagctctagacgggttaagttttccagatccgcagacgcacccgcttaccaacaagggcagaaccaactctacaatgaacttaatttggggcggagggaagagtacgacgttctggacaaaaggaggggacgagatcccgagatgggcggaaagcctcagcgaaggaagaatccgcaagaggggctttataacgaactccagaaagataaaatggcagaagcctatagtgagattgggatgaagggagaaaggaggaggggtaaaggtcacgatgggttgtaccaaggattgagcacagccactaaagatacctatgatgcgctccacatgcaggccctgccgccaagacgcgccaagagaagcggatctggcgtgaagcagaccctgaatttcgacctgctgaagctggctggcgacgtggaatccaacccaggccctggccatatgtccgactccaaggaggtccctagccttccatttttgcgacacttgctcgaagagttggacagccatgaggacagcttgctgctgtttctgtgtcacgacgcggccccgggctgcacgacggtcacgcaagctttgtgctcgcttagccaacagcgcaagctgaccctcgcggctctggtcgagatgctctacgtgctgcagcgtatggatcttctcaagagccgcttcgggctcagcaaggagggggccgagcaattgctgggcacaagctttctcacgcgctaccgcaagctcatggtttgcgtgggtgaggagctcgactcgagcgagctacgcgctctacgcttgttcgcgtgcaacctgaatccgagcctgagcacggcgctttctgagagcagccgctttgtcgagcttgtactcgcgcttgaaaacgtaggactcgtctcgccatcgagtgtttccgtgcttgcggacatgttgcgcactcttcggcgcctcgatttgtgccagcagcttgttgagtacgaacaacaagagcaagccaggtaccgttactgttacgcggcctcgccctcattgccagttcgtacgttacgtcgggggcacggcgcgagtgaacacgagcagctgtgcatgcccgtgcaagaatcctctgacagccccgagctgctgcgcacgcccgtacaagaatcctccagcgacagccccgagcaaacgact

SEQ ID NO: 2247 - DNA, 3477 bp, synthetic construct
  source 1..3477: mol_type = other DNA
atggccttaccagtgaccgccttgctcctgccgctggccttgctgctccacgccgccaggccgaatgctggcgtgacccagacacctaagttccaggtgctgaaaaccggccagagcatgaccctgcaatgcgcccaggacatgaaccatgagtacatgagctggtacagacaggaccccggcatgggcctgagactgatccactactctgtggctatccagaccaccgaccagggcgaagtgcccaatggctacaacgtgtccagaagcaccatcgaggacttcccactgagactgctgtctgccgctcctagccagaccagcgtgtacttttgtgccagcagctacctgggcaacaccggcgagctgttttttggcgagggcagcagactgaccgtgctcgagggacagcctaaggccaatcctaccgtgacactgttccctccaagcagcgaagaactccaggccaacaaggccacacttgtgtgcctgatctccgacttctaccctggggctgtgacagtggcttggaaggccgatggatctcctgtgaaagccggcgtggaaaccaccaagccatccaagcagagcaacaacaaatacgccgccagctcctacctgagcctgacacctgagcagtggaagtcccacagatcctacagctgccaagtgacccacgaaggcagcaccgtggaaaagacagtggcccctacagagtgcagcggatccacaacacctggcgagagaagtagcctgcctgccttctatcctggcaccagcggctcttgttctggctgtggatctctgagcctgcctctgctggctggactggttgctgctgatgctgtggcctctctgctgattgtgggagccgtgttcctgtgcgccagacctagaagaagccccgctcaagaggacggcaaggtgtacatcaacatgcccggcagaggaagcactagtagagtgaagttcagcagaagcgccgacgcccctgcctaccagcagggacagaaccaactgtacaacgagctgaacctgggcagacgggaagagtacgacgtgctggacaagcggagaggcagggaccctgagatgggcggaaagccccagcggagaaagaacccccaggaaggactgtataacgaactccagaaagacaagatggccgaagcctacagcgagatcggcatgaagggcgagcggagaagaggcaagggccacgatggcctgtaccagggcctgagcaccgccaccaaggacacctatgacgccctgcacatgcaggccctgcctccaagaagggccaagcgatctggatctggagcaacaaacttctcactactcaaacaagcaggtgacgtggaggagaatcccgggcctatggactggatttggcgcatccttttccttgtcggcgctgctaccggcgcgcattccttcgaacaagaagtgacacagatccctgccgctctgtctgtgcctgagggcgaaaacctggtgctgaactgctccttcaccgacagcgccatctacaacctccagtggttcaggcaggaccctggaaagggactgacaagcctgctgctgatccagagcagccagagagagcagacctccggcagactgaatgccagcctggataagagcagcggcaggtctaccctgtatatcgccgcttctcagcctggcgatagcgccacatatctgtgtgctgtgcggcctacaagcggcggcagctacatccctacatttggcagaggcaccagcctgatcgtgcacccttatacgcgtgcctctacaaagggaccctccgtgtttcctctggctcccagcagcaagtctacaagcggaggaacagccgctctgggctgcctggtcaaggattactttcccgagcctgtgaccgtgtcctggaatagcggagcactgacaagcggcgtgcacacctttccagccgtgctgcaaagcagcggcctgtactctctgagcagcgtggtcacagtgcctagctctagcctgggcacccagacctacatctgcaatgtgaaccacaagcctagcaacaccaaggtggacaagagagtggaacccaagagctgtggtaccacaacgccgggcgaaaggagttccttgccggccttttaccccggcacaagcggaagctgtagtgggtgtggaagcctcagcctcccacttcttgcgggcctcgtcgcggcagatgcagtagcttcacttcttattgtaggcgcggtatttctctgtgctcgaccaaggaggtcacccgctcaggaggatggtaaggtgtatataaatatgccaggacgcggaagctctagacgggttaagttttccagatccgcagacgcacccgcttaccaacaagggcagaaccaactctacaatgaacttaatttggggcggagggaagagtacgacgttctggacaaaaggaggggacgagatcccgagatgggcggaaagcctcagcgaaggaagaatccgcaagaggggctttataacgaactccagaaagataaaatggcagaagcctatagtgagattgggatgaagggagaaaggaggaggggtaaaggtcacgatgggttgtaccaaggattgagcacagccactaaagatacctatgatgcgctccacatgcaggccctgccgccaagacgcgccaagagaagcggatctggcgtgaagcagaccctgaatttcgacctgctgaagctggctggcgacgtggaatccaacccaggccctggccatatggctctgcctgtgacagctctgctgctgcctctggcactgctgcttcatgctgctagacctagccagtttagagtgtcccctctggacagaacctggaacctgggcgagacagtggaactgaagtgccaggtgctgctgagcaaccctacaagcggctgctcctggctgtttcagcctagaggtgcagccgcctctcctacctttctgctgtacctgagccagaacaagcccaaggccgccgaaggactggacacccagagattcagcggcaagagactgggcgacaccttcgtgctgaccctgagcgacttcagaagagagaacgagggctactacttctgtagcgccctgagcaacagcatcatgtacttcagccacttcgtgcccgtgtttctgcccgccaagcctacaacaacccctgctcctagacctcctacaccagctcctacaatcgccagccagcctctgtctctcagacccgaagcctgtagacctgctgctggcggagctgtgcataccagaggactggatttcgcctgcgacatctacatctgggctcctctggctggcacatgtggcgtgctgctgctgtccctggtcatcaccctgtactgcaaccaccggaacaggcggagagtgtgcaagtgccctagacctgtggtcaagagcggcgacaagcctagcctgagcgccagatatgtt

SEQ ID NO: 2248 - DNA, 3888 bp, synthetic construct
  source 1..3888: mol_type = other DNA
atggccttaccagtgaccgccttgctcctgccgctggccttgctgctccacgccgccaggccggaagtgcagctggttgaatctggcggaggactggttcaggctggcggatctctgagactgtcttgtgccgccagcggcagaacctttagcatgggctggtttagacaggcccctggcaaagagagagagttcgtcgccgccatcacatactctggcggcagcccttactacgccgactctgtgaagggcagattcaccatcagccgggacaacgccaagaacaccgtgtacctccagatgaacagcctgaagcctgaggacaccgccgtgtactactgcgccgccaatccaacatacggcagcgactggaacgccgagaattggggccagggaacccaagtgacagtgtctagcggtaccggcggaggcggatctggcggcggaggtagcggtggcggaggatctgaattcaatgctggcgtgacccagacacctaagttccaggtgctgaaaaccggccagagcatgaccctgcaatgcgcccaggacatgaaccatgagtacatgagctggtacagacaggaccccggcatgggcctgagactgatccactactctgtggctatccagaccaccgaccagggcgaagtgcccaatggctacaacgtgtccagaagcaccatcgaggacttcccactgagactgctgtctgccgctcctagccagaccagcgtgtacttttgtgccagcagctacctgggcaacaccggcgagctgttttttggcgagggcagcagactgaccgtgctcgagggacagcctaaggccaatcctaccgtgacactgttccctccaagcagcgaagaactccaggccaacaaggccacacttgtgtgcctgatctccgacttctaccctggggctgtgacagtggcttggaaggccgatggatctcctgtgaaagccggcgtggaaaccaccaagccatccaagcagagcaacaacaaatacgccgccagctcctacctgagcctgacacctgagcagtggaagtcccacagatcctacagctgccaagtgacccacgaaggcagcaccgtggaaaagacagtggcccctacagagtgcagcggatccacaacacctggcgagagaagtagcctgcctgccttctatcctggcaccagcggctcttgttctggctgtggatctctgagcctgcctctgctggctggactggttgctgctgatgctgtggcctctctgctgattgtgggagccgtgttcctgtgcgccagacctagaagaagccccgctcaagaggacggcaaggtgtacatcaacatgcccggcagaggaagcactagtagagtgaagttcagcagaagcgccgacgcccctgcctaccagcagggacagaaccaactgtacaacgagctgaacctgggcagacgggaagagtacgacgtgctggacaagcggagaggcagggaccctgagatgggcggaaagccccagcggagaaagaacccccaggaaggactgtataacgaactccagaaagacaagatggccgaagcctacagcgagatcggcatgaagggcgagcggagaagaggcaagggccacgatggcctgtaccagggcctgagcaccgccaccaaggacacctatgacgccctgcacatgcaggccctgcctccaagaagggccaagcgatctggatctggagcaacaaacttctcactactcaaacaagcaggtgacgtggaggagaatcccgggcctatggactggatttggcgcatccttttccttgtcggcgctgctaccggcgcgcattccttcgaacaagaagtgacacagatccctgccgctctgtctgtgcctgagggcgaaaacctggtgctgaactgctccttcaccgacagcgccatctacaacctccagtggttcaggcaggaccctggaaagggactgacaagcctgctgctgatccagagcagccagagagagcagacctccggcagactgaatgccagcctggataagagcagcggcaggtctaccctgtatatcgccgcttctcagcctggcgatagcgccacatatctgtgtgctgtgcggcctacaagcggcggcagctacatccctacatttggcagaggcaccagcctgatcgtgcacccttatacgcgtgcctctacaaagggaccctccgtgtttcctctggctcccagcagcaagtctacaagcggaggaacagccgctctgggctgcctggtcaaggattactttcccgagcctgtgaccgtgtcctggaatagcggagcactgacaagcggcgtgcacacctttccagccgtgctgcaaagcagcggcctgtactctctgagcagcgtggtcacagtgcctagctctagcctgggcacccagacctacatctgcaatgtgaaccacaagcctagcaacaccaaggtggacaagagagtggaacccaagagctgtggtaccacaacgccgggcgaaaggagttccttgccggccttttaccccggcacaagcggaagctgtagtgggtgtggaagcctcagcctcccacttcttgcgggcctcgtcgcggcagatgcagtagcttcacttcttattgtaggcgcggtatttctctgtgctcgaccaaggaggtcacccgctcaggaggatggtaaggtgtatataaatatgccaggacgcggaagctctagacgggttaagttttccagatccgcagacgcacccgcttaccaacaagggcagaaccaactctacaatgaacttaatttggggcggagggaagagtacgacgttctggacaaaaggaggggacgagatcccgagatgggcggaaagcctcagcgaaggaagaatccgcaagaggggctttataacgaactccagaaagataaaatggcagaagcctatagtgagattgggatgaagggagaaaggaggaggggtaaaggtcacgatgggttgtaccaaggattgagcacagccactaaagatacctatgatgcgctccacatgcaggccctgccgccaagacgcgccaagagaagcggatctggcgtgaagcagaccctgaatttcgacctgctgaagctggctggcgacgtggaatccaacccaggccctggccatatggctctgcctgtgacagctctgctgctgcctctggcactgctgcttcatgctgctagacctagccagtttagagtgtcccctctggacagaacctggaacctgggcgagacagtggaactgaagtgccaggtgctgctgagcaaccctacaagcggctgctcctggctgtttcagcctagaggtgcagccgcctctcctacctttctgctgtacctgagccagaacaagcccaaggccgccgaaggactggacacccagagattcagcggcaagagactgggcgacaccttcgtgctgaccctgagcgacttcagaagagagaacgagggctactacttctgtagcgccctgagcaacagcatcatgtacttcagccacttcgtgcccgtgtttctgcccgccaagcctacaacaacccctgctcctagacctcctacaccagctcctacaatcgccagccagcctctgtctctcagacccgaagcctgtagacctgctgctggcggagctgtgcataccagaggactggatttcgcctgcgacatctacatctgggctcctctggctggcacatgtggcgtgctgctgctgtccctggtcatcaccctgtactgcaaccaccggaacaggcggagagtgtgcaagtgccctagacctgtggtcaagagcggcgacaagcctagcctgagcgccagatatgtt

SEQ ID NO: 2249 - DNA, 4299 bp, synthetic construct
  source 1..4299: mol_type = other DNA
atggccttaccagtgaccgccttgctcctgccgctggccttgctgctccacgccgccaggccggaagtgcagctggttgaatctggcggaggactggttcaggctggcggatctctgagactgtcttgtgccgccagcggcagaacctttagcatgggctggtttagacaggcccctggcaaagagagagagttcgtcgccgccatcacatactctggcggcagcccttactacgccgactctgtgaagggcagattcaccatcagccgggacaacgccaagaacaccgtgtacctccagatgaacagcctgaagcctgaggacaccgccgtgtactactgcgccgccaatccaacatacggcagcgactggaacgccgagaattggggccagggaacccaagtgacagtgtctagcggtaccggcggaggcggatctggcggcggaggtagcggtggcggaggatctgaattcaatgctggcgtgacccagacacctaagttccaggtgctgaaaaccggccagagcatgaccctgcaatgcgcccaggacatgaaccatgagtacatgagctggtacagacaggaccccggcatgggcctgagactgatccactactctgtggctatccagaccaccgaccagggcgaagtgcccaatggctacaacgtgtccagaagcaccatcgaggacttcccactgagactgctgtctgccgctcctagccagaccagcgtgtacttttgtgccagcagctacctgggcaacaccggcgagctgttttttggcgagggcagcagactgaccgtgctcgagggacagcctaaggccaatcctaccgtgacactgttccctccaagcagcgaagaactccaggccaacaaggccacacttgtgtgcctgatctccgacttctaccctggggctgtgacagtggcttggaaggccgatggatctcctgtgaaagccggcgtggaaaccaccaagccatccaagcagagcaacaacaaatacgccgccagctcctacctgagcctgacacctgagcagtggaagtcccacagatcctacagctgccaagtgacccacgaaggcagcaccgtggaaaagacagtggcccctacagagtgcagcggatccacaacacctggcgagagaagtagcctgcctgccttctatcctggcaccagcggctcttgttctggctgtggatctctgagcctgcctctgctggctggactggttgctgctgatgctgtggcctctctgctgattgtgggagccgtgttcctgtgcgccagacctagaagaagccccgctcaagaggacggcaaggtgtacatcaacatgcccggcagaggaagcactagtagagtgaagttcagcagaagcgccgacgcccctgcctaccagcagggacagaaccaactgtacaacgagctgaacctgggcagacgggaagagtacgacgtgctggacaagcggagaggcagggaccctgagatgggcggaaagccccagcggagaaagaacccccaggaaggactgtataacgaactccagaaagacaagatggccgaagcctacagcgagatcggcatgaagggcgagcggagaagaggcaagggccacgatggcctgtaccagggcctgagcaccgccaccaaggacacctatgacgccctgcacatgcaggccctgcctccaagaagggccaagcgatctggatctggagcaacaaacttctcactactcaaacaagcaggtgacgtggaggagaatcccgggcctatggactggatttggcgcatccttttccttgtcggcgctgctaccggcgcgcattccgggcccgaagtgcaactggttgaatccggtggcggcctggtgcaagcaggcggatctctcagacttagctgtgccgcctccggcagaaccttcacaatgggatggtttaggcaggctccagggaaagagagagagttcgtcgccgccatctctctgtctcccacactggcctactacgccgactctgtgaaaggccggttcaccatctccagagataatgccaagaacaccgtggtgctgcaaatgaactctctgaaacccgaggatacagccctgtactattgtgccgctgaccggaagtccgtgatgagcatcagacccgattactggggacagggcacacaagtcacagtgtcctctggatccggcggcggaggatctggcggaggcggatctgggggcggaggctctttcgaacaagaagtgacacagatccctgccgctctgtctgtgcctgagggcgaaaacctggtgctgaactgctccttcaccgacagcgccatctacaacctccagtggttcaggcaggaccctggaaagggactgacaagcctgctgctgatccagagcagccagagagagcagacctccggcagactgaatgccagcctggataagagcagcggcaggtctaccctgtatatcgccgcttctcagcctggcgatagcgccacatatctgtgtgctgtgcggcctacaagcggcggcagctacatccctacatttggcagaggcaccagcctgatcgtgcacccttatacgcgtgcctctacaaagggaccctccgtgtttcctctggctcccagcagcaagtctacaagcggaggaacagccgctctgggctgcctggtcaaggattactttcccgagcctgtgaccgtgtcctggaatagcggagcactgacaagcggcgtgcacacctttccagccgtgctgcaaagcagcggcctgtactctctgagcagcgtggtcacagtgcctagctctagcctgggcacccagacctacatctgcaatgtgaaccacaagcctagcaacaccaaggtggacaagagagtggaacccaagagctgtggtaccacaacgccgggcgaaaggagttccttgccggccttttaccccggcacaagcggaagctgtagtgggtgtggaagcctcagcctcccacttcttgcgggcctcgtcgcggcagatgcagtagcttcacttcttattgtaggcgcggtatttctctgtgctcgaccaaggaggtcacccgctcaggaggatggtaaggtgtatataaatatgccaggacgcggaagctctagacgggttaagttttccagatccgcagacgcacccgcttaccaacaagggcagaaccaactctacaatgaacttaatttggggcggagggaagagtacgacgttctggacaaaaggaggggacgagatcccgagatgggcggaaagcctcagcgaaggaagaatccgcaagaggggctttataacgaactccagaaagataaaatggcagaagcctatagtgagattgggatgaagggagaaaggaggaggggtaaaggtcacgatgggttgtaccaaggattgagcacagccactaaagatacctatgatgcgctccacatgcaggccctgccgccaagacgcgccaagagaagcggatctggcgtgaagcagaccctgaatttcgacctgctgaagctggctggcgacgtggaatccaacccaggccctggccatatggctctgcctgtgacagctctgctgctgcctctggcactgctgcttcatgctgctagacctagccagtttagagtgtcccctctggacagaacctggaacctgggcgagacagtggaactgaagtgccaggtgctgctgagcaaccctacaagcggctgctcctggctgtttcagcctagaggtgcagccgcctctcctacctttctgctgtacctgagccagaacaagcccaaggccgccgaaggactggacacccagagattcagcggcaagagactgggcgacaccttcgtgctgaccctgagcgacttcagaagagagaacgagggctactacttctgtagcgccctgagcaacagcatcatgtacttcagccacttcgtgcccgtgtttctgcccgccaagcctacaacaacccctgctcctagacctcctacaccagctcctacaatcgccagccagcctctgtctctcagacccgaagcctgtagacctgctgctggcggagctgtgcataccagaggactggatttcgcctgcgacatctacatctgggctcctctggctggcacatgtggcgtgctgctgctgtccctggtcatcaccctgtactgcaaccaccggaacaggcggagagtgtgcaagtgccctagacctgtggtcaagagcggcgacaagcctagcctgagcgccagatatgtt

SEQ ID NO: 2250 - DNA, 2454 bp, synthetic construct; identical to SEQ ID NO: 1000
  source 1..2454: mol_type = other DNA

SEQ ID NO: 2251 - DNA, 2580 bp, synthetic construct
  source 1..2580: mol_type = other DNA
atggccttaccagtgaccgccttgctcctgccgctggccttgctgctccacgccgccaggccggaattcaatgctggcgtgacccagacacctaagttccaggtgctgaaaaccggccagagcatgaccctgcaatgcgcccaggacatgaaccatgagtacatgagctggtacagacaggaccccggcatgggcctgagactgatccactactctgtggctatccagaccaccgaccagggcgaagtgcccaatggctacaacgtgtccagaagcaccatcgaggacttcccactgagactgctgtctgccgctcctagccagaccagcgtgtacttttgtgccagcagctacctgggcaacaccggcgagctgttttttggcgagggcagcagactgaccgtgctcgaggacctgaagaacgtgttcccacctgaggtggccgtgttcgagcctagcgaggccgagatcagccacacccagaaagccaccctcgtgtgcctggctaccggcttctaccccgaccatgtggaactgtcttggtgggtcaacggcaaagaggtgcacagcggcgtgtctaccgacccccagccactgaaagaacagcccgccctgaacgacagccggtactgcctgagcagcagactgagagtgtccgccaccttctggcagaacccccggaaccacttcagatgccaggtgcagttctacggcctgagcgagaacgacgagtggacccaggacagagccaagcccgtgacccagatcgtgtctgccgaagcctggggcagagccgattgcggatcccagagcttcggcctgctggaccccaagctgtgctacctgctggatggcatcctgttcatctacggcgtgatcctgaccgccctgttcctgagagtgaagttcagcagaagcgccgacgcccctgcctaccagcagggacagaaccaactgtacaacgagctgaacctgggcagacgggaagagtacgacgtgctggacaagcggagaggcagggaccctgagatgggcggaaagccccagcggagaaagaacccccaggaaggactgtataacgaactccagaaagacaagatggccgaagcctacagcgagatcggcatgaagggcgagcggagaagaggcaagggccacgatggcctgtaccagggcctgagcaccgccaccaaggacacctatgacgccctgcacatgcaggccctgcctccaagaagggccaagcgatctggatctggagcaacaaacttctcactactcaaacaagcaggtgacgtggaggagaatcccgggcctactagtatggactggatttggcgcatccttttccttgtcggcgctgctaccggcgcgcattccttcgaacaagaagtgacacagatccctgccgctctgtctgtgcctgagggcgaaaacctggtgctgaactgctccttcaccgacagcgccatctacaacctccagtggttcaggcaggaccctggaaagggactgacaagcctgctgctgatccagagcagccagagagagcagacctccggcagactgaatgccagcctggataagagcagcggcaggtctaccctgtatatcgccgcttctcagcctggcgatagcgccacatatctgtgtgctgtgcggcctacaagcggcggcagctacatccctacatttggcagaggcaccagcctgatcgtgcacccttatacgcgtatccagaaccctgatcctgccgtgtaccagctgcgggatagcaagagcagcgacaagagcgtgtgtctgttcaccgacttcgacagccagaccaacgtgtcccagagcaaggactccgacgtgtacatcaccgataagaccgtgctggacatgcggagcatggacttcaagagcaactccgccgtggcctggtccaacaagtccgatttcgcctgcgccaacgccttcaacaacagcattatccccgaggacacattcttcccaagccccgagagcagctgcggtacccagagcttcggcctgctggaccccaagctgtgctacctgctggatggcatcctgttcatctacggcgtgatcctgaccgccctgttcctgaaacggggcagaaagaaactcctgtatatattcaaacaaccatttatgagaccagtacaaactactcaagaggaagatggctgtagctgccgatttccagaagaagaagaaggaggatgtgaactgagagtgaagttcagcagaagcgccgacgcccctgcctaccagcagggacagaaccaactgtacaacgagctgaacctgggcagacgggaagagtacgacgtgctggacaagcggagaggcagggaccctgagatgggcggaaagccccagcggagaaagaacccccaggaaggactgtataacgaactccagaaagacaagatggccgaagcctacagcgagatcggcatgaagggcgagcggagaagaggcaagggccacgatggcctgtaccagggcctgagcaccgccaccaaggacacctatgacgccctgcacatgcaggccctgcctccaagataa

SEQ ID NO: 2252 - DNA, 2577 bp, synthetic construct
  source 1..2577: mol_type = other DNA
atggccttaccagtgaccgccttgctcctgccgctggccttgctgctccacgccgccaggccggaattcaatgctggcgtgacccagacacctaagttccaggtgctgaaaaccggccagagcatgaccctgcaatgcgcccaggacatgaaccatgagtacatgagctggtacagacaggaccccggcatgggcctgagactgatccactactctgtggctatccagaccaccgaccagggcgaagtgcccaatggctacaacgtgtccagaagcaccatcgaggacttcccactgagactgctgtctgccgctcctagccagaccagcgtgtacttttgtgccagcagctacctgggcaacaccggcgagctgttttttggcgagggcagcagactgaccgtgctcgaggacctgaagaacgtgttcccacctgaggtggccgtgttcgagcctagcgaggccgagatcagccacacccagaaagccaccctcgtgtgcctggctaccggcttctaccccgaccatgtggaactgtcttggtgggtcaacggcaaagaggtgcacagcggcgtgtctaccgacccccagccactgaaagaacagcccgccctgaacgacagccggtactgcctgagcagcagactgagagtgtccgccaccttctggcagaacccccggaaccacttcagatgccaggtgcagttctacggcctgagcgagaacgacgagtggacccaggacagagccaagcccgtgacccagatcgtgtctgccgaagcctggggcagagccgattgcggatcccagagcttcggcctgctggaccccaagctgtgctacctgctggatggcatcctgttcatctacggcgtgatcctgaccgccctgttcctgagagtgaagttcagcagaagcgccgacgcccctgcctaccagcagggacagaaccaactgtacaacgagctgaacctgggcagacgggaagagtacgacgtgctggacaagcggagaggcagggaccctgagatgggcggaaagccccagcggagaaagaacccccaggaaggactgtataacgaactccagaaagacaagatggccgaagcctacagcgagatcggcatgaagggcgagcggagaagaggcaagggccacgatggcctgtaccagggcctgagcaccgccaccaaggacacctatgacgccctgcacatgcaggccctgcctccaagaagggccaagcgatctggatctggagcaacaaacttctcactactcaaacaagcaggtgacgtggaggagaatcccgggcctactagtatggactggatttggcgcatccttttccttgtcggcgctgctaccggcgcgcattccttcgaacaagaagtgacacagatccctgccgctctgtctgtgcctgagggcgaaaacctggtgctgaactgctccttcaccgacagcgccatctacaacctccagtggttcaggcaggaccctggaaagggactgacaagcctgctgctgatccagagcagccagagagagcagacctccggcagactgaatgccagcctggataagagcagcggcaggtctaccctgtatatcgccgcttctcagcctggcgatagcgccacatatctgtgtgctgtgcggcctacaagcggcggcagctacatccctacatttggcagaggcaccagcctgatcgtgcacccttatacgcgtatccagaaccctgatcctgccgtgtaccagctgcgggatagcaagagcagcgacaagagcgtgtgtctgttcaccgacttcgacagccagaccaacgtgtcccagagcaaggactccgacgtgtacatcaccgataagaccgtgctggacatgcggagcatggacttcaagagcaactccgccgtggcctggtccaacaagtccgatttcgcctgcgccaacgccttcaacaacagcattatccccgaggacacattcttcccaagccccgagagcagctgcggtacccagagcttcggcctgctggaccccaagctgtgctacctgctggatggcatcctgttcatctacggcgtgatcctgaccgccctgttcctgaggagtaagaggagcaggctcctgcacagtgactacatgaacatgactccacgccgccccggacccacccgcaagcattaccagccctatgccccaccacgcgacttcgcagcctatcgctccagagtgaagttcagcagaagcgccgacgcccctgcctaccagcagggacagaaccaactgtacaacgagctgaacctgggcagacgggaagagtacgacgtgctggacaagcggagaggcagggaccctgagatgggcggaaagccccagcggagaaagaacccccaggaaggactgtataacgaactccagaaagacaagatggccgaagcctacagcgagatcggcatgaagggcgagcggagaagaggcaagggccacgatggcctgtaccagggcctgagcaccgccaccaaggacacctatgacgccctgcacatgcaggccctgcctccaagataa

SEQ ID NO: 2253 - DNA, 2562 bp, synthetic construct
  source 1..2562: mol_type = other DNA
atggccttaccagtgaccgccttgctcctgccgctggccttgctgctccacgccgccaggccggaattcaatgctggcgtgacccagacacctaagttccaggtgctgaaaaccggccagagcatgaccctgcaatgcgcccaggacatgaaccatgagtacatgagctggtacagacaggaccccggcatgggcctgagactgatccactactctgtggctatccagaccaccgaccagggcgaagtgcccaatggctacaacgtgtccagaagcaccatcgaggacttcccactgagactgctgtctgccgctcctagccagaccagcgtgtacttttgtgccagcagctacctgggcaacaccggcgagctgttttttggcgagggcagcagactgaccgtgctcgaggacctgaagaacgtgttcccacctgaggtggccgtgttcgagcctagcgaggccgagatcagccacacccagaaagccaccctcgtgtgcctggctaccggcttctaccccgaccatgtggaactgtcttggtgggtcaacggcaaagaggtgcacagcggcgtgtctaccgacccccagccactgaaagaacagcccgccctgaacgacagccggtactgcctgagcagcagactgagagtgtccgccaccttctggcagaacccccggaaccacttcagatgccaggtgcagttctacggcctgagcgagaacgacgagtggacccaggacagagccaagcccgtgacccagatcgtgtctgccgaagcctggggcagagccgattgcggatcccagagcttcggcctgctggaccccaagctgtgctacctgctggatggcatcctgttcatctacggcgtgatcctgaccgccctgttcctgagagtgaagttcagcagaagcgccgacgcccctgcctaccagcagggacagaaccaactgtacaacgagctgaacctgggcagacgggaagagtacgacgtgctggacaagcggagaggcagggaccctgagatgggcggaaagccccagcggagaaagaacccccaggaaggactgtataacgaactccagaaagacaagatggccgaagcctacagcgagatcggcatgaagggcgagcggagaagaggcaagggccacgatggcctgtaccagggcctgagcaccgccaccaaggacacctatgacgccctgcacatgcaggccctgcctccaagaagggccaagcgatctggatctggagcaacaaacttctcactactcaaacaagcaggtgacgtggaggagaatcccgggcctactagtatggactggatttggcgcatccttttccttgtcggcgctgctaccggcgcgcattccttcgaacaagaagtgacacagatccctgccgctctgtctgtgcctgagggcgaaaacctggtgctgaactgctccttcaccgacagcgccatctacaacctccagtggttcaggcaggaccctggaaagggactgacaagcctgctgctgatccagagcagccagagagagcagacctccggcagactgaatgccagcctggataagagcagcggcaggtctaccctgtatatcgccgcttctcagcctggcgatagcgccacatatctgtgtgctgtgcggcctacaagcggcggcagctacatccctacatttggcagaggcaccagcctgatcgtgcacccttatacgcgtatccagaaccctgatcctgccgtgtaccagctgcgggatagcaagagcagcgacaagagcgtgtgtctgttcaccgacttcgacagccagaccaacgtgtcccagagcaaggactccgacgtgtacatcaccgataagaccgtgctggacatgcggagcatggacttcaagagcaactccgccgtggcctggtccaacaagtccgatttcgcctgcgccaacgccttcaacaacagcattatccccgaggacacattcttcccaagccccgagagcagctgcggtacccagagcttcggcctgctggaccccaagctgtgctacctgctggatggcatcctgttcatctacggcgtgatcctgaccgccctgttcctgagggaccaaagactgcctcctgacgctcacaaacctccaggcggaggcagcttcagaacccctatccaagaggaacaggctgacgcccacagcaccctggcaaaaattagagtgaagttcagcagaagcgccgacgcccctgcctaccagcagggacagaaccaactgtacaacgagctgaacctgggcagacgggaagagtacgacgtgctggacaagcggagaggcagggaccctgagatgggcggaaagccccagcggagaaagaacccccaggaaggactgtataacgaactccagaaagacaagatggccgaagcctacagcgagatcggcatgaagggcgagcggagaagaggcaagggccacgatggcctgtaccagggcctgagcaccgccaccaaggacacctatgacgccctgcacatgcaggccctgcctccaagataa

SEQ ID NO: 2254 - DNA, 2814 bp, synthetic construct
  source 1..2814: mol_type = other DNA
atggccttaccagtgaccgccttgctcctgccgctggccttgctgctccacgccgccaggccggaattcaatgctggcgtgacccagacacctaagttccaggtgctgaaaaccggccagagcatgaccctgcaatgcgcccaggacatgaaccatgagtacatgagctggtacagacaggaccccggcatgggcctgagactgatccactactctgtggctatccagaccaccgaccagggcgaagtgcccaatggctacaacgtgtccagaagcaccatcgaggacttcccactgagactgctgtctgccgctcctagccagaccagcgtgtacttttgtgccagcagctacctgggcaacaccggcgagctgttttttggcgagggcagcagactgaccgtgctcgaggacctgaagaacgtgttcccacctgaggtggccgtgttcgagcctagcgaggccgagatcagccacacccagaaagccaccctcgtgtgcctggctaccggcttctaccccgaccatgtggaactgtcttggtgggtcaacggcaaagaggtgcacagcggcgtgtctaccgacccccagccactgaaagaacagcccgccctgaacgacagccggtactgcctgagcagcagactgagagtgtccgccaccttctggcagaacccccggaaccacttcagatgccaggtgcagttctacggcctgagcgagaacgacgagtggacccaggacagagccaagcccgtgacccagatcgtgtctgccgaagcctggggcagagccgattgcggatcccagagcttcggcctgctggaccccaagctgtgctacctgctggatggcatcctgttcatctacggcgtgatcctgaccgccctgttcctgagagtgaagttcagcagaagcgccgacgcccctgcctaccagcagggacagaaccaactgtacaacgagctgaacctgggcagacgggaagagtacgacgtgctggacaagcggagaggcagggaccctgagatgggcggaaagccccagcggagaaagaacccccaggaaggactgtataacgaactccagaaagacaagatggccgaagcctacagcgagatcggcatgaagggcgagcggagaagaggcaagggccacgatggcctgtaccagggcctgagcaccgccaccaaggacacctatgacgccctgcacatgcaggccctgcctccaagaagggccaagcgatctggatctggagcaacaaacttctcactactcaaacaagcaggtgacgtggaggagaatcccgggcctactagtatggactggatttggcgcatccttttccttgtcggcgctgctaccggcgcgcattccttcgaacaagaagtgacacagatccctgccgctctgtctgtgcctgagggcgaaaacctggtgctgaactgctccttcaccgacagcgccatctacaacctccagtggttcaggcaggaccctggaaagggactgacaagcctgctgctgatccagagcagccagagagagcagacctccggcagactgaatgccagcctggataagagcagcggcaggtctaccctgtatatcgccgcttctcagcctggcgatagcgccacatatctgtgtgctgtgcggcctacaagcggcggcagctacatccctacatttggcagaggcaccagcctgatcgtgcacccttatacgcgtatccagaaccctgatcctgccgtgtaccagctgcgggatagcaagagcagcgacaagagcgtgtgtctgttcaccgacttcgacagccagaccaacgtgtcccagagcaaggactccgacgtgtacatcaccgataagaccgtgctggacatgcggagcatggacttcaagagcaactccgccgtggcctggtccaacaagtccgatttcgcctgcgccaacgccttcaacaacagcattatccccgaggacacattcttcccaagccccgagagcagctgcggtacccagagcttcggcctgctggaccccaagctgtgctacctgctggatggcatcctgttcatctacggcgtgatcctgaccgccctgttcctgtggcggcggaagcggaaagagaagcagtctgagacaagccccaaagagttcctgaccatctacgaggacgtgaaggacctgaaaacccggcggaaccacgaacaagagcagacctttcctggcggaggcagcaccatctacagcatgatccagagccagagcagcgcccctacaagccaagagcctgcctacacactgtactccctgatccagcctagcagaaagagcggcagccggaagagaaatcacagccccagcttcaacagcacgatctacgaagtgatcggcaagagccagccaaaggctcagaaccctgccagactgagccggaaagagctggaaaacttcgacgtgtacagcagagtgaagttcagcagaagcgccgacgcccctgcctaccagcagggacagaaccaactgtacaacgagctgaacctgggcagacgggaagagtacgacgtgctggacaagcggagaggcagggaccctgagatgggcggaaagccccagcggagaaagaacccccaggaaggactgtataacgaactccagaaagacaagatggccgaagcctacagcgagatcggcatgaagggcgagcggagaagaggcaagggccacgatggcctgtaccagggcctgagcaccgccaccaaggacacctatgacgccctgcacatgcaggccctgcctccaagataa

SEQ ID NO: 2255 - DNA, 2703 bp, synthetic construct
  source 1..2703: mol_type = other DNA
atggccttaccagtgaccgccttgctcctgccgctggccttgctgctccacgccgccaggccggaattcaatgctggcgtgacccagacacctaagttccaggtgctgaaaaccggccagagcatgaccctgcaatgcgcccaggacatgaaccatgagtacatgagctggtacagacaggaccccggcatgggcctgagactgatccactactctgtggctatccagaccaccgaccagggcgaagtgcccaatggctacaacgtgtccagaagcaccatcgaggacttcccactgagactgctgtctgccgctcctagccagaccagcgtgtacttttgtgccagcagctacctgggcaacaccggcgagctgttttttggcgagggcagcagactgaccgtgctcgaggacctgaagaacgtgttcccacctgaggtggccgtgttcgagcctagcgaggccgagatcagccacacccagaaagccaccctcgtgtgcctggctaccggcttctaccccgaccatgtggaactgtcttggtgggtcaacggcaaagaggtgcacagcggcgtgtctaccgacccccagccactgaaagaacagcccgccctgaacgacagccggtactgcctgagcagcagactgagagtgtccgccaccttctggcagaacccccggaaccacttcagatgccaggtgcagttctacggcctgagcgagaacgacgagtggacccaggacagagccaagcccgtgacccagatcgtgtctgccgaagcctggggcagagccgattgcggatcccagagcttcggcctgctggaccccaagctgtgctacctgctggatggcatcctgttcatctacggcgtgatcctgaccgccctgttcctgaggagtaagaggagcaggctcctgcacagtgactacatgaacatgactccacgccgccccggacccacccgcaagcattaccagccctatgccccaccacgcgacttcgcagcctatcgctccagagtgaagttcagcagaagcgccgacgcccctgcctaccagcagggacagaaccaactgtacaacgagctgaacctgggcagacgggaagagtacgacgtgctggacaagcggagaggcagggaccctgagatgggcggaaagccccagcggagaaagaacccccaggaaggactgtataacgaactccagaaagacaagatggccgaagcctacagcgagatcggcatgaagggcgagcggagaagaggcaagggccacgatggcctgtaccagggcctgagcaccgccaccaaggacacctatgacgccctgcacatgcaggccctgcctccaagaagggccaagcgatctggatctggagcaacaaacttctcactactcaaacaagcaggtgacgtggaggagaatcccgggcctactagtatggactggatttggcgcatccttttccttgtcggcgctgctaccggcgcgcattccttcgaacaagaagtgacacagatccctgccgctctgtctgtgcctgagggcgaaaacctggtgctgaactgctccttcaccgacagcgccatctacaacctccagtggttcaggcaggaccctggaaagggactgacaagcctgctgctgatccagagcagccagagagagcagacctccggcagactgaatgccagcctggataagagcagcggcaggtctaccctgtatatcgccgcttctcagcctggcgatagcgccacatatctgtgtgctgtgcggcctacaagcggcggcagctacatccctacatttggcagaggcaccagcctgatcgtgcacccttatacgcgtatccagaaccctgatcctgccgtgtaccagctgcgggatagcaagagcagcgacaagagcgtgtgtctgttcaccgacttcgacagccagaccaacgtgtcccagagcaaggactccgacgtgtacatcaccgataagaccgtgctggacatgcggagcatggacttcaagagcaactccgccgtggcctggtccaacaagtccgatttcgcctgcgccaacgccttcaacaacagcattatccccgaggacacattcttcccaagccccgagagcagctgcggtacccagagcttcggcctgctggaccccaagctgtgctacctgctggatggcatcctgttcatctacggcgtgatcctgaccgccctgttcctgaaacggggcagaaagaaactcctgtatatattcaaacaaccatttatgagaccagtacaaactactcaagaggaagatggctgtagctgccgatttccagaagaagaagaaggaggatgtgaactgagagtgaagttcagcagaagcgccgacgcccctgcctaccagcagggacagaaccaactgtacaacgagctgaacctgggcagacgggaagagtacgacgtgctggacaagcggagaggcagggaccctgagatgggcggaaagccccagcggagaaagaacccccaggaaggactgtataacgaactccagaaagacaagatggccgaagcctacagcgagatcggcatgaagggcgagcggagaagaggcaagggccacgatggcctgtaccagggcctgagcaccgccaccaaggacacctatgacgccctgcacatgcaggccctgcctccaagataa

SEQ ID NO: 2256 - DNA, 2700 bp, synthetic construct
  source 1..2700: mol_type = other DNA
atggccttaccagtgaccgccttgctcctgccgctggccttgctgctccacgccgccaggccggaattcaatgctggcgtgacccagacacctaagttccaggtgctgaaaaccggccagagcatgaccctgcaatgcgcccaggacatgaaccatgagtacatgagctggtacagacaggaccccggcatgggcctgagactgatccactactctgtggctatccagaccaccgaccagggcgaagtgcccaatggctacaacgtgtccagaagcaccatcgaggacttcccactgagactgctgtctgccgctcctagccagaccagcgtgtacttttgtgccagcagctacctgggcaacaccggcgagctgttttttggcgagggcagcagactgaccgtgctcgaggacctgaagaacgtgttcccacctgaggtggccgtgttcgagcctagcgaggccgagatcagccacacccagaaagccaccctcgtgtgcctggctaccggcttctaccccgaccatgtggaactgtcttggtgggtcaacggcaaagaggtgcacagcggcgtgtctaccgacccccagccactgaaagaacagcccgccctgaacgacagccggtactgcctgagcagcagactgagagtgtccgccaccttctggcagaacccccggaaccacttcagatgccaggtgcagttctacggcctgagcgagaacgacgagtggacccaggacagagccaagcccgtgacccagatcgtgtctgccgaagcctggggcagagccgattgcggatcccagagcttcggcctgctggaccccaagctgtgctacctgctggatggcatcctgttcatctacggcgtgatcctgaccgccctgttcctgaggagtaagaggagcaggctcctgcacagtgactacatgaacatgactccacgccgccccggacccacccgcaagcattaccagccctatgccccaccacgcgacttcgcagcctatcgctccagagtgaagttcagcagaagcgccgacgcccctgcctaccagcagggacagaaccaactgtacaacgagctgaacctgggcagacgggaagagtacgacgtgctggacaagcggagaggcagggaccctgagatgggcggaaagccccagcggagaaagaacccccaggaaggactgtataacgaactccagaaagacaagatggccgaagcctacagcgagatcggcatgaagggcgagcggagaagaggcaagggccacgatggcctgtaccagggcctgagcaccgccaccaaggacacctatgacgccctgcacatgcaggccctgcctccaagaagggccaagcgatctggatctggagcaacaaacttctcactactcaaacaagcaggtgacgtggaggagaatcccgggcctactagtatggactggatttggcgcatccttttccttgtcggcgctgctaccggcgcgcattccttcgaacaagaagtgacacagatccctgccgctctgtctgtgcctgagggcgaaaacctggtgctgaactgctccttcaccgacagcgccatctacaacctccagtggttcaggcaggaccctggaaagggactgacaagcctgctgctgatccagagcagccagagagagcagacctccggcagactgaatgccagcctggataagagcagcggcaggtctaccctgtatatcgccgcttctcagcctggcgatagcgccacatatctgtgtgctgtgcggcctacaagcggcggcagctacatccctacatttggcagaggcaccagcctgatcgtgcacccttatacgcgtatccagaaccctgatcctgccgtgtaccagctgcgggatagcaagagcagcgacaagagcgtgtgtctgttcaccgacttcgacagccagaccaacgtgtcccagagcaaggactccgacgtgtacatcaccgataagaccgtgctggacatgcggagcatggacttcaagagcaactccgccgtggcctggtccaacaagtccgatttcgcctgcgccaacgccttcaacaacagcattatccccgaggacacattcttcccaagccccgagagcagctgcggtacccagagttttgggttgttggaccctaaattgtgctatctgttggacggaatcctgttcatttacggagtgatcctgaccgcattgttcctgaggagcaagcggtcacggctgctccacagcgattacatgaatatgacaccacgaagaccgggtcctactcgcaaacactaccaaccctacgcacctccccgcgactttgcagcgtaccgatctcgggttaagttttccagatccgcagacgcacccgcttaccaacaagggcagaaccaactctacaatgaacttaatttggggcggagggaagagtacgacgttctggacaaaaggaggggacgagatcccgagatgggcggaaagcctcagcgaaggaagaatccgcaagaggggctttataacgaactccagaaagataaaatggcagaagcctatagtgagattgggatgaagggagaaaggaggaggggtaaaggtcacgatgggttgtaccaaggattgagcacagccactaaagatacctatgatgcgctccacatgcaggccctgccgccaagataa

SEQ ID NO: 2257 - DNA, 2703 bp, synthetic construct
  source 1..2703: mol_type = other DNA
atggccttaccagtgaccgccttgctcctgccgctggccttgctgctccacgccgccaggccggaattcaatgctggcgtgacccagacacctaagttccaggtgctgaaaaccggccagagcatgaccctgcaatgcgcccaggacatgaaccatgagtacatgagctggtacagacaggaccccggcatgggcctgagactgatccactactctgtggctatccagaccaccgaccagggcgaagtgcccaatggctacaacgtgtccagaagcaccatcgaggacttcccactgagactgctgtctgccgctcctagccagaccagcgtgtacttttgtgccagcagctacctgggcaacaccggcgagctgttttttggcgagggcagcagactgaccgtgctcgaggacctgaagaacgtgttcccacctgaggtggccgtgttcgagcctagcgaggccgagatcagccacacccagaaagccaccctcgtgtgcctggctaccggcttctaccccgaccatgtggaactgtcttggtgggtcaacggcaaagaggtgcacagcggcgtgtctaccgacccccagccactgaaagaacagcccgccctgaacgacagccggtactgcctgagcagcagactgagagtgtccgccaccttctggcagaacccccggaaccacttcagatgccaggtgcagttctacggcctgagcgagaacgacgagtggacccaggacagagccaagcccgtgacccagatcgtgtctgccgaagcctggggcagagccgattgcggatcccagagcttcggcctgctggaccccaagctgtgctacctgctggatggcatcctgttcatctacggcgtgatcctgaccgccctgttcctgaggagtaagaggagcaggctcctgcacagtgactacatgaacatgactccacgccgccccggacccacccgcaagcattaccagccctatgccccaccacgcgacttcgcagcctatcgctccagagtgaagttcagcagaagcgccgacgcccctgcctaccagcagggacagaaccaactgtacaacgagctgaacctgggcagacgggaagagtacgacgtgctggacaagcggagaggcagggaccctgagatgggcggaaagccccagcggagaaagaacccccaggaaggactgtataacgaactccagaaagacaagatggccgaagcctacagcgagatcggcatgaagggcgagcggagaagaggcaagggccacgatggcctgtaccagggcctgagcaccgccaccaaggacacctatgacgccctgcacatgcaggccctgcctccaagaagggccaagcgatctggatctggagcaacaaacttctcactactcaaacaagcaggtgacgtggaggagaatcccgggcctactagtatggactggatttggcgcatccttttccttgtcggcgctgctaccggcgcgcattccttcgaacaagaagtgacacagatccctgccgctctgtctgtgcctgagggcgaaaacctggtgctgaactgctccttcaccgacagcgccatctacaacctccagtggttcaggcaggaccctggaaagggactgacaagcctgctgctgatccagagcagccagagagagcagacctccggcagactgaatgccagcctggataagagcagcggcaggtctaccctgtatatcgccgcttctcagcctggcgatagcgccacatatctgtgtgctgtgcggcctacaagcggcggcagctacatccctacatttggcagaggcaccagcctgatcgtgcacccttatacgcgtatccagaaccctgatcctgccgtgtaccagctgcgggatagcaagagcagcgacaagagcgtgtgtctgttcaccgacttcgacagccagaccaacgtgtcccagagcaaggactccgacgtgtacatcaccgataagaccgtgctggacatgcggagcatggacttcaagagcaactccgccgtggcctggtccaacaagtccgatttcgcctgcgccaacgccttcaacaacagcattatccccgaggacacattcttcccaagccccgagagcagctgcggtacccagagttttgggttgttggaccctaaattgtgctatctgttggacggaatcctgttcatttacggagtgatcctgaccgcattgttcctgaagagaggccggaagaagctgctgtacatcttcaagcagcctttcatgcggcccgtgcagaccacccaggaagaggacggctgctcctgccggttccccgaggaagaagaaggcggctgcgagctgcgggttaagttttccagatccgcagacgcacccgcttaccaacaagggcagaaccaactctacaatgaacttaatttggggcggagggaagagtacgacgttctggacaaaaggaggggacgagatcccgagatgggcggaaagcctcagcgaaggaagaatccgcaagaggggctttataacgaactccagaaagataaaatggcagaagcctatagtgagattgggatgaagggagaaaggaggaggggtaaaggtcacgatgggttgtaccaaggattgagcacagccactaaagatacctatgatgcgctccacatgcaggccctgccgccaagataa

SEQ ID NO: 2258 - DNA, 2454 bp, synthetic construct
  source 1..2454: mol_type = other DNA
atggccttaccagtgaccgccttgctcctgccgctggccttgctgctccacgccgccaggccggaattcaatgctggcgtgacccagacacctaagttccaggtgctgaaaaccggccagagcatgaccctgcaatgcgcccaggacatgaaccatgagtacatgagctggtacagacaggaccccggcatgggcctgagactgatccactactctgtggctatccagaccaccgaccagggcgaagtgcccaatggctacaacgtgtccagaagcaccatcgaggacttcccactgagactgctgtctgccgctcctagccagaccagcgtgtacttttgtgccagcagctacctgggcaacaccggcgagctgttttttggcgagggcagcagactgaccgtgctcgaggacctgaagaacgtgttcccacctgaggtggccgtgttcgagcctagcgaggccgagatcagccacacccagaaagccaccctcgtgtgcctggctaccggcttctaccccgaccatgtggaactgtcttggtgggtcaacggcaaagaggtgcacagcggcgtgtctaccgacccccagccactgaaagaacagcccgccctgaacgacagccggtactgcctgagcagcagactgagagtgtccgccaccttctggcagaacccccggaaccacttcagatgccaggtgcagttctacggcctgagcgagaacgacgagtggacccaggacagagccaagcccgtgacccagatcgtgtctgccgaagcctggggcagagccgattgcggatcccagagcttcggcctgctggaccccaagctgtgctacctgctggatggcatcctgttcatctacggcgtgatcctgaccgccctgttcctgagagtgaagttcagcagaagcgccgacgcccctgcctaccagcagggacagaaccaactgtacaacgagctgaacctgggcagacgggaagagtacgacgtgctggacaagcggagaggcagggaccctgagatgggcggaaagccccagcggagaaagaacccccaggaaggactgttcaacgaactccagaaagacaagatggccgaagccttcagcgagatcggcatgaagggcgagcggagaagaggcaagggccacgatggcctgttccagggcctgagcaccgccaccaaggacaccttcgacgccctgcacatgcaggccctgcctccaagaagggccaagcgatctggatctggagcaacaaacttctcactactcaaacaagcaggtgacgtggaggagaatcccgggcctactagtatggactggatttggcgcatccttttccttgtcggcgctgctaccggcgcgcattccttcgaacaagaagtgacacagatccctgccgctctgtctgtgcctgagggcgaaaacctggtgctgaactgctccttcaccgacagcgccatctacaacctccagtggttcaggcaggaccctggaaagggactgacaagcctgctgctgatccagagcagccagagagagcagacctccggcagactgaatgccagcctggataagagcagcggcaggtctaccctgtatatcgccgcttctcagcctggcgatagcgccacatatctgtgtgctgtgcggcctacaagcggcggcagctacatccctacatttggcagaggcaccagcctgatcgtgcacccttatacgcgtatccagaaccctgatcctgccgtgtaccagctgcgggatagcaagagcagcgacaagagcgtgtgtctgttcaccgacttcgacagccagaccaacgtgtcccagagcaaggactccgacgtgtacatcaccgataagaccgtgctggacatgcggagcatggacttcaagagcaactccgccgtggcctggtccaacaagtccgatttcgcctgcgccaacgccttcaacaacagcattatccccgaggacacattcttcccaagccccgagagcagctgcggtacccagagttttgggttgttggaccctaaattgtgctatctgttggacggaatcctgttcatttacggagtgatcctgaccgcattgttcctgcgggttaagttttccagatccgcagacgcacccgcttaccaacaagggcagaaccaactctacaatgaacttaatttggggcggagggaagagtacgacgttctggacaaaaggaggggacgagatcccgagatgggcggaaagcctcagcgaaggaagaatccgcaagaggggctttataacgaactccagaaagataaaatggcagaagcctatagtgagattgggatgaagggagaaaggaggaggggtaaaggtcacgatgggttgtaccaaggattgagcacagccactaaagatacctatgatgcgctccacatgcaggccctgccgccaagataa

SEQ ID NO: 2259 - DNA, 2454 bp, synthetic construct
  source 1..2454: mol_type = other DNA
atggccttaccagtgaccgccttgctcctgccgctggccttgctgctccacgccgccaggccggaattcaatgctggcgtgacccagacacctaagttccaggtgctgaaaaccggccagagcatgaccctgcaatgcgcccaggacatgaaccatgagtacatgagctggtacagacaggaccccggcatgggcctgagactgatccactactctgtggctatccagaccaccgaccagggcgaagtgcccaatggctacaacgtgtccagaagcaccatcgaggacttcccactgagactgctgtctgccgctcctagccagaccagcgtgtacttttgtgccagcagctacctgggcaacaccggcgagctgttttttggcgagggcagcagactgaccgtgctcgaggacctgaagaacgtgttcccacctgaggtggccgtgttcgagcctagcgaggccgagatcagccacacccagaaagccaccctcgtgtgcctggctaccggcttctaccccgaccatgtggaactgtcttggtgggtcaacggcaaagaggtgcacagcggcgtgtctaccgacccccagccactgaaagaacagcccgccctgaacgacagccggtactgcctgagcagcagactgagagtgtccgccaccttctggcagaacccccggaaccacttcagatgccaggtgcagttctacggcctgagcgagaacgacgagtggacccaggacagagccaagcccgtgacccagatcgtgtctgccgaagcctggggcagagccgattgcggatcccagagcttcggcctgctggaccccaagctgtgctacctgctggatggcatcctgttcatctacggcgtgatcctgaccgccctgttcctgagagtgaagttcagcagaagcgccgacgcccctgcctaccagcagggacagaaccaactgtacaacgagctgaacctgggcagacgggaagagtacgacgtgctggacaagcggagaggcagggaccctgagatgggcggaaagccccagcggagaaagaacccccaggaaggactgttcaacgaactccagaaagacaagatggccgaagccttcagcgagatcggcatgaagggcgagcggagaagaggcaagggccacgatggcctgttccagggcctgagcaccgccaccaaggacaccttcgacgccctgcacatgcaggccctgcctccaagaagggccaagcgatctggatctggagcaacaaacttctcactactcaaacaagcaggtgacgtggaggagaatcccgggcctactagtatggactggatttggcgcatccttttccttgtcggcgctgctaccggcgcgcattccttcgaacaagaagtgacacagatccctgccgctctgtctgtgcctgagggcgaaaacctggtgctgaactgctccttcaccgacagcgccatctacaacctccagtggttcaggcaggaccctggaaagggactgacaagcctgctgctgatccagagcagccagagagagcagacctccggcagactgaatgccagcctggataagagcagcggcaggtctaccctgtatatcgccgcttctcagcctggcgatagcgccacatatctgtgtgctgtgcggcctacaagcggcggcagctacatccctacatttggcagaggcaccagcctgatcgtgcacccttatacgcgtatccagaaccctgatcctgccgtgtaccagctgcgggatagcaagagcagcgacaagagcgtgtgtctgttcaccgacttcgacagccagaccaacgtgtcccagagcaaggactccgacgtgtacatcaccgataagaccgtgctggacatgcggagcatggacttcaagagcaactccgccgtggcctggtccaacaagtccgatttcgcctgcgccaacgccttcaacaacagcattatccccgaggacacattcttcccaagccccgagagcagctgcggtacccagagcttcggcctgctggaccccaagctgtgctacctgctggatggcatcctgttcatctacggcgtgatcctgaccgccctgttcctgagagtgaagttcagcagaagcgccgacgcccctgcctaccagcagggacagaaccaactgtacaacgagctgaacctgggcagacgggaagagtacgacgtgctggacaagcggagaggcagggaccctgagatgggcggaaagccccagcggagaaagaacccccaggaaggactgtataacgaactccagaaagacaagatggccgaagcctacagcgagatcggcatgaagggcgagcggagaagaggcaagggccacgatggcctgtaccagggcctgagcaccgccaccaaggacacctatgacgccctgcacatgcaggccctgcctccaagataa

SEQ ID NO: 2260 - DNA, 2580 bp, synthetic construct
  source 1..2580: mol_type = other DNA
atggccttaccagtgaccgccttgctcctgccgctggccttgctgctccacgccgccaggccggaattcaatgctggcgtgacccagacacctaagttccaggtgctgaaaaccggccagagcatgaccctgcaatgcgcccaggacatgaaccatgagtacatgagctggtacagacaggaccccggcatgggcctgagactgatccactactctgtggctatccagaccaccgaccagggcgaagtgcccaatggctacaacgtgtccagaagcaccatcgaggacttcccactgagactgctgtctgccgctcctagccagaccagcgtgtacttttgtgccagcagctacctgggcaacaccggcgagctgttttttggcgagggcagcagactgaccgtgctcgaggacctgaagaacgtgttcccacctgaggtggccgtgttcgagcctagcgaggccgagatcagccacacccagaaagccaccctcgtgtgcctggctaccggcttctaccccgaccatgtggaactgtcttggtgggtcaacggcaaagaggtgcacagcggcgtgtctaccgacccccagccactgaaagaacagcccgccctgaacgacagccggtactgcctgagcagcagactgagagtgtccgccaccttctggcagaacccccggaaccacttcagatgccaggtgcagttctacggcctgagcgagaacgacgagtggacccaggacagagccaagcccgtgacccagatcgtgtctgccgaagcctggggcagagccgattgcggatcccagagcttcggcctgctggaccccaagctgtgctacctgctggatggcatcctgttcatctacggcgtgatcctgaccgccctgttcctgagagtgaagttcagcagaagcgccgacgcccctgcctaccagcagggacagaaccaactgtacaacgagctgaacctgggcagacgggaagagtacgacgtgctggacaagcggagaggcagggaccctgagatgggcggaaagccccagcggagaaagaacccccaggaaggactgttcaacgaactccagaaagacaagatggccgaagccttcagcgagatcggcatgaagggcgagcggagaagaggcaagggccacgatggcctgttccagggcctgagcaccgccaccaaggacaccttcgacgccctgcacatgcaggccctgcctccaagaagggccaagcgatctggatctggagcaacaaacttctcactactcaaacaagcaggtgacgtggaggagaatcccgggcctactagtatggactggatttggcgcatccttttccttgtcggcgctgctaccggcgcgcattccttcgaacaagaagtgacacagatccctgccgctctgtctgtgcctgagggcgaaaacctggtgctgaactgctccttcaccgacagcgccatctacaacctccagtggttcaggcaggaccctggaaagggactgacaagcctgctgctgatccagagcagccagagagagcagacctccggcagactgaatgccagcctggataagagcagcggcaggtctaccctgtatatcgccgcttctcagcctggcgatagcgccacatatctgtgtgctgtgcggcctacaagcggcggcagctacatccctacatttggcagaggcaccagcctgatcgtgcacccttatacgcgtatccagaaccctgatcctgccgtgtaccagctgcgggatagcaagagcagcgacaagagcgtgtgtctgttcaccgacttcgacagccagaccaacgtgtcccagagcaaggactccgacgtgtacatcaccgataagaccgtgctggacatgcggagcatggacttcaagagcaactccgccgtggcctggtccaacaagtccgatttcgcctgcgccaacgccttcaacaacagcattatccccgaggacacattcttcccaagccccgagagcagctgcggtacccagagcttcggcctgctggaccccaagctgtgctacctgctggatggcatcctgttcatctacggcgtgatcctgaccgccctgttcctgaaacggggcagaaagaaactcctgtatatattcaaacaaccatttatgagaccagtacaaactactcaagaggaagatggctgtagctgccgatttccagaagaagaagaaggaggatgtgaactgagagtgaagttcagcagaagcgccgacgcccctgcctaccagcagggacagaaccaactgtacaacgagctgaacctgggcagacgggaagagtacgacgtgctggacaagcggagaggcagggaccctgagatgggcggaaagccccagcggagaaagaacccccaggaaggactgtataacgaactccagaaagacaagatggccgaagcctacagcgagatcggcatgaagggcgagcggagaagaggcaagggccacgatggcctgtaccagggcctgagcaccgccaccaaggacacctatgacgccctgcacatgcaggccctgcctccaagataa

SEQ ID NO: 2261 - DNA, 2577 bp, synthetic construct
  source 1..2577: mol_type = other DNA
atggccttaccagtgaccgccttgctcctgccgctggccttgctgctccacgccgccaggccggaattcaatgctggcgtgacccagacacctaagttccaggtgctgaaaaccggccagagcatgaccctgcaatgcgcccaggacatgaaccatgagtacatgagctggtacagacaggaccccggcatgggcctgagactgatccactactctgtggctatccagaccaccgaccagggcgaagtgcccaatggctacaacgtgtccagaagcaccatcgaggacttcccactgagactgctgtctgccgctcctagccagaccagcgtgtacttttgtgccagcagctacctgggcaacaccggcgagctgttttttggcgagggcagcagactgaccgtgctcgaggacctgaagaacgtgttcccacctgaggtggccgtgttcgagcctagcgaggccgagatcagccacacccagaaagccaccctcgtgtgcctggctaccggcttctaccccgaccatgtggaactgtcttggtgggtcaacggcaaagaggtgcacagcggcgtgtctaccgacccccagccactgaaagaacagcccgccctgaacgacagccggtactgcctgagcagcagactgagagtgtccgccaccttctggcagaacccccggaaccacttcagatgccaggtgcagttctacggcctgagcgagaacgacgagtggacccaggacagagccaagcccgtgacccagatcgtgtctgccgaagcctggggcagagccgattgcggatcccagagcttcggcctgctggaccccaagctgtgctacctgctggatggcatcctgttcatctacggcgtgatcctgaccgccctgttcctgagagtgaagttcagcagaagcgccgacgcccctgcctaccagcagggacagaaccaactgtacaacgagctgaacctgggcagacgggaagagtacgacgtgctggacaagcggagaggcagggaccctgagatgggcggaaagccccagcggagaaagaacccccaggaaggactgttcaacgaactccagaaagacaagatggccgaagccttcagcgagatcggcatgaagggcgagcggagaagaggcaagggccacgatggcctgttccagggcctgagcaccgccaccaaggacaccttcgacgccctgcacatgcaggccctgcctccaagaagggccaagcgatctggatctggagcaacaaacttctcactactcaaacaagcaggtgacgtggaggagaatcccgggcctactagtatggactggatttggcgcatccttttccttgtcggcgctgctaccggcgcgcattccttcgaacaagaagtgacacagatccctgccgctctgtctgtgcctgagggcgaaaacctggtgctgaactgctccttcaccgacagcgccatctacaacctccagtggttcaggcaggaccctggaaagggactgacaagcctgctgctgatccagagcagccagagagagcagacctccggcagactgaatgccagcctggataagagcagcggcaggtctaccctgtatatcgccgcttctcagcctggcgatagcgccacatatctgtgtgctgtgcggcctacaagcggcggcagctacatccctacatttggcagaggcaccagcctgatcgtgcacccttatacgcgtatccagaaccctgatcctgccgtgtaccagctgcgggatagcaagagcagcgacaagagcgtgtgtctgttcaccgacttcgacagccagaccaacgtgtcccagagcaaggactccgacgtgtacatcaccgataagaccgtgctggacatgcggagcatggacttcaagagcaactccgccgtggcctggtccaacaagtccgatttcgcctgcgccaacgccttcaacaacagcattatccccgaggacacattcttcccaagccccgagagcagctgcggtacccagagcttcggcctgctggaccccaagctgtgctacctgctggatggcatcctgttcatctacggcgtgatcctgaccgccctgttcctgaggagtaagaggagcaggctcctgcacagtgactacatgaacatgactccacgccgccccggacccacccgcaagcattaccagccctatgccccaccacgcgacttcgcagcctatcgctccagagtgaagttcagcagaagcgccgacgcccctgcctaccagcagggacagaaccaactgtacaacgagctgaacctgggcagacgggaagagtacgacgtgctggacaagcggagaggcagggaccctgagatgggcggaaagccccagcggagaaagaacccccaggaaggactgtataacgaactccagaaagacaagatggccgaagcctacagcgagatcggcatgaagggcgagcggagaagaggcaagggccacgatggcctgtaccagggcctgagcaccgccaccaaggacacctatgacgccctgcacatgcaggccctgcctccaagataa

SEQ ID NO: 2262 - DNA, 2562 bp, synthetic construct
  source 1..2562: mol_type = other DNA
atggccttaccagtgaccgccttgctcctgccgctggccttgctgctccacgccgccaggccggaattcaatgctggcgtgacccagacacctaagttccaggtgctgaaaaccggccagagcatgaccctgcaatgcgcccaggacatgaaccatgagtacatgagctggtacagacaggaccccggcatgggcctgagactgatccactactctgtggctatccagaccaccgaccagggcgaagtgcccaatggctacaacgtgtccagaagcaccatcgaggacttcccactgagactgctgtctgccgctcctagccagaccagcgtgtacttttgtgccagcagctacctgggcaacaccggcgagctgttttttggcgagggcagcagactgaccgtgctcgaggacctgaagaacgtgttcccacctgaggtggccgtgttcgagcctagcgaggccgagatcagccacacccagaaagccaccctcgtgtgcctggctaccggcttctaccccgaccatgtggaactgtcttggtgggtcaacggcaaagaggtgcacagcggcgtgtctaccgacccccagccactgaaagaacagcccgccctgaacgacagccggtactgcctgagcagcagactgagagtgtccgccaccttctggcagaacccccggaaccacttcagatgccaggtgcagttctacggcctgagcgagaacgacgagtggacccaggacagagccaagcccgtgacccagatcgtgtctgccgaagcctggggcagagccgattgcggatcccagagcttcggcctgctggaccccaagctgtgctacctgctggatggcatcctgttcatctacggcgtgatcctgaccgccctgttcctgagagtgaagttcagcagaagcgccgacgcccctgcctaccagcagggacagaaccaactgtacaacgagctgaacctgggcagacgggaagagtacgacgtgctggacaagcggagaggcagggaccctgagatgggcggaaagccccagcggagaaagaacccccaggaaggactgttcaacgaactccagaaagacaagatggccgaagccttcagcgagatcggcatgaagggcgagcggagaagaggcaagggccacgatggcctgttccagggcctgagcaccgccaccaaggacaccttcgacgccctgcacatgcaggccctgcctccaagaagggccaagcgatctggatctggagcaacaaacttctcactactcaaacaagcaggtgacgtggaggagaatcccgggcctactagtatggactggatttggcgcatccttttccttgtcggcgctgctaccggcgcgcattccttcgaacaagaagtgacacagatccctgccgctctgtctgtgcctgagggcgaaaacctggtgctgaactgctccttcaccgacagcgccatctacaacctccagtggttcaggcaggaccctggaaagggactgacaagcctgctgctgatccagagcagccagagagagcagacctccggcagactgaatgccagcctggataagagcagcggcaggtctaccctgtatatcgccgcttctcagcctggcgatagcgccacatatctgtgtgctgtgcggcctacaagcggcggcagctacatccctacatttggcagaggcaccagcctgatcgtgcacccttatacgcgtatccagaaccctgatcctgccgtgtaccagctgcgggatagcaagagcagcgacaagagcgtgtgtctgttcaccgacttcgacagccagaccaacgtgtcccagagcaaggactccgacgtgtacatcaccgataagaccgtgctggacatgcggagcatggacttcaagagcaactccgccgtggcctggtccaacaagtccgatttcgcctgcgccaacgccttcaacaacagcattatccccgaggacacattcttcccaagccccgagagcagctgcggtacccagagcttcggcctgctggaccccaagctgtgctacctgctggatggcatcctgttcatctacggcgtgatcctgaccgccctgttcctgagggaccaaagactgcctcctgacgctcacaaacctccaggcggaggcagcttcagaacccctatccaagaggaacaggctgacgcccacagcaccctggcaaaaattagagtgaagttcagcagaagcgccgacgcccctgcctaccagcagggacagaaccaactgtacaacgagctgaacctgggcagacgggaagagtacgacgtgctggacaagcggagaggcagggaccctgagatgggcggaaagccccagcggagaaagaacccccaggaaggactgtataacgaactccagaaagacaagatggccgaagcctacagcgagatcggcatgaagggcgagcggagaagaggcaagggccacgatggcctgtaccagggcctgagcaccgccaccaaggacacctatgacgccctgcacatgcaggccctgcctccaagataa

SEQ ID NO: 2263 - DNA, 2814 bp, synthetic construct
  source 1..2814: mol_type = other DNA
atggccttaccagtgaccgccttgctcctgccgctggccttgctgctccacgccgccaggccggaattcaatgctggcgtgacccagacacctaagttccaggtgctgaaaaccggccagagcatgaccctgcaatgcgcccaggacatgaaccatgagtacatgagctggtacagacaggaccccggcatgggcctgagactgatccactactctgtggctatccagaccaccgaccagggcgaagtgcccaatggctacaacgtgtccagaagcaccatcgaggacttcccactgagactgctgtctgccgctcctagccagaccagcgtgtacttttgtgccagcagctacctgggcaacaccggcgagctgttttttggcgagggcagcagactgaccgtgctcgaggacctgaagaacgtgttcccacctgaggtggccgtgttcgagcctagcgaggccgagatcagccacacccagaaagccaccctcgtgtgcctggctaccggcttctaccccgaccatgtggaactgtcttggtgggtcaacggcaaagaggtgcacagcggcgtgtctaccgacccccagccactgaaagaacagcccgccctgaacgacagccggtactgcctgagcagcagactgagagtgtccgccaccttctggcagaacccccggaaccacttcagatgccaggtgcagttctacggcctgagcgagaacgacgagtggacccaggacagagccaagcccgtgacccagatcgtgtctgccgaagcctggggcagagccgattgcggatcccagagcttcggcctgctggaccccaagctgtgctacctgctggatggcatcctgttcatctacggcgtgatcctgaccgccctgttcctgagagtgaagttcagcagaagcgccgacgcccctgcctaccagcagggacagaaccaactgtacaacgagctgaacctgggcagacgggaagagtacgacgtgctggacaagcggagaggcagggaccctgagatgggcggaaagccccagcggagaaagaacccccaggaaggactgttcaacgaactccagaaagacaagatggccgaagccttcagcgagatcggcatgaagggcgagcggagaagaggcaagggccacgatggcctgttccagggcctgagcaccgccaccaaggacaccttcgacgccctgcacatgcaggccctgcctccaagaagggccaagcgatctggatctggagcaacaaacttctcactactcaaacaagcaggtgacgtggaggagaatcccgggcctactagtatggactggatttggcgcatccttttccttgtcggcgctgctaccggcgcgcattccttcgaacaagaagtgacacagatccctgccgctctgtctgtgcctgagggcgaaaacctggtgctgaactgctccttcaccgacagcgccatctacaacctccagtggttcaggcaggaccctggaaagggactgacaagcctgctgctgatccagagcagccagagagagcagacctccggcagactgaatgccagcctggataagagcagcggcaggtctaccctgtatatcgccgcttctcagcctggcgatagcgccacatatctgtgtgctgtgcggcctacaagcggcggcagctacatccctacatttggcagaggcaccagcctgatcgtgcacccttatacgcgtatccagaaccctgatcctgccgtgtaccagctgcgggatagcaagagcagcgacaagagcgtgtgtctgttcaccgacttcgacagccagaccaacgtgtcccagagcaaggactccgacgtgtacatcaccgataagaccgtgctggacatgcggagcatggacttcaagagcaactccgccgtggcctggtccaacaagtccgatttcgcctgcgccaacgccttcaacaacagcattatccccgaggacacattcttcccaagccccgagagcagctgcggtacccagagcttcggcctgctggaccccaagctgtgctacctgctggatggcatcctgttcatctacggcgtgatcctgaccgccctgttcctgtggcggcggaagcggaaagagaagcagtctgagacaagccccaaagagttcctgaccatctacgaggacgtgaaggacctgaaaacccggcggaaccacgaacaagagcagacctttcctggcggaggcagcaccatctacagcatgatccagagccagagcagcgcccctacaagccaagagcctgcctacacactgtactccctgatccagcctagcagaaagagcggcagccggaagagaaatcacagccccagcttcaacagcacgatctacgaagtgatcggcaagagccagccaaaggctcagaaccctgccagactgagccggaaagagctggaaaacttcgacgtgtacagcagagtgaagttcagcagaagcgccgacgcccctgcctaccagcagggacagaaccaactgtacaacgagctgaacctgggcagacgggaagagtacgacgtgctggacaagcggagaggcagggaccctgagatgggcggaaagccccagcggagaaagaacccccaggaaggactgtataacgaactccagaaagacaagatggccgaagcctacagcgagatcggcatgaagggcgagcggagaagaggcaagggccacgatggcctgtaccagggcctgagcaccgccaccaaggacacctatgacgccctgcacatgcaggccctgcctccaagataa

SEQ ID NO: 2264 - DNA, 2577 bp, synthetic construct
  source 1..2577: mol_type = other DNA
atggccttaccagtgaccgccttgctcctgccgctggccttgctgctccacgccgccaggccggaattcaatgctggcgtgacccagacacctaagttccaggtgctgaaaaccggccagagcatgaccctgcaatgcgcccaggacatgaaccatgagtacatgagctggtacagacaggaccccggcatgggcctgagactgatccactactctgtggctatccagaccaccgaccagggcgaagtgcccaatggctacaacgtgtccagaagcaccatcgaggacttcccactgagactgctgtctgccgctcctagccagaccagcgtgtacttttgtgccagcagctacctgggcaacaccggcgagctgttttttggcgagggcagcagactgaccgtgctcgaggacctgaagaacgtgttcccacctgaggtggccgtgttcgagcctagcgaggccgagatcagccacacccagaaagccaccctcgtgtgcctggctaccggcttctaccccgaccatgtggaactgtcttggtgggtcaacggcaaagaggtgcacagcggcgtgtctaccgacccccagccactgaaagaacagcccgccctgaacgacagccggtactgcctgagcagcagactgagagtgtccgccaccttctggcagaacccccggaaccacttcagatgccaggtgcagttctacggcctgagcgagaacgacgagtggacccaggacagagccaagcccgtgacccagatcgtgtctgccgaagcctggggcagagccgattgcggatcccagagcttcggcctgctggaccccaagctgtgctacctgctggatggcatcctgttcatctacggcgtgatcctgaccgccctgttcctgagagtgaagttcagcagaagcgccgacgcccctgcctaccagcagggacagaaccaactgtacaacgagctgaacctgggcagacgggaagagtacgacgtgctggacaagcggagaggcagggaccctgagatgggcggaaagccccagcggagaaagaacccccaggaaggactgttcaacgaactccagaaagacaagatggccgaagccttcagcgagatcggcatgaagggcgagcggagaagaggcaagggccacgatggcctgttccagggcctgagcaccgccaccaaggacaccttcgacgccctgcacatgcaggccctgcctccaagaagggccaagcgatctggatctggagcaacaaacttctcactactcaaacaagcaggtgacgtggaggagaatcccgggcctactagtatggactggatttggcgcatccttttccttgtcggcgctgctaccggcgcgcattccttcgaacaagaagtgacacagatccctgccgctctgtctgtgcctgagggcgaaaacctggtgctgaactgctccttcaccgacagcgccatctacaacctccagtggttcaggcaggaccctggaaagggactgacaagcctgctgctgatccagagcagccagagagagcagacctccggcagactgaatgccagcctggataagagcagcggcaggtctaccctgtatatcgccgcttctcagcctggcgatagcgccacatatctgtgtgctgtgcggcctacaagcggcggcagctacatccctacatttggcagaggcaccagcctgatcgtgcacccttatacgcgtatccagaaccctgatcctgccgtgtaccagctgcgggatagcaagagcagcgacaagagcgtgtgtctgttcaccgacttcgacagccagaccaacgtgtcccagagcaaggactccgacgtgtacatcaccgataagaccgtgctggacatgcggagcatggacttcaagagcaactccgccgtggcctggtccaacaagtccgatttcgcctgcgccaacgccttcaacaacagcattatccccgaggacacattcttcccaagccccgagagcagctgcggtacccagagttttgggttgttggaccctaaattgtgctatctgttggacggaatcctgttcatttacggagtgatcctgaccgcattgttcctgaggagcaagcggtcacggctgctccacagcgattacatgaatatgacaccacgaagaccgggtcctactcgcaaacactaccaaccctacgcacctccccgcgactttgcagcgtaccgatctcgggttaagttttccagatccgcagacgcacccgcttaccaacaagggcagaaccaactctacaatgaacttaatttggggcggagggaagagtacgacgttctggacaaaaggaggggacgagatcccgagatgggcggaaagcctcagcgaaggaagaatccgcaagaggggctttataacgaactccagaaagataaaatggcagaagcctatagtgagattgggatgaagggagaaaggaggaggggtaaaggtcacgatgggttgtaccaaggattgagcacagccactaaagatacctatgatgcgctccacatgcaggccctgccgccaagataa

SEQ ID NO: 2265 - DNA, 2580 bp, synthetic construct
  source 1..2580: mol_type = other DNA
atggccttaccagtgaccgccttgctcctgccgctggccttgctgctccacgccgccaggccggaattcaatgctggcgtgacccagacacctaagttccaggtgctgaaaaccggccagagcatgaccctgcaatgcgcccaggacatgaaccatgagtacatgagctggtacagacaggaccccggcatgggcctgagactgatccactactctgtggctatccagaccaccgaccagggcgaagtgcccaatggctacaacgtgtccagaagcaccatcgaggacttcccactgagactgctgtctgccgctcctagccagaccagcgtgtacttttgtgccagcagctacctgggcaacaccggcgagctgttttttggcgagggcagcagactgaccgtgctcgaggacctgaagaacgtgttcccacctgaggtggccgtgttcgagcctagcgaggccgagatcagccacacccagaaagccaccctcgtgtgcctggctaccggcttctaccccgaccatgtggaactgtcttggtgggtcaacggcaaagaggtgcacagcggcgtgtctaccgacccccagccactgaaagaacagcccgccctgaacgacagccggtactgcctgagcagcagactgagagtgtccgccaccttctggcagaacccccggaaccacttcagatgccaggtgcagttctacggcctgagcgagaacgacgagtggacccaggacagagccaagcccgtgacccagatcgtgtctgccgaagcctggggcagagccgattgcggatcccagagcttcggcctgctggaccccaagctgtgctacctgctggatggcatcctgttcatctacggcgtgatcctgaccgccctgttcctgagagtgaagttcagcagaagcgccgacgcccctgcctaccagcagggacagaaccaactgtacaacgagctgaacctgggcagacgggaagagtacgacgtgctggacaagcggagaggcagggaccctgagatgggcggaaagccccagcggagaaagaacccccaggaaggactgttcaacgaactccagaaagacaagatggccgaagccttcagcgagatcggcatgaagggcgagcggagaagaggcaagggccacgatggcctgttccagggcctgagcaccgccaccaaggacaccttcgacgccctgcacatgcaggccctgcctccaagaagggccaagcgatctggatctggagcaacaaacttctcactactcaaacaagcaggtgacgtggaggagaatcccgggcctactagtatggactggatttggcgcatccttttccttgtcggcgctgctaccggcgcgcattccttcgaacaagaagtgacacagatccctgccgctctgtctgtgcctgagggcgaaaacctggtgctgaactgctccttcaccgacagcgccatctacaacctccagtggttcaggcaggaccctggaaagggactgacaagcctgctgctgatccagagcagccagagagagcagacctccggcagactgaatgccagcctggataagagcagcggcaggtctaccctgtatatcgccgcttctcagcctggcgatagcgccacatatctgtgtgctgtgcggcctacaagcggcggcagctacatccctacatttggcagaggcaccagcctgatcgtgcacccttatacgcgtatccagaaccctgatcctgccgtgtaccagctgcgggatagcaagagcagcgacaagagcgtgtgtctgttcaccgacttcgacagccagaccaacgtgtcccagagcaaggactccgacgtgtacatcaccgataagaccgtgctggacatgcggagcatggacttcaagagcaactccgccgtggcctggtccaacaagtccgatttcgcctgcgccaacgccttcaacaacagcattatccccgaggacacattcttcccaagccccgagagcagctgcggtacccagagttttgggttgttggaccctaaattgtgctatctgttggacggaatcctgttcatttacggagtgatcctgaccgcattgttcctgaagagaggccggaagaagctgctgtacatcttcaagcagcctttcatgcggcccgtgcagaccacccaggaagaggacggctgctcctgccggttccccgaggaagaagaaggcggctgcgagctgcgggttaagttttccagatccgcagacgcacccgcttaccaacaagggcagaaccaactctacaatgaacttaatttggggcggagggaagagtacgacgttctggacaaaaggaggggacgagatcccgagatgggcggaaagcctcagcgaaggaagaatccgcaagaggggctttataacgaactccagaaagataaaatggcagaagcctatagtgagattgggatgaagggagaaaggaggaggggtaaaggtcacgatgggttgtaccaaggattgagcacagccactaaagatacctatgatgcgctccacatgcaggccctgccgccaagataa

SEQ ID NO: 2266 - DNA, 2454 bp, synthetic construct
  source 1..2454: mol_type = other DNA
atggccttaccagtgaccgccttgctcctgccgctggccttgctgctccacgccgccaggccggaattcaatgctggcgtgacccagacacctaagttccaggtgctgaaaaccggccagagcatgaccctgcaatgcgcccaggacatgaaccatgagtacatgagctggtacagacaggaccccggcatgggcctgagactgatccactactctgtggctatccagaccaccgaccagggcgaagtgcccaatggctacaacgtgtccagaagcaccatcgaggacttcccactgagactgctgtctgccgctcctagccagaccagcgtgtacttttgtgccagcagctacctgggcaacaccggcgagctgttttttggcgagggcagcagactgaccgtgctcgaggacctgaagaacgtgttcccacctgaggtggccgtgttcgagcctagcgaggccgagatcagccacacccagaaagccaccctcgtgtgcctggctaccggcttctaccccgaccatgtggaactgtcttggtgggtcaacggcaaagaggtgcacagcggcgtgtctaccgacccccagccactgaaagaacagcccgccctgaacgacagccggtactgcctgagcagcagactgagagtgtccgccaccttctggcagaacccccggaaccacttcagatgccaggtgcagttctacggcctgagcgagaacgacgagtggacccaggacagagccaagcccgtgacccagatcgtgtctgccgaagcctggggcagagccgattgcggatcccagagcttcggcctgctggaccccaagctgtgctacctgctggatggcatcctgttcatctacggcgtgatcctgaccgccctgttcctgagagtgaagttcagcagaagcgccgacgcccctgcctaccagcagggacagaaccaactgtacaacgagctgaacctgggcagacgggaagagtacgacgtgctggacaagcggagaggcagggaccctgagatgggcggaaagccccagcggagaaagaacccccaggaaggactgttcaacgaactccagaaagacaagatggccgaagccttcagcgagatcggcatgaagggcgagcggagaagaggcaagggccacgatggcctgttccagggcctgagcaccgccaccaaggacaccttcgacgccctgcacatgcaggccctgcctccaagaagggccaagcgatctggatctggagcaacaaacttctcactactcaaacaagcaggtgacgtggaggagaatcccgggcctactagtatggactggatttggcgcatccttttccttgtcggcgctgctaccggcgcgcattccttcgaacaagaagtgacacagatccctgccgctctgtctgtgcctgagggcgaaaacctggtgctgaactgctccttcaccgacagcgccatctacaacctccagtggttcaggcaggaccctggaaagggactgacaagcctgctgctgatccagagcagccagagagagcagacctccggcagactgaatgccagcctggataagagcagcggcaggtctaccctgtatatcgccgcttctcagcctggcgatagcgccacatatctgtgtgctgtgcggcctacaagcggcggcagctacatccctacatttggcagaggcaccagcctgatcgtgcacccttatacgcgtatccagaaccctgatcctgccgtgtaccagctgcgggatagcaagagcagcgacaagagcgtgtgtctgttcaccgacttcgacagccagaccaacgtgtcccagagcaaggactccgacgtgtacatcaccgataagaccgtgctggacatgcggagcatggacttcaagagcaactccgccgtggcctggtccaacaagtccgatttcgcctgcgccaacgccttcaacaacagcattatccccgaggacacattcttcccaagccccgagagcagctgcggtacccagagcttcggcctgctggaccccaagctgagctacctgctggatggcatcctgttcatctacggcgtgatcctgaccgccctgttcctgagagtgaagttcagcagaagcgccgacgcccctgcctaccagcagggacagaaccaactgtacaacgagctgaacctgggcagacgggaagagtacgacgtgctggacaagcggagaggcagggaccctgagatgggcggaaagccccagcggagaaagaacccccaggaaggactgtataacgaactccagaaagacaagatggccgaagcctacagcgagatcggcatgaagggcgagcggagaagaggcaagggccacgatggcctgtaccagggcctgagcaccgccaccaaggacacctatgacgccctgcacatgcaggccctgcctccaagataa

SEQ ID NO: 2267 - DNA, 2454 bp, synthetic construct
  source 1..2454: mol_type = other DNA
atggccttaccagtgaccgccttgctcctgccgctggccttgctgctccacgccgccaggccggaattcaatgctggcgtgacccagacacctaagttccaggtgctgaaaaccggccagagcatgaccctgcaatgcgcccaggacatgaaccatgagtacatgagctggtacagacaggaccccggcatgggcctgagactgatccactactctgtggctatccagaccaccgaccagggcgaagtgcccaatggctacaacgtgtccagaagcaccatcgaggacttcccactgagactgctgtctgccgctcctagccagaccagcgtgtacttttgtgccagcagctacctgggcaacaccggcgagctgttttttggcgagggcagcagactgaccgtgctcgaggacctgaagaacgtgttcccacctgaggtggccgtgttcgagcctagcgaggccgagatcagccacacccagaaagccaccctcgtgtgcctggctaccggcttctaccccgaccatgtggaactgtcttggtgggtcaacggcaaagaggtgcacagcggcgtgtctaccgacccccagccactgaaagaacagcccgccctgaacgacagccggtactgcctgagcagcagactgagagtgtccgccaccttctggcagaacccccggaaccacttcagatgccaggtgcagttctacggcctgagcgagaacgacgagtggacccaggacagagccaagcccgtgacccagatcgtgtctgccgaagcctggggcagagccgattgcggatcccagagcttcggcctgctggaccccaagctgtgctacctgctggatggcatcctgttcatctacggcgtgatcctgaccgccctgttcctgagagtgaagttcagcagaagcgccgacgcccctgcctaccagcagggacagaaccaactgtacaacgagctgaacctgggcagacgggaagagtacgacgtgctggacaagcggagaggcagggaccctgagatgggcggaaagccccagcggagaaagaacccccaggaaggactgttcaacgaactccagaaagacaagatggccgaagccttcagcgagatcggcatgaagggcgagcggagaagaggcaagggccacgatggcctgttccagggcctgagcaccgccaccaaggacaccttcgacgccctgcacatgcaggccctgcctccaagaagggccaagcgatctggatctggagcaacaaacttctcactactcaaacaagcaggtgacgtggaggagaatcccgggcctactagtatggactggatttggcgcatccttttccttgtcggcgctgctaccggcgcgcattccttcgaacaagaagtgacacagatccctgccgctctgtctgtgcctgagggcgaaaacctggtgctgaactgctccttcaccgacagcgccatctacaacctccagtggttcaggcaggaccctggaaagggactgacaagcctgctgctgatccagagcagccagagagagcagacctccggcagactgaatgccagcctggataagagcagcggcaggtctaccctgtatatcgccgcttctcagcctggcgatagcgccacatatctgtgtgctgtgcggcctacaagcggcggcagctacatccctacatttggcagaggcaccagcctgatcgtgcacccttatacgcgtatccagaaccctgatcctgccgtgtaccagctgcgggatagcaagagcagcgacaagagcgtgtgtctgttcaccgacttcgacagccagaccaacgtgtcccagagcaaggactccgacgtgtacatcaccgataagaccgtgctggacatgcggagcatggacttcaagagcaactccgccgtggcctggtccaacaagtccgatttcgcctgcgccaacgccttcaacaacagcattatccccgaggacacattcttcccaagccccgagagcagctgcggtacccagagttttgggttgttggaccctaaattgagctatctgttggacggaatcctgttcatttacggagtgatcctgaccgcattgttcctgcgggttaagttttccagatccgcagacgcacccgcttaccaacaagggcagaaccaactctacaatgaacttaatttggggcggagggaagagtacgacgttctggacaaaaggaggggacgagatcccgagatgggcggaaagcctcagcgaaggaagaatccgcaagaggggctttataacgaactccagaaagataaaatggcagaagcctatagtgagattgggatgaagggagaaaggaggaggggtaaaggtcacgatgggttgtaccaaggattgagcacagccactaaagatacctatgatgcgctccacatgcaggccctgccgccaagataa

SEQ ID NO: 2268 - DNA, 2454 bp, synthetic construct
  source 1..2454: mol_type = other DNA
atggccttaccagtgaccgccttgctcctgccgctggccttgctgctccacgccgccaggccggaattcaatgctggcgtgacccagacacctaagttccaggtgctgaaaaccggccagagcatgaccctgcaatgcgcccaggacatgaaccatgagtacatgagctggtacagacaggaccccggcatgggcctgagactgatccactactctgtggctatccagaccaccgaccagggcgaagtgcccaatggctacaacgtgtccagaagcaccatcgaggacttcccactgagactgctgtctgccgctcctagccagaccagcgtgtacttttgtgccagcagctacctgggcaacaccggcgagctgttttttggcgagggcagcagactgaccgtgctcgaggacctgaagaacgtgttcccacctgaggtggccgtgttcgagcctagcgaggccgagatcagccacacccagaaagccaccctcgtgtgcctggctaccggcttctaccccgaccatgtggaactgtcttggtgggtcaacggcaaagaggtgcacagcggcgtgtctaccgacccccagccactgaaagaacagcccgccctgaacgacagccggtactgcctgagcagcagactgagagtgtccgccaccttctggcagaacccccggaaccacttcagatgccaggtgcagttctacggcctgagcgagaacgacgagtggacccaggacagagccaagcccgtgacccagatcgtgtctgccgaagcctggggcagagccgattgcggatcccagagcttcggcctgctggaccccaagctgagctacctgctggatggcatcctgttcatctacggcgtgatcctgaccgccctgttcctgagagtgaagttcagcagaagcgccgacgcccctgcctaccagcagggacagaaccaactgtacaacgagctgaacctgggcagacgggaagagtacgacgtgctggacaagcggagaggcagggaccctgagatgggcggaaagccccagcggagaaagaacccccaggaaggactgtataacgaactccagaaagacaagatggccgaagcctacagcgagatcggcatgaagggcgagcggagaagaggcaagggccacgatggcctgtaccagggcctgagcaccgccaccaaggacacctatgacgccctgcacatgcaggccctgcctccaagaagggccaagcgatctggatctggagcaacaaacttctcactactcaaacaagcaggtgacgtggaggagaatcccgggcctactagtatggactggatttggcgcatccttttccttgtcggcgctgctaccggcgcgcattccttcgaacaagaagtgacacagatccctgccgctctgtctgtgcctgagggcgaaaacctggtgctgaactgctccttcaccgacagcgccatctacaacctccagtggttcaggcaggaccctggaaagggactgacaagcctgctgctgatccagagcagccagagagagcagacctccggcagactgaatgccagcctggataagagcagcggcaggtctaccctgtatatcgccgcttctcagcctggcgatagcgccacatatctgtgtgctgtgcggcctacaagcggcggcagctacatccctacatttggcagaggcaccagcctgatcgtgcacccttatacgcgtatccagaaccctgatcctgccgtgtaccagctgcgggatagcaagagcagcgacaagagcgtgtgtctgttcaccgacttcgacagccagaccaacgtgtcccagagcaaggactccgacgtgtacatcaccgataagaccgtgctggacatgcggagcatggacttcaagagcaactccgccgtggcctggtccaacaagtccgatttcgcctgcgccaacgccttcaacaacagcattatccccgaggacacattcttcccaagccccgagagcagctgcggtacccagagttttgggttgttggaccctaaattgagctatctgttggacggaatcctgttcatttacggagtgatcctgaccgcattgttcctgcgggttaagttttccagatccgcagacgcacccgcttaccaacaagggcagaaccaactctacaatgaacttaatttggggcggagggaagagtacgacgttctggacaaaaggaggggacgagatcccgagatgggcggaaagcctcagcgaaggaagaatccgcaagaggggctttataacgaactccagaaagataaaatggcagaagcctatagtgagattgggatgaagggagaaaggaggaggggtaaaggtcacgatgggttgtaccaaggattgagcacagccactaaagatacctatgatgcgctccacatgcaggccctgccgccaagataa

SEQ ID NO: 2269 - DNA, 2166 bp, synthetic construct
  source 1..2166: mol_type = other DNA
atggccttaccagtgaccgccttgctcctgccgctggccttgctgctccacgccgccaggccggaattcaatgctggcgtgacccagacacctaagttccaggtgctgaaaaccggccagagcatgaccctgcaatgcgcccaggacatgaaccatgagtacatgagctggtacagacaggaccccggcatgggcctgagactgatccactactctgtggctatccagaccaccgaccagggcgaagtgcccaatggctacaacgtgtccagaagcaccatcgaggacttcccactgagactgctgtctgccgctcctagccagaccagcgtgtacttttgtgccagcagctacctgggcaacaccggcgagctgttttttggcgagggcagcagactgaccgtgctcgaggacctgaagaacgtgttcccacctgaggtggccgtgttcgagcctagcgaggccgagatcagccacacccagaaagccaccctcgtgtgcctggctaccggcttctaccccgaccatgtggaactgtcttggtgggtcaacggcaaagaggtgcacagcggcgtgtctaccgacccccagccactgaaagaacagcccgccctgaacgacagccggtactgcctgagcagcagactgagagtgtccgccaccttctggcagaacccccggaaccacttcagatgccaggtgcagttctacggcctgagcgagaacgacgagtggacccaggacagagccaagcccgtgacccagatcgtgtctgccgaagcctggggcagagccgattgcggatccacaacacctggcgagagaagtagcctgcctgccttctatcctggcaccagcggctcttgttctggctgtggatctctgagcctgcctctgctggctggactggttgctgctgatgctgtggcctctctgctgattgtgggagccgtgttcctgtgcgccagacctagaagaagccccgctcaagaggacggcaaggtgtacatcaacatgcccggcagaggaagggccaagcgatctggatctggagcaacaaacttctcactactcaaacaagcaggtgacgtggaggagaatcccgggcctactagtatggactggatttggcgcatccttttccttgtcggcgctgctaccggcgcgcattccttcgaacaagaagtgacacagatccctgccgctctgtctgtgcctgagggcgaaaacctggtgctgaactgctccttcaccgacagcgccatctacaacctccagtggttcaggcaggaccctggaaagggactgacaagcctgctgctgatccagagcagccagagagagcagacctccggcagactgaatgccagcctggataagagcagcggcaggtctaccctgtatatcgccgcttctcagcctggcgatagcgccacatatctgtgtgctgtgcggcctacaagcggcggcagctacatccctacatttggcagaggcaccagcctgatcgtgcacccttatacgcgtatccagaaccctgatcctgccgtgtaccagctgcgggatagcaagagcagcgacaagagcgtgtgtctgttcaccgacttcgacagccagaccaacgtgtcccagagcaaggactccgacgtgtacatcaccgataagaccgtgctggacatgcggagcatggacttcaagagcaactccgccgtggcctggtccaacaagtccgatttcgcctgcgccaacgccttcaacaacagcattatccccgaggacacattcttcccaagccccgagagcagctgcggtaccacaacacctggcgagagaagtagcctgcctgccttctatcctggcaccagcggctcttgttctggctgtggatctctgagcctgcctctgctggctggactggttgctgctgatgctgtggcctctctgctgattgtgggagccgtgttcaaacggggcagaaagaaactcctgtatatattcaaacaaccatttatgagaccagtacaaactactcaagaggaagatggctgtagctgccgatttccagaagaagaagaaggaggatgtgaactgctgtgcgccagacctagaagaagccccgctcaagaggacggcaaggtgtacatcaacatgcccggcagaggataa

SEQ ID NO: 2270 - DNA, 2163 bp, synthetic construct
  source 1..2163: mol_type = other DNA
atggccttaccagtgaccgccttgctcctgccgctggccttgctgctccacgccgccaggccggaattcaatgctggcgtgacccagacacctaagttccaggtgctgaaaaccggccagagcatgaccctgcaatgcgcccaggacatgaaccatgagtacatgagctggtacagacaggaccccggcatgggcctgagactgatccactactctgtggctatccagaccaccgaccagggcgaagtgcccaatggctacaacgtgtccagaagcaccatcgaggacttcccactgagactgctgtctgccgctcctagccagaccagcgtgtacttttgtgccagcagctacctgggcaacaccggcgagctgttttttggcgagggcagcagactgaccgtgctcgaggacctgaagaacgtgttcccacctgaggtggccgtgttcgagcctagcgaggccgagatcagccacacccagaaagccaccctcgtgtgcctggctaccggcttctaccccgaccatgtggaactgtcttggtgggtcaacggcaaagaggtgcacagcggcgtgtctaccgacccccagccactgaaagaacagcccgccctgaacgacagccggtactgcctgagcagcagactgagagtgtccgccaccttctggcagaacccccggaaccacttcagatgccaggtgcagttctacggcctgagcgagaacgacgagtggacccaggacagagccaagcccgtgacccagatcgtgtctgccgaagcctggggcagagccgattgcggatccacaacacctggcgagagaagtagcctgcctgccttctatcctggcaccagcggctcttgttctggctgtggatctctgagcctgcctctgctggctggactggttgctgctgatgctgtggcctctctgctgattgtgggagccgtgttcctgtgcgccagacctagaagaagccccgctcaagaggacggcaaggtgtacatcaacatgcccggcagaggaagggccaagcgatctggatctggagcaacaaacttctcactactcaaacaagcaggtgacgtggaggagaatcccgggcctactagtatggactggatttggcgcatccttttccttgtcggcgctgctaccggcgcgcattccttcgaacaagaagtgacacagatccctgccgctctgtctgtgcctgagggcgaaaacctggtgctgaactgctccttcaccgacagcgccatctacaacctccagtggttcaggcaggaccctggaaagggactgacaagcctgctgctgatccagagcagccagagagagcagacctccggcagactgaatgccagcctggataagagcagcggcaggtctaccctgtatatcgccgcttctcagcctggcgatagcgccacatatctgtgtgctgtgcggcctacaagcggcggcagctacatccctacatttggcagaggcaccagcctgatcgtgcacccttatacgcgtatccagaaccctgatcctgccgtgtaccagctgcgggatagcaagagcagcgacaagagcgtgtgtctgttcaccgacttcgacagccagaccaacgtgtcccagagcaaggactccgacgtgtacatcaccgataagaccgtgctggacatgcggagcatggacttcaagagcaactccgccgtggcctggtccaacaagtccgatttcgcctgcgccaacgccttcaacaacagcattatccccgaggacacattcttcccaagccccgagagcagctgcggtaccacaacacctggcgagagaagtagcctgcctgccttctatcctggcaccagcggctcttgttctggctgtggatctctgagcctgcctctgctggctggactggttgctgctgatgctgtggcctctctgctgattgtgggagccgtgttcaggagtaagaggagcaggctcctgcacagtgactacatgaacatgactccacgccgccccggacccacccgcaagcattaccagccctatgccccaccacgcgacttcgcagcctatcgctccctgtgcgccagacctagaagaagccccgctcaagaggacggcaaggtgtacatcaacatgcccggcagaggataa

SEQ ID NO: 2271 - DNA, 2148 bp, synthetic construct
  source 1..2148: mol_type = other DNA
atggccttaccagtgaccgccttgctcctgccgctggccttgctgctccacgccgccaggccggaattcaatgctggcgtgacccagacacctaagttccaggtgctgaaaaccggccagagcatgaccctgcaatgcgcccaggacatgaaccatgagtacatgagctggtacagacaggaccccggcatgggcctgagactgatccactactctgtggctatccagaccaccgaccagggcgaagtgcccaatggctacaacgtgtccagaagcaccatcgaggacttcccactgagactgctgtctgccgctcctagccagaccagcgtgtacttttgtgccagcagctacctgggcaacaccggcgagctgttttttggcgagggcagcagactgaccgtgctcgaggacctgaagaacgtgttcccacctgaggtggccgtgttcgagcctagcgaggccgagatcagccacacccagaaagccaccctcgtgtgcctggctaccggcttctaccccgaccatgtggaactgtcttggtgggtcaacggcaaagaggtgcacagcggcgtgtctaccgacccccagccactgaaagaacagcccgccctgaacgacagccggtactgcctgagcagcagactgagagtgtccgccaccttctggcagaacccccggaaccacttcagatgccaggtgcagttctacggcctgagcgagaacgacgagtggacccaggacagagccaagcccgtgacccagatcgtgtctgccgaagcctggggcagagccgattgcggatccacaacacctggcgagagaagtagcctgcctgccttctatcctggcaccagcggctcttgttctggctgtggatctctgagcctgcctctgctggctggactggttgctgctgatgctgtggcctctctgctgattgtgggagccgtgttcctgtgcgccagacctagaagaagccccgctcaagaggacggcaaggtgtacatcaacatgcccggcagaggaagggccaagcgatctggatctggagcaacaaacttctcactactcaaacaagcaggtgacgtggaggagaatcccgggcctactagtatggactggatttggcgcatccttttccttgtcggcgctgctaccggcgcgcattccttcgaacaagaagtgacacagatccctgccgctctgtctgtgcctgagggcgaaaacctggtgctgaactgctccttcaccgacagcgccatctacaacctccagtggttcaggcaggaccctggaaagggactgacaagcctgctgctgatccagagcagccagagagagcagacctccggcagactgaatgccagcctggataagagcagcggcaggtctaccctgtatatcgccgcttctcagcctggcgatagcgccacatatctgtgtgctgtgcggcctacaagcggcggcagctacatccctacatttggcagaggcaccagcctgatcgtgcacccttatacgcgtatccagaaccctgatcctgccgtgtaccagctgcgggatagcaagagcagcgacaagagcgtgtgtctgttcaccgacttcgacagccagaccaacgtgtcccagagcaaggactccgacgtgtacatcaccgataagaccgtgctggacatgcggagcatggacttcaagagcaactccgccgtggcctggtccaacaagtccgatttcgcctgcgccaacgccttcaacaacagcattatccccgaggacacattcttcccaagccccgagagcagctgcggtaccacaacacctggcgagagaagtagcctgcctgccttctatcctggcaccagcggctcttgttctggctgtggatctctgagcctgcctctgctggctggactggttgctgctgatgctgtggcctctctgctgattgtgggagccgtgttcagggaccaaagactgcctcctgacgctcacaaacctccaggcggaggcagcttcagaacccctatccaagaggaacaggctgacgcccacagcaccctggcaaaaattctgtgcgccagacctagaagaagccccgctcaagaggacggcaaggtgtacatcaacatgcccggcagaggataa

SEQ ID NO: 2272 - DNA, 2400 bp, synthetic construct
  source 1..2400: mol_type = other DNA
atggccttaccagtgaccgccttgctcctgccgctggccttgctgctccacgccgccaggccggaattcaatgctggcgtgacccagacacctaagttccaggtgctgaaaaccggccagagcatgaccctgcaatgcgcccaggacatgaaccatgagtacatgagctggtacagacaggaccccggcatgggcctgagactgatccactactctgtggctatccagaccaccgaccagggcgaagtgcccaatggctacaacgtgtccagaagcaccatcgaggacttcccactgagactgctgtctgccgctcctagccagaccagcgtgtacttttgtgccagcagctacctgggcaacaccggcgagctgttttttggcgagggcagcagactgaccgtgctcgaggacctgaagaacgtgttcccacctgaggtggccgtgttcgagcctagcgaggccgagatcagccacacccagaaagccaccctcgtgtgcctggctaccggcttctaccccgaccatgtggaactgtcttggtgggtcaacggcaaagaggtgcacagcggcgtgtctaccgacccccagccactgaaagaacagcccgccctgaacgacagccggtactgcctgagcagcagactgagagtgtccgccaccttctggcagaacccccggaaccacttcagatgccaggtgcagttctacggcctgagcgagaacgacgagtggacccaggacagagccaagcccgtgacccagatcgtgtctgccgaagcctggggcagagccgattgcggatccacaacacctggcgagagaagtagcctgcctgccttctatcctggcaccagcggctcttgttctggctgtggatctctgagcctgcctctgctggctggactggttgctgctgatgctgtggcctctctgctgattgtgggagccgtgttcctgtgcgccagacctagaagaagccccgctcaagaggacggcaaggtgtacatcaacatgcccggcagaggaagggccaagcgatctggatctggagcaacaaacttctcactactcaaacaagcaggtgacgtggaggagaatcccgggcctactagtatggactggatttggcgcatccttttccttgtcggcgctgctaccggcgcgcattccttcgaacaagaagtgacacagatccctgccgctctgtctgtgcctgagggcgaaaacctggtgctgaactgctccttcaccgacagcgccatctacaacctccagtggttcaggcaggaccctggaaagggactgacaagcctgctgctgatccagagcagccagagagagcagacctccggcagactgaatgccagcctggataagagcagcggcaggtctaccctgtatatcgccgcttctcagcctggcgatagcgccacatatctgtgtgctgtgcggcctacaagcggcggcagctacatccctacatttggcagaggcaccagcctgatcgtgcacccttatacgcgtatccagaaccctgatcctgccgtgtaccagctgcgggatagcaagagcagcgacaagagcgtgtgtctgttcaccgacttcgacagccagaccaacgtgtcccagagcaaggactccgacgtgtacatcaccgataagaccgtgctggacatgcggagcatggacttcaagagcaactccgccgtggcctggtccaacaagtccgatttcgcctgcgccaacgccttcaacaacagcattatccccgaggacacattcttcccaagccccgagagcagctgcggtaccacaacacctggcgagagaagtagcctgcctgccttctatcctggcaccagcggctcttgttctggctgtggatctctgagcctgcctctgctggctggactggttgctgctgatgctgtggcctctctgctgattgtgggagccgtgttctggcggcggaagcggaaagagaagcagtctgagacaagccccaaagagttcctgaccatctacgaggacgtgaaggacctgaaaacccggcggaaccacgaacaagagcagacctttcctggcggaggcagcaccatctacagcatgatccagagccagagcagcgcccctacaagccaagagcctgcctacacactgtactccctgatccagcctagcagaaagagcggcagccggaagagaaatcacagccccagcttcaacagcacgatctacgaagtgatcggcaagagccagccaaaggctcagaaccctgccagactgagccggaaagagctggaaaacttcgacgtgtacagcctgtgcgccagacctagaagaagccccgctcaagaggacggcaaggtgtacatcaacatgcccggcagaggataa

SEQ ID NO: 2273 - DNA, 2253 bp, synthetic construct
  source 1..2253: mol_type = other DNA
atggccttaccagtgaccgccttgctcctgccgctggccttgctgctccacgccgccaggccggaattcaatgctggcgtgacccagacacctaagttccaggtgctgaaaaccggccagagcatgaccctgcaatgcgcccaggacatgaaccatgagtacatgagctggtacagacaggaccccggcatgggcctgagactgatccactactctgtggctatccagaccaccgaccagggcgaagtgcccaatggctacaacgtgtccagaagcaccatcgaggacttcccactgagactgctgtctgccgctcctagccagaccagcgtgtacttttgtgccagcagctacctgggcaacaccggcgagctgttttttggcgagggcagcagactgaccgtgctcgaggacctgaagaacgtgttcccacctgaggtggccgtgttcgagcctagcgaggccgagatcagccacacccagaaagccaccctcgtgtgcctggctaccggcttctaccccgaccatgtggaactgtcttggtgggtcaacggcaaagaggtgcacagcggcgtgtctaccgacccccagccactgaaagaacagcccgccctgaacgacagccggtactgcctgagcagcagactgagagtgtccgccaccttctggcagaacccccggaaccacttcagatgccaggtgcagttctacggcctgagcgagaacgacgagtggacccaggacagagccaagcccgtgacccagatcgtgtctgccgaagcctggggcagagccgattgcggatccctgggagagcctcagctgtgctatatcctggacgccatcctgtttctgtacggcatcgtgctgaccctgctgtactgcaaacggggcagaaagaaactcctgtatatattcaaacaaccatttatgagaccagtacaaactactcaagaggaagatggctgtagctgccgatttccagaagaagaagaaggaggatgtgaactgcggctgaagatccaagtgcggaaggccgccatcaccagctacgagaaatccgacggcgtgtacaccggcctgagcaccagaaatcaagagacatacgagacactgaagcacgaaaagcctccacaaagggccaagcgatctggatctggagcaacaaacttctcactactcaaacaagcaggtgacgtggaggagaatcccgggcctactagtatggactggatttggcgcatccttttccttgtcggcgctgctaccggcgcgcattccttcgaacaagaagtgacacagatccctgccgctctgtctgtgcctgagggcgaaaacctggtgctgaactgctccttcaccgacagcgccatctacaacctccagtggttcaggcaggaccctggaaagggactgacaagcctgctgctgatccagagcagccagagagagcagacctccggcagactgaatgccagcctggataagagcagcggcaggtctaccctgtatatcgccgcttctcagcctggcgatagcgccacatatctgtgtgctgtgcggcctacaagcggcggcagctacatccctacatttggcagaggcaccagcctgatcgtgcacccttatacgcgtatccagaaccctgatcctgccgtgtaccagctgcgggatagcaagagcagcgacaagagcgtgtgtctgttcaccgacttcgacagccagaccaacgtgtcccagagcaaggactccgacgtgtacatcaccgataagaccgtgctggacatgcggagcatggacttcaagagcaactccgccgtggcctggtccaacaagtccgatttcgcctgcgccaacgccttcaacaacagcattatccccgaggacacattcttcccaagccccgagagcagctgcggtaccctgggagagcctcagctgtgctatatcctggacgccatcctgtttctgtacggcatcgtgctgaccctgctgtactgcaggagtaagaggagcaggctcctgcacagtgactacatgaacatgactccacgccgccccggacccacccgcaagcattaccagccctatgccccaccacgcgacttcgcagcctatcgctcccggctgaagatccaagtgcggaaggccgccatcaccagctacgagaaatccgacggcgtgtacaccggcctgagcaccagaaatcaagagacatacgagacactgaagcacgaaaagcctccacaataa

SEQ ID NO: 2274 - DNA, 2238 bp, synthetic construct
  source 1..2238: mol_type = other DNA
atggccttaccagtgaccgccttgctcctgccgctggccttgctgctccacgccgccaggccggaattcaatgctggcgtgacccagacacctaagttccaggtgctgaaaaccggccagagcatgaccctgcaatgcgcccaggacatgaaccatgagtacatgagctggtacagacaggaccccggcatgggcctgagactgatccactactctgtggctatccagaccaccgaccagggcgaagtgcccaatggctacaacgtgtccagaagcaccatcgaggacttcccactgagactgctgtctgccgctcctagccagaccagcgtgtacttttgtgccagcagctacctgggcaacaccggcgagctgttttttggcgagggcagcagactgaccgtgctcgaggacctgaagaacgtgttcccacctgaggtggccgtgttcgagcctagcgaggccgagatcagccacacccagaaagccaccctcgtgtgcctggctaccggcttctaccccgaccatgtggaactgtcttggtgggtcaacggcaaagaggtgcacagcggcgtgtctaccgacccccagccactgaaagaacagcccgccctgaacgacagccggtactgcctgagcagcagactgagagtgtccgccaccttctggcagaacccccggaaccacttcagatgccaggtgcagttctacggcctgagcgagaacgacgagtggacccaggacagagccaagcccgtgacccagatcgtgtctgccgaagcctggggcagagccgattgcggatccctgggagagcctcagctgtgctatatcctggacgccatcctgtttctgtacggcatcgtgctgaccctgctgtactgcaaacggggcagaaagaaactcctgtatatattcaaacaaccatttatgagaccagtacaaactactcaagaggaagatggctgtagctgccgatttccagaagaagaagaaggaggatgtgaactgcggctgaagatccaagtgcggaaggccgccatcaccagctacgagaaatccgacggcgtgtacaccggcctgagcaccagaaatcaagagacatacgagacactgaagcacgaaaagcctccacaaagggccaagcgatctggatctggagcaacaaacttctcactactcaaacaagcaggtgacgtggaggagaatcccgggcctactagtatggactggatttggcgcatccttttccttgtcggcgctgctaccggcgcgcattccttcgaacaagaagtgacacagatccctgccgctctgtctgtgcctgagggcgaaaacctggtgctgaactgctccttcaccgacagcgccatctacaacctccagtggttcaggcaggaccctggaaagggactgacaagcctgctgctgatccagagcagccagagagagcagacctccggcagactgaatgccagcctggataagagcagcggcaggtctaccctgtatatcgccgcttctcagcctggcgatagcgccacatatctgtgtgctgtgcggcctacaagcggcggcagctacatccctacatttggcagaggcaccagcctgatcgtgcacccttatacgcgtatccagaaccctgatcctgccgtgtaccagctgcgggatagcaagagcagcgacaagagcgtgtgtctgttcaccgacttcgacagccagaccaacgtgtcccagagcaaggactccgacgtgtacatcaccgataagaccgtgctggacatgcggagcatggacttcaagagcaactccgccgtggcctggtccaacaagtccgatttcgcctgcgccaacgccttcaacaacagcattatccccgaggacacattcttcccaagccccgagagcagctgcggtaccctgggagagcctcagctgtgctatatcctggacgccatcctgtttctgtacggcatcgtgctgaccctgctgtactgcagggaccaaagactgcctcctgacgctcacaaacctccaggcggaggcagcttcagaacccctatccaagaggaacaggctgacgcccacagcaccctggcaaaaattcggctgaagatccaagtgcggaaggccgccatcaccagctacgagaaatccgacggcgtgtacaccggcctgagcaccagaaatcaagagacatacgagacactgaagcacgaaaagcctccacaataa

SEQ ID NO: 2275 - DNA, 2490 bp, synthetic construct
  source 1..2490: mol_type = other DNA
atggccttaccagtgaccgccttgctcctgccgctggccttgctgctccacgccgccaggccggaattcaatgctggcgtgacccagacacctaagttccaggtgctgaaaaccggccagagcatgaccctgcaatgcgcccaggacatgaaccatgagtacatgagctggtacagacaggaccccggcatgggcctgagactgatccactactctgtggctatccagaccaccgaccagggcgaagtgcccaatggctacaacgtgtccagaagcaccatcgaggacttcccactgagactgctgtctgccgctcctagccagaccagcgtgtacttttgtgccagcagctacctgggcaacaccggcgagctgttttttggcgagggcagcagactgaccgtgctcgaggacctgaagaacgtgttcccacctgaggtggccgtgttcgagcctagcgaggccgagatcagccacacccagaaagccaccctcgtgtgcctggctaccggcttctaccccgaccatgtggaactgtcttggtgggtcaacggcaaagaggtgcacagcggcgtgtctaccgacccccagccactgaaagaacagcccgccctgaacgacagccggtactgcctgagcagcagactgagagtgtccgccaccttctggcagaacccccggaaccacttcagatgccaggtgcagttctacggcctgagcgagaacgacgagtggacccaggacagagccaagcccgtgacccagatcgtgtctgccgaagcctggggcagagccgattgcggatccctgggagagcctcagctgtgctatatcctggacgccatcctgtttctgtacggcatcgtgctgaccctgctgtactgcaaacggggcagaaagaaactcctgtatatattcaaacaaccatttatgagaccagtacaaactactcaagaggaagatggctgtagctgccgatttccagaagaagaagaaggaggatgtgaactgcggctgaagatccaagtgcggaaggccgccatcaccagctacgagaaatccgacggcgtgtacaccggcctgagcaccagaaatcaagagacatacgagacactgaagcacgaaaagcctccacaaagggccaagcgatctggatctggagcaacaaacttctcactactcaaacaagcaggtgacgtggaggagaatcccgggcctactagtatggactggatttggcgcatccttttccttgtcggcgctgctaccggcgcgcattccttcgaacaagaagtgacacagatccctgccgctctgtctgtgcctgagggcgaaaacctggtgctgaactgctccttcaccgacagcgccatctacaacctccagtggttcaggcaggaccctggaaagggactgacaagcctgctgctgatccagagcagccagagagagcagacctccggcagactgaatgccagcctggataagagcagcggcaggtctaccctgtatatcgccgcttctcagcctggcgatagcgccacatatctgtgtgctgtgcggcctacaagcggcggcagctacatccctacatttggcagaggcaccagcctgatcgtgcacccttatacgcgtatccagaaccctgatcctgccgtgtaccagctgcgggatagcaagagcagcgacaagagcgtgtgtctgttcaccgacttcgacagccagaccaacgtgtcccagagcaaggactccgacgtgtacatcaccgataagaccgtgctggacatgcggagcatggacttcaagagcaactccgccgtggcctggtccaacaagtccgatttcgcctgcgccaacgccttcaacaacagcattatccccgaggacacattcttcccaagccccgagagcagctgcggtaccctgggagagcctcagctgtgctatatcctggacgccatcctgtttctgtacggcatcgtgctgaccctgctgtactgctggcggcggaagcggaaagagaagcagtctgagacaagccccaaagagttcctgaccatctacgaggacgtgaaggacctgaaaacccggcggaaccacgaacaagagcagacctttcctggcggaggcagcaccatctacagcatgatccagagccagagcagcgcccctacaagccaagagcctgcctacacactgtactccctgatccagcctagcagaaagagcggcagccggaagagaaatcacagccccagcttcaacagcacgatctacgaagtgatcggcaagagccagccaaaggctcagaaccctgccagactgagccggaaagagctggaaaacttcgacgtgtacagccggctgaagatccaagtgcggaaggccgccatcaccagctacgagaaatccgacggcgtgtacaccggcctgagcaccagaaatcaagagacatacgagacactgaagcacgaaaagcctccacaataa

SEQ ID NO: 2276 - DNA, 2256 bp, synthetic construct
  source 1..2256: mol_type = other DNA
atggccttaccagtgaccgccttgctcctgccgctggccttgctgctccacgccgccaggccggaattcaatgctggcgtgacccagacacctaagttccaggtgctgaaaaccggccagagcatgaccctgcaatgcgcccaggacatgaaccatgagtacatgagctggtacagacaggaccccggcatgggcctgagactgatccactactctgtggctatccagaccaccgaccagggcgaagtgcccaatggctacaacgtgtccagaagcaccatcgaggacttcccactgagactgctgtctgccgctcctagccagaccagcgtgtacttttgtgccagcagctacctgggcaacaccggcgagctgttttttggcgagggcagcagactgaccgtgctcgaggacctgaagaacgtgttcccacctgaggtggccgtgttcgagcctagcgaggccgagatcagccacacccagaaagccaccctcgtgtgcctggctaccggcttctaccccgaccatgtggaactgtcttggtgggtcaacggcaaagaggtgcacagcggcgtgtctaccgacccccagccactgaaagaacagcccgccctgaacgacagccggtactgcctgagcagcagactgagagtgtccgccaccttctggcagaacccccggaaccacttcagatgccaggtgcagttctacggcctgagcgagaacgacgagtggacccaggacagagccaagcccgtgacccagatcgtgtctgccgaagcctggggcagagccgattgcggatccctgggagagcctcagctgtgctatatcctggacgccatcctgtttctgtacggcatcgtgctgaccctgctgtactgcaaacggggcagaaagaaactcctgtatatattcaaacaaccatttatgagaccagtacaaactactcaagaggaagatggctgtagctgccgatttccagaagaagaagaaggaggatgtgaactgcggctgaagatccaagtgcggaaggccgccatcaccagctacgagaaatccgacggcgtgtacaccggcctgagcaccagaaatcaagagacatacgagacactgaagcacgaaaagcctccacaaagggccaagcgatctggatctggagcaacaaacttctcactactcaaacaagcaggtgacgtggaggagaatcccgggcctactagtatggactggatttggcgcatccttttccttgtcggcgctgctaccggcgcgcattccttcgaacaagaagtgacacagatccctgccgctctgtctgtgcctgagggcgaaaacctggtgctgaactgctccttcaccgacagcgccatctacaacctccagtggttcaggcaggaccctggaaagggactgacaagcctgctgctgatccagagcagccagagagagcagacctccggcagactgaatgccagcctggataagagcagcggcaggtctaccctgtatatcgccgcttctcagcctggcgatagcgccacatatctgtgtgctgtgcggcctacaagcggcggcagctacatccctacatttggcagaggcaccagcctgatcgtgcacccttatacgcgtatccagaaccctgatcctgccgtgtaccagctgcgggatagcaagagcagcgacaagagcgtgtgtctgttcaccgacttcgacagccagaccaacgtgtcccagagcaaggactccgacgtgtacatcaccgataagaccgtgctggacatgcggagcatggacttcaagagcaactccgccgtggcctggtccaacaagtccgatttcgcctgcgccaacgccttcaacaacagcattatccccgaggacacattcttcccaagccccgagagcagctgcggtaccctcggagaaccacagctctgttacattctggatgctatcctgttcctctatgggatcgtcctgacactcctgtattgcaagagaggccggaagaagctgctgtacatcttcaagcagcctttcatgcggcccgtgcagaccacccaggaagaggacggctgctcctgccggttccccgaggaagaagaaggcggctgcgagctgagactcaaaattcaagttcgcaaagccgccattacctcttacgagaagagtgatggggtgtacacaggactgtctacccggaatcaagaaacctacgaaaccctcaaacatgagaagccacctcagtaa

SEQ ID NO: 2277 - DNA, 2253 bp, synthetic construct
  source 1..2253: mol_type = other DNA
atggccttaccagtgaccgccttgctcctgccgctggccttgctgctccacgccgccaggccggaattcaatgctggcgtgacccagacacctaagttccaggtgctgaaaaccggccagagcatgaccctgcaatgcgcccaggacatgaaccatgagtacatgagctggtacagacaggaccccggcatgggcctgagactgatccactactctgtggctatccagaccaccgaccagggcgaagtgcccaatggctacaacgtgtccagaagcaccatcgaggacttcccactgagactgctgtctgccgctcctagccagaccagcgtgtacttttgtgccagcagctacctgggcaacaccggcgagctgttttttggcgagggcagcagactgaccgtgctcgaggacctgaagaacgtgttcccacctgaggtggccgtgttcgagcctagcgaggccgagatcagccacacccagaaagccaccctcgtgtgcctggctaccggcttctaccccgaccatgtggaactgtcttggtgggtcaacggcaaagaggtgcacagcggcgtgtctaccgacccccagccactgaaagaacagcccgccctgaacgacagccggtactgcctgagcagcagactgagagtgtccgccaccttctggcagaacccccggaaccacttcagatgccaggtgcagttctacggcctgagcgagaacgacgagtggacccaggacagagccaagcccgtgacccagatcgtgtctgccgaagcctggggcagagccgattgcggatccctgggagagcctcagctgtgctatatcctggacgccatcctgtttctgtacggcatcgtgctgaccctgctgtactgcaaacggggcagaaagaaactcctgtatatattcaaacaaccatttatgagaccagtacaaactactcaagaggaagatggctgtagctgccgatttccagaagaagaagaaggaggatgtgaactgcggctgaagatccaagtgcggaaggccgccatcaccagctacgagaaatccgacggcgtgtacaccggcctgagcaccagaaatcaagagacatacgagacactgaagcacgaaaagcctccacaaagggccaagcgatctggatctggagcaacaaacttctcactactcaaacaagcaggtgacgtggaggagaatcccgggcctactagtatggactggatttggcgcatccttttccttgtcggcgctgctaccggcgcgcattccttcgaacaagaagtgacacagatccctgccgctctgtctgtgcctgagggcgaaaacctggtgctgaactgctccttcaccgacagcgccatctacaacctccagtggttcaggcaggaccctggaaagggactgacaagcctgctgctgatccagagcagccagagagagcagacctccggcagactgaatgccagcctggataagagcagcggcaggtctaccctgtatatcgccgcttctcagcctggcgatagcgccacatatctgtgtgctgtgcggcctacaagcggcggcagctacatccctacatttggcagaggcaccagcctgatcgtgcacccttatacgcgtatccagaaccctgatcctgccgtgtaccagctgcgggatagcaagagcagcgacaagagcgtgtgtctgttcaccgacttcgacagccagaccaacgtgtcccagagcaaggactccgacgtgtacatcaccgataagaccgtgctggacatgcggagcatggacttcaagagcaactccgccgtggcctggtccaacaagtccgatttcgcctgcgccaacgccttcaacaacagcattatccccgaggacacattcttcccaagccccgagagcagctgcggtaccctcggagaaccacagctctgttacattctggatgctatcctgttcctctatgggatcgtcctgacactcctgtattgcaggagcaagcggtcacggctgctccacagcgattacatgaatatgacaccacgaagaccgggtcctactcgcaaacactaccaaccctacgcacctccccgcgactttgcagcgtaccgatctagactcaaaattcaagttcgcaaagccgccattacctcttacgagaagagtgatggggtgtacacaggactgtctacccggaatcaagaaacctacgaaaccctcaaacatgagaagccacctcagtaa

SEQ ID NO: 2278 - DNA, 2250 bp, synthetic construct
  source 1..2250: mol_type = other DNA
atggccttaccagtgaccgccttgctcctgccgctggccttgctgctccacgccgccaggccggaattcaatgctggcgtgacccagacacctaagttccaggtgctgaaaaccggccagagcatgaccctgcaatgcgcccaggacatgaaccatgagtacatgagctggtacagacaggaccccggcatgggcctgagactgatccactactctgtggctatccagaccaccgaccagggcgaagtgcccaatggctacaacgtgtccagaagcaccatcgaggacttcccactgagactgctgtctgccgctcctagccagaccagcgtgtacttttgtgccagcagctacctgggcaacaccggcgagctgttttttggcgagggcagcagactgaccgtgctcgaggacctgaagaacgtgttcccacctgaggtggccgtgttcgagcctagcgaggccgagatcagccacacccagaaagccaccctcgtgtgcctggctaccggcttctaccccgaccatgtggaactgtcttggtgggtcaacggcaaagaggtgcacagcggcgtgtctaccgacccccagccactgaaagaacagcccgccctgaacgacagccggtactgcctgagcagcagactgagagtgtccgccaccttctggcagaacccccggaaccacttcagatgccaggtgcagttctacggcctgagcgagaacgacgagtggacccaggacagagccaagcccgtgacccagatcgtgtctgccgaagcctggggcagagccgattgcggatccctgggagagcctcagctgtgctatatcctggacgccatcctgtttctgtacggcatcgtgctgaccctgctgtactgcaggagtaagaggagcaggctcctgcacagtgactacatgaacatgactccacgccgccccggacccacccgcaagcattaccagccctatgccccaccacgcgacttcgcagcctatcgctcccggctgaagatccaagtgcggaaggccgccatcaccagctacgagaaatccgacggcgtgtacaccggcctgagcaccagaaatcaagagacatacgagacactgaagcacgaaaagcctccacaaagggccaagcgatctggatctggagcaacaaacttctcactactcaaacaagcaggtgacgtggaggagaatcccgggcctactagtatggactggatttggcgcatccttttccttgtcggcgctgctaccggcgcgcattccttcgaacaagaagtgacacagatccctgccgctctgtctgtgcctgagggcgaaaacctggtgctgaactgctccttcaccgacagcgccatctacaacctccagtggttcaggcaggaccctggaaagggactgacaagcctgctgctgatccagagcagccagagagagcagacctccggcagactgaatgccagcctggataagagcagcggcaggtctaccctgtatatcgccgcttctcagcctggcgatagcgccacatatctgtgtgctgtgcggcctacaagcggcggcagctacatccctacatttggcagaggcaccagcctgatcgtgcacccttatacgcgtatccagaaccctgatcctgccgtgtaccagctgcgggatagcaagagcagcgacaagagcgtgtgtctgttcaccgacttcgacagccagaccaacgtgtcccagagcaaggactccgacgtgtacatcaccgataagaccgtgctggacatgcggagcatggacttcaagagcaactccgccgtggcctggtccaacaagtccgatttcgcctgcgccaacgccttcaacaacagcattatccccgaggacacattcttcccaagccccgagagcagctgcggtaccctcggagaaccacagctctgttacattctggatgctatcctgttcctctatgggatcgtcctgacactcctgtattgcaggagcaagcggtcacggctgctccacagcgattacatgaatatgacaccacgaagaccgggtcctactcgcaaacactaccaaccctacgcacctccccgcgactttgcagcgtaccgatctagactcaaaattcaagttcgcaaagccgccattacctcttacgagaagagtgatggggtgtacacaggactgtctacccggaatcaagaaacctacgaaaccctcaaacatgagaagccacctcagtaa

SEQ ID NO: 2279 - DNA, 2004 bp, synthetic construct
  source 1..2004: mol_type = other DNA
atggccttaccagtgaccgccttgctcctgccgctggccttgctgctccacgccgccaggccggaattcaatgctggcgtgacccagacacctaagttccaggtgctgaaaaccggccagagcatgaccctgcaatgcgcccaggacatgaaccatgagtacatgagctggtacagacaggaccccggcatgggcctgagactgatccactactctgtggctatccagaccaccgaccagggcgaagtgcccaatggctacaacgtgtccagaagcaccatcgaggacttcccactgagactgctgtctgccgctcctagccagaccagcgtgtacttttgtgccagcagctacctgggcaacaccggcgagctgttttttggcgagggcagcagactgaccgtgctcgaggacctgaagaacgtgttcccacctgaggtggccgtgttcgagcctagcgaggccgagatcagccacacccagaaagccaccctcgtgtgcctggctaccggcttctaccccgaccatgtggaactgtcttggtgggtcaacggcaaagaggtgcacagcggcgtgtctaccgacccccagccactgaaagaacagcccgccctgaacgacagccggtactgcctgagcagcagactgagagtgtccgccaccttctggcagaacccccggaaccacttcagatgccaggtgcagttctacggcctgagcgagaacgacgagtggacccaggacagagccaagcccgtgacccagatcgtgtctgccgaagcctggggcagagccgattgcggatccctgggagagcctcagctgagctatatcctggacgccatcctgtttctgtacggcatcgtgctgaccctgctgtactgccggctgaagatccaagtgcggaaggccgccatcaccagctacgagaaatccgacggcgtgtacaccggcctgagcaccagaaatcaagagacatacgagacactgaagcacgaaaagcctccacaaagggccaagcgatctggatctggagcaacaaacttctcactactcaaacaagcaggtgacgtggaggagaatcccgggcctactagtatggactggatttggcgcatccttttccttgtcggcgctgctaccggcgcgcattccttcgaacaagaagtgacacagatccctgccgctctgtctgtgcctgagggcgaaaacctggtgctgaactgctccttcaccgacagcgccatctacaacctccagtggttcaggcaggaccctggaaagggactgacaagcctgctgctgatccagagcagccagagagagcagacctccggcagactgaatgccagcctggataagagcagcggcaggtctaccctgtatatcgccgcttctcagcctggcgatagcgccacatatctgtgtgctgtgcggcctacaagcggcggcagctacatccctacatttggcagaggcaccagcctgatcgtgcacccttatacgcgtatccagaaccctgatcctgccgtgtaccagctgcgggatagcaagagcagcgacaagagcgtgtgtctgttcaccgacttcgacagccagaccaacgtgtcccagagcaaggactccgacgtgtacatcaccgataagaccgtgctggacatgcggagcatggacttcaagagcaactccgccgtggcctggtccaacaagtccgatttcgcctgcgccaacgccttcaacaacagcattatccccgaggacacattcttcccaagccccgagagcagctgcggtaccctcggagaaccacagctctcttacattctggatgctatcctgttcctctatgggatcgtcctgacactcctgtattgcagactcaaaattcaagttcgcaaagccgccattacctcttacgagaagagtgatggggtgtacacaggactgtctacccggaatcaagaaacctacgaaaccctcaaacatgagaagccacctcagtaa

SEQ ID NO: 2280 - DNA, 2112 bp, synthetic construct
  source 1..2112: mol_type = other DNA
atggccttaccagtgaccgccttgctcctgccgctggccttgctgctccacgccgccaggccggaattcaatgctggcgtgacccagacacctaagttccaggtgctgaaaaccggccagagcatgaccctgcaatgcgcccaggacatgaaccatgagtacatgagctggtacagacaggaccccggcatgggcctgagactgatccactactctgtggctatccagaccaccgaccagggcgaagtgcccaatggctacaacgtgtccagaagcaccatcgaggacttcccactgagactgctgtctgccgctcctagccagaccagcgtgtacttttgtgccagcagctacctgggcaacaccggcgagctgttttttggcgagggcagcagactgaccgtgctcgaggacctgaagaacgtgttcccacctgaggtggccgtgttcgagcctagcgaggccgagatcagccacacccagaaagccaccctcgtgtgcctggctaccggcttctaccccgaccatgtggaactgtcttggtgggtcaacggcaaagaggtgcacagcggcgtgtctaccgacccccagccactgaaagaacagcccgccctgaacgacagccggtactgcctgagcagcagactgagagtgtccgccaccttctggcagaacccccggaaccacttcagatgccaggtgcagttctacggcctgagcgagaacgacgagtggacccaggacagagccaagcccgtgacccagatcgtgtctgccgaagcctggggcagagccgattgcggatcccaggctcagagcgattgcagctgtagcacagtgtctccaggcgtgctggccggaattgtgatgggcgatctggtgctgacagtgctgattgccctggccgtgtacttcctgggtagactggtgcctagaggaagaggcgctgccgaagccgccacaagaaagcagagaatcaccgagacagagagcccctaccaagagctgcaaggccagagaagcgacgtgtacagcgacctgaatacccagcggccttactacaaaagggccaagcgatctggatctggagcaacaaacttctcactactcaaacaagcaggtgacgtggaggagaatcccgggcctactagtatggactggatttggcgcatccttttccttgtcggcgctgctaccggcgcgcattccttcgaacaagaagtgacacagatccctgccgctctgtctgtgcctgagggcgaaaacctggtgctgaactgctccttcaccgacagcgccatctacaacctccagtggttcaggcaggaccctggaaagggactgacaagcctgctgctgatccagagcagccagagagagcagacctccggcagactgaatgccagcctggataagagcagcggcaggtctaccctgtatatcgccgcttctcagcctggcgatagcgccacatatctgtgtgctgtgcggcctacaagcggcggcagctacatccctacatttggcagaggcaccagcctgatcgtgcacccttatacgcgtatccagaaccctgatcctgccgtgtaccagctgcgggatagcaagagcagcgacaagagcgtgtgtctgttcaccgacttcgacagccagaccaacgtgtcccagagcaaggactccgacgtgtacatcaccgataagaccgtgctggacatgcggagcatggacttcaagagcaactccgccgtggcctggtccaacaagtccgatttcgcctgcgccaacgccttcaacaacagcattatccccgaggacacattcttcccaagccccgagagcagctgcggtacccaggctcagagcgattgcagctctagcacagtgtctccaggcgtgctggccggaattgtgatgggcgatctggtgctgacagtgctgattgccctggccgtgtacttcctgggtagactggtgcctagaggaagaggcgctgccgaagccgccacaagaaagcagagaatcaccgagacagagagcccctaccaagagctgcaaggccagagaagcgacgtgtacagcgacctgaatacccagcggccttactacaaataa

SEQ ID NO: 2281 - DNA, 2238 bp, synthetic construct
  source 1..2238: mol_type = other DNA
atggccttaccagtgaccgccttgctcctgccgctggccttgctgctccacgccgccaggccggaattcaatgctggcgtgacccagacacctaagttccaggtgctgaaaaccggccagagcatgaccctgcaatgcgcccaggacatgaaccatgagtacatgagctggtacagacaggaccccggcatgggcctgagactgatccactactctgtggctatccagaccaccgaccagggcgaagtgcccaatggctacaacgtgtccagaagcaccatcgaggacttcccactgagactgctgtctgccgctcctagccagaccagcgtgtacttttgtgccagcagctacctgggcaacaccggcgagctgttttttggcgagggcagcagactgaccgtgctcgaggacctgaagaacgtgttcccacctgaggtggccgtgttcgagcctagcgaggccgagatcagccacacccagaaagccaccctcgtgtgcctggctaccggcttctaccccgaccatgtggaactgtcttggtgggtcaacggcaaagaggtgcacagcggcgtgtctaccgacccccagccactgaaagaacagcccgccctgaacgacagccggtactgcctgagcagcagactgagagtgtccgccaccttctggcagaacccccggaaccacttcagatgccaggtgcagttctacggcctgagcgagaacgacgagtggacccaggacagagccaagcccgtgacccagatcgtgtctgccgaagcctggggcagagccgattgcggatcccaggctcagagcgattgcagctgtagcacagtgtctccaggcgtgctggccggaattgtgatgggcgatctggtgctgacagtgctgattgccctggccgtgtacttcctgggtagactggtgcctagaggaagaggcgctgccgaagccgccacaagaaagcagagaatcaccgagacagagagcccctaccaagagctgcaaggccagagaagcgacgtgtacagcgacctgaatacccagcggccttactacaaaagggccaagcgatctggatctggagcaacaaacttctcactactcaaacaagcaggtgacgtggaggagaatcccgggcctactagtatggactggatttggcgcatccttttccttgtcggcgctgctaccggcgcgcattccttcgaacaagaagtgacacagatccctgccgctctgtctgtgcctgagggcgaaaacctggtgctgaactgctccttcaccgacagcgccatctacaacctccagtggttcaggcaggaccctggaaagggactgacaagcctgctgctgatccagagcagccagagagagcagacctccggcagactgaatgccagcctggataagagcagcggcaggtctaccctgtatatcgccgcttctcagcctggcgatagcgccacatatctgtgtgctgtgcggcctacaagcggcggcagctacatccctacatttggcagaggcaccagcctgatcgtgcacccttatacgcgtatccagaaccctgatcctgccgtgtaccagctgcgggatagcaagagcagcgacaagagcgtgtgtctgttcaccgacttcgacagccagaccaacgtgtcccagagcaaggactccgacgtgtacatcaccgataagaccgtgctggacatgcggagcatggacttcaagagcaactccgccgtggcctggtccaacaagtccgatttcgcctgcgccaacgccttcaacaacagcattatccccgaggacacattcttcccaagccccgagagcagctgcggtacccaggctcagagcgattgcagctgtagcacagtgtctccaggcgtgctggccggaattgtgatgggcgatctggtgctgacagtgctgattgccctggccgtgtacttcctgggtagactggtgcctagaggaagaggcgctgccgaagccgccacaagaaagcagagaatcaccgagacagagagcccctaccaagagctgcaaggccagagaagcgacgtgtacagcgacctgaatacccagaaacggggcagaaagaaactcctgtatatattcaaacaaccatttatgagaccagtacaaactactcaagaggaagatggctgtagctgccgatttccagaagaagaagaaggaggatgtgaactgcggccttactacaaataa

SEQ ID NO: 2282 - DNA, 2235 bp, synthetic construct
  source 1..2235: mol_type = other DNA
atggccttaccagtgaccgccttgctcctgccgctggccttgctgctccacgccgccaggccggaattcaatgctggcgtgacccagacacctaagttccaggtgctgaaaaccggccagagcatgaccctgcaatgcgcccaggacatgaaccatgagtacatgagctggtacagacaggaccccggcatgggcctgagactgatccactactctgtggctatccagaccaccgaccagggcgaagtgcccaatggctacaacgtgtccagaagcaccatcgaggacttcccactgagactgctgtctgccgctcctagccagaccagcgtgtacttttgtgccagcagctacctgggcaacaccggcgagctgttttttggcgagggcagcagactgaccgtgctcgaggacctgaagaacgtgttcccacctgaggtggccgtgttcgagcctagcgaggccgagatcagccacacccagaaagccaccctcgtgtgcctggctaccggcttctaccccgaccatgtggaactgtcttggtgggtcaacggcaaagaggtgcacagcggcgtgtctaccgacccccagccactgaaagaacagcccgccctgaacgacagccggtactgcctgagcagcagactgagagtgtccgccaccttctggcagaacccccggaaccacttcagatgccaggtgcagttctacggcctgagcgagaacgacgagtggacccaggacagagccaagcccgtgacccagatcgtgtctgccgaagcctggggcagagccgattgcggatcccaggctcagagcgattgcagctgtagcacagtgtctccaggcgtgctggccggaattgtgatgggcgatctggtgctgacagtgctgattgccctggccgtgtacttcctgggtagactggtgcctagaggaagaggcgctgccgaagccgccacaagaaagcagagaatcaccgagacagagagcccctaccaagagctgcaaggccagagaagcgacgtgtacagcgacctgaatacccagcggccttactacaaaagggccaagcgatctggatctggagcaacaaacttctcactactcaaacaagcaggtgacgtggaggagaatcccgggcctactagtatggactggatttggcgcatccttttccttgtcggcgctgctaccggcgcgcattccttcgaacaagaagtgacacagatccctgccgctctgtctgtgcctgagggcgaaaacctggtgctgaactgctccttcaccgacagcgccatctacaacctccagtggttcaggcaggaccctggaaagggactgacaagcctgctgctgatccagagcagccagagagagcagacctccggcagactgaatgccagcctggataagagcagcggcaggtctaccctgtatatcgccgcttctcagcctggcgatagcgccacatatctgtgtgctgtgcggcctacaagcggcggcagctacatccctacatttggcagaggcaccagcctgatcgtgcacccttatacgcgtatccagaaccctgatcctgccgtgtaccagctgcgggatagcaagagcagcgacaagagcgtgtgtctgttcaccgacttcgacagccagaccaacgtgtcccagagcaaggactccgacgtgtacatcaccgataagaccgtgctggacatgcggagcatggacttcaagagcaactccgccgtggcctggtccaacaagtccgatttcgcctgcgccaacgccttcaacaacagcattatccccgaggacacattcttcccaagccccgagagcagctgcggtacccaggctcagagcgattgcagctgtagcacagtgtctccaggcgtgctggccggaattgtgatgggcgatctggtgctgacagtgctgattgccctggccgtgtacttcctgggtagactggtgcctagaggaagaggcgctgccgaagccgccacaagaaagcagagaatcaccgagacagagagcccctaccaagagctgcaaggccagagaagcgacgtgtacagcgacctgaatacccagaggagcaagcggtcacggctgctccacagcgattacatgaatatgacaccacgaagaccgggtcctactcgcaaacactaccaaccctacgcacctccccgcgactttgcagcgtaccgatctcggccttactacaaataa

SEQ ID NO: 2283 - DNA, 2220 bp, synthetic construct
  source 1..2220: mol_type = other DNA
atggccttaccagtgaccgccttgctcctgccgctggccttgctgctccacgccgccaggccggaattcaatgctggcgtgacccagacacctaagttccaggtgctgaaaaccggccagagcatgaccctgcaatgcgcccaggacatgaaccatgagtacatgagctggtacagacaggaccccggcatgggcctgagactgatccactactctgtggctatccagaccaccgaccagggcgaagtgcccaatggctacaacgtgtccagaagcaccatcgaggacttcccactgagactgctgtctgccgctcctagccagaccagcgtgtacttttgtgccagcagctacctgggcaacaccggcgagctgttttttggcgagggcagcagactgaccgtgctcgaggacctgaagaacgtgttcccacctgaggtggccgtgttcgagcctagcgaggccgagatcagccacacccagaaagccaccctcgtgtgcctggctaccggcttctaccccgaccatgtggaactgtcttggtgggtcaacggcaaagaggtgcacagcggcgtgtctaccgacccccagccactgaaagaacagcccgccctgaacgacagccggtactgcctgagcagcagactgagagtgtccgccaccttctggcagaacccccggaaccacttcagatgccaggtgcagttctacggcctgagcgagaacgacgagtggacccaggacagagccaagcccgtgacccagatcgtgtctgccgaagcctggggcagagccgattgcggatcccaggctcagagcgattgcagctgtagcacagtgtctccaggcgtgctggccggaattgtgatgggcgatctggtgctgacagtgctgattgccctggccgtgtacttcctgggtagactggtgcctagaggaagaggcgctgccgaagccgccacaagaaagcagagaatcaccgagacagagagcccctaccaagagctgcaaggccagagaagcgacgtgtacagcgacctgaatacccagcggccttactacaaaagggccaagcgatctggatctggagcaacaaacttctcactactcaaacaagcaggtgacgtggaggagaatcccgggcctactagtatggactggatttggcgcatccttttccttgtcggcgctgctaccggcgcgcattccttcgaacaagaagtgacacagatccctgccgctctgtctgtgcctgagggcgaaaacctggtgctgaactgctccttcaccgacagcgccatctacaacctccagtggttcaggcaggaccctggaaagggactgacaagcctgctgctgatccagagcagccagagagagcagacctccggcagactgaatgccagcctggataagagcagcggcaggtctaccctgtatatcgccgcttctcagcctggcgatagcgccacatatctgtgtgctgtgcggcctacaagcggcggcagctacatccctacatttggcagaggcaccagcctgatcgtgcacccttatacgcgtatccagaaccctgatcctgccgtgtaccagctgcgggatagcaagagcagcgacaagagcgtgtgtctgttcaccgacttcgacagccagaccaacgtgtcccagagcaaggactccgacgtgtacatcaccgataagaccgtgctggacatgcggagcatggacttcaagagcaactccgccgtggcctggtccaacaagtccgatttcgcctgcgccaacgccttcaacaacagcattatccccgaggacacattcttcccaagccccgagagcagctgcggtacccaggctcagagcgattgcagctgtagcacagtgtctccaggcgtgctggccggaattgtgatgggcgatctggtgctgacagtgctgattgccctggccgtgtacttcctgggtagactggtgcctagaggaagaggcgctgccgaagccgccacaagaaagcagagaatcaccgagacagagagcccctaccaagagctgcaaggccagagaagcgacgtgtacagcgacctgaatacccagagggaccaaagactgcctcctgacgctcacaaacctccaggcggaggcagcttcagaacccctatccaagaggaacaggctgacgcccacagcaccctggcaaaaattcggccttactacaaataa

SEQ ID NO: 2284 - DNA, 2472 bp, synthetic construct
  source 1..2472: mol_type = other DNA
atggccttaccagtgaccgccttgctcctgccgctggccttgctgctccacgccgccaggccggaattcaatgctggcgtgacccagacacctaagttccaggtgctgaaaaccggccagagcatgaccctgcaatgcgcccaggacatgaaccatgagtacatgagctggtacagacaggaccccggcatgggcctgagactgatccactactctgtggctatccagaccaccgaccagggcgaagtgcccaatggctacaacgtgtccagaagcaccatcgaggacttcccactgagactgctgtctgccgctcctagccagaccagcgtgtacttttgtgccagcagctacctgggcaacaccggcgagctgttttttggcgagggcagcagactgaccgtgctcgaggacctgaagaacgtgttcccacctgaggtggccgtgttcgagcctagcgaggccgagatcagccacacccagaaagccaccctcgtgtgcctggctaccggcttctaccccgaccatgtggaactgtcttggtgggtcaacggcaaagaggtgcacagcggcgtgtctaccgacccccagccactgaaagaacagcccgccctgaacgacagccggtactgcctgagcagcagactgagagtgtccgccaccttctggcagaacccccggaaccacttcagatgccaggtgcagttctacggcctgagcgagaacgacgagtggacccaggacagagccaagcccgtgacccagatcgtgtctgccgaagcctggggcagagccgattgcggatcccaggctcagagcgattgcagctgtagcacagtgtctccaggcgtgctggccggaattgtgatgggcgatctggtgctgacagtgctgattgccctggccgtgtacttcctgggtagactggtgcctagaggaagaggcgctgccgaagccgccacaagaaagcagagaatcaccgagacagagagcccctaccaagagctgcaaggccagagaagcgacgtgtacagcgacctgaatacccagcggccttactacaaaagggccaagcgatctggatctggagcaacaaacttctcactactcaaacaagcaggtgacgtggaggagaatcccgggcctactagtatggactggatttggcgcatccttttccttgtcggcgctgctaccggcgcgcattccttcgaacaagaagtgacacagatccctgccgctctgtctgtgcctgagggcgaaaacctggtgctgaactgctccttcaccgacagcgccatctacaacctccagtggttcaggcaggaccctggaaagggactgacaagcctgctgctgatccagagcagccagagagagcagacctccggcagactgaatgccagcctggataagagcagcggcaggtctaccctgtatatcgccgcttctcagcctggcgatagcgccacatatctgtgtgctgtgcggcctacaagcggcggcagctacatccctacatttggcagaggcaccagcctgatcgtgcacccttatacgcgtatccagaaccctgatcctgccgtgtaccagctgcgggatagcaagagcagcgacaagagcgtgtgtctgttcaccgacttcgacagccagaccaacgtgtcccagagcaaggactccgacgtgtacatcaccgataagaccgtgctggacatgcggagcatggacttcaagagcaactccgccgtggcctggtccaacaagtccgatttcgcctgcgccaacgccttcaacaacagcattatccccgaggacacattcttcccaagccccgagagcagctgcggtacccaggctcagagcgattgcagctgtagcacagtgtctccaggcgtgctggccggaattgtgatgggcgatctggtgctgacagtgctgattgccctggccgtgtacttcctgggtagactggtgcctagaggaagaggcgctgccgaagccgccacaagaaagcagagaatcaccgagacagagagcccctaccaagagctgcaaggccagagaagcgacgtgtacagcgacctgaatacccagtggcggcggaagcggaaagagaagcagtctgagacaagccccaaagagttcctgaccatctacgaggacgtgaaggacctgaaaacccggcggaaccacgaacaagagcagacctttcctggcggaggcagcaccatctacagcatgatccagagccagagcagcgcccctacaagccaagagcctgcctacacactgtactccctgatccagcctagcagaaagagcggcagccggaagagaaatcacagccccagcttcaacagcacgatctacgaagtgatcggcaagagccagccaaaggctcagaaccctgccagactgagccggaaagagctggaaaacttcgacgtgtacagccggccttactacaaataa

SEQ ID NO: 2285 - DNA, 2748 bp, synthetic construct
  source 1..2748: mol_type = other DNA
atggccttaccagtgaccgccttgctcctgccgctggccttgctgctccacgccgccaggccggaattcaatgctggcgtgacccagacacctaagttccaggtgctgaaaaccggccagagcatgaccctgcaatgcgcccaggacatgaaccatgagtacatgagctggtacagacaggaccccggcatgggcctgagactgatccactactctgtggctatccagaccaccgaccagggcgaagtgcccaatggctacaacgtgtccagaagcaccatcgaggacttcccactgagactgctgtctgccgctcctagccagaccagcgtgtacttttgtgccagcagctacctgggcaacaccggcgagctgttttttggcgagggcagcagactgaccgtgctcgaggacctgaagaacgtgttcccacctgaggtggccgtgttcgagcctagcgaggccgagatcagccacacccagaaagccaccctcgtgtgcctggctaccggcttctaccccgaccatgtggaactgtcttggtgggtcaacggcaaagaggtgcacagcggcgtgtctaccgacccccagccactgaaagaacagcccgccctgaacgacagccggtactgcctgagcagcagactgagagtgtccgccaccttctggcagaacccccggaaccacttcagatgccaggtgcagttctacggcctgagcgagaacgacgagtggacccaggacagagccaagcccgtgacccagatcgtgtctgccgaagcctggggcagagccgattgcggatcccaggctcagagcgattgcagctgtagcacagtgtctccaggcgtgctggccggaattgtgatgggcgatctggtgctgacagtgctgattgccctggccgtgtacttcctgggtagactggtgcctagaggaagaggcgctgccgaagccgccacaagaaagcagagaatcaccgagacagagagcccctaccaagagctgcaaggccagagaagcgacgtgtacagcgacctgaatacccagagagtgaagttcagcagaagcgccgacgcccctgcctaccagcagggacagaaccaactgtacaacgagctgaacctgggcagacgggaagagtacgacgtgctggacaagcggagaggcagggaccctgagatgggcggaaagccccagcggagaaagaacccccaggaaggactgtataacgaactccagaaagacaagatggccgaagcctacagcgagatcggcatgaagggcgagcggagaagaggcaagggccacgatggcctgtaccagggcctgagcaccgccaccaaggacacctatgacgccctgcacatgcaggccctgcctccaagaagggccaagcgatctggatctggagcaacaaacttctcactactcaaacaagcaggtgacgtggaggagaatcccgggcctactagtatggactggatttggcgcatccttttccttgtcggcgctgctaccggcgcgcattccttcgaacaagaagtgacacagatccctgccgctctgtctgtgcctgagggcgaaaacctggtgctgaactgctccttcaccgacagcgccatctacaacctccagtggttcaggcaggaccctggaaagggactgacaagcctgctgctgatccagagcagccagagagagcagacctccggcagactgaatgccagcctggataagagcagcggcaggtctaccctgtatatcgccgcttctcagcctggcgatagcgccacatatctgtgtgctgtgcggcctacaagcggcggcagctacatccctacatttggcagaggcaccagcctgatcgtgcacccttatacgcgtatccagaaccctgatcctgccgtgtaccagctgcgggatagcaagagcagcgacaagagcgtgtgtctgttcaccgacttcgacagccagaccaacgtgtcccagagcaaggactccgacgtgtacatcaccgataagaccgtgctggacatgcggagcatggacttcaagagcaactccgccgtggcctggtccaacaagtccgatttcgcctgcgccaacgccttcaacaacagcattatccccgaggacacattcttcccaagccccgagagcagctgcggtaccacaacgccgggcgaaaggagttccttgccggccttttaccccggcacaagcggaagctgtagtgggtgtggaagcctcagcctcccacttcttgcgggcctcgtcgcggcagatgcagtagcttcacttcttattgtaggcgcggtatttctctgtgctcgaccaaggaggtcacccgctcaggaggatggtaaggtgtatataaatatgccaggacgcggaagctctagacgggttaagttttccagatccgcagacgcacccgcttaccaacaagggcagaaccaactctacaatgaacttaatttggggcggagggaagagtacgacgttctggacaaaaggaggggacgagatcccgagatgggcggaaagcctcagcgaaggaagaatccgcaagaggggctttataacgaactccagaaagataaaatggcagaagcctatagtgagattgggatgaagggagaaaggaggaggggtaaaggtcacgatgggttgtaccaaggattgagcacagccactaaagatacctatgatgcgctccacatgcaggccctgccgccaagataa

SEQ ID NO: 2286 - DNA, 2526 bp, synthetic construct
  source 1..2526: mol_type = other DNA
atggccttaccagtgaccgccttgctcctgccgctggccttgctgctccacgccgccaggccggaattcaatgctggcgtgacccagacacctaagttccaggtgctgaaaaccggccagagcatgaccctgcaatgcgcccaggacatgaaccatgagtacatgagctggtacagacaggaccccggcatgggcctgagactgatccactactctgtggctatccagaccaccgaccagggcgaagtgcccaatggctacaacgtgtccagaagcaccatcgaggacttcccactgagactgctgtctgccgctcctagccagaccagcgtgtacttttgtgccagcagctacctgggcaacaccggcgagctgttttttggcgagggcagcagactgaccgtgctcgaggacctgaagaacgtgttcccacctgaggtggccgtgttcgagcctagcgaggccgagatcagccacacccagaaagccaccctcgtgtgcctggctaccggcttctaccccgaccatgtggaactgtcttggtgggtcaacggcaaagaggtgcacagcggcgtgtctaccgacccccagccactgaaagaacagcccgccctgaacgacagccggtactgcctgagcagcagactgagagtgtccgccaccttctggcagaacccccggaaccacttcagatgccaggtgcagttctacggcctgagcgagaacgacgagtggacccaggacagagccaagcccgtgacccagatcgtgtctgccgaagcctggggcagagccgattgcggatcccaggctcagagcgattgcagctgtagcacagtgtctccaggcgtgctggccggaattgtgatgggcgatctggtgctgacagtgctgattgccctggccgtgtacttcctgggtagactggtgcctagaggaagaggcgctgccgaagccgccacaagaaagcagagaatcaccgagacagagagcccctaccaagagctgcaaggccagagaagcgacgtgtacagcgacctgaatacccagagagtgaagttcagcagaagcgccgacgcccctgcctaccagcagggacagaaccaactgtacaacgagctgaacctgggcagacgggaagagtacgacgtgctggacaagcggagaggcagggaccctgagatgggcggaaagccccagcggagaaagaacccccaggaaggactgtataacgaactccagaaagacaagatggccgaagcctacagcgagatcggcatgaagggcgagcggagaagaggcaagggccacgatggcctgtaccagggcctgagcaccgccaccaaggacacctatgacgccctgcacatgcaggccctgcctccaagaagggccaagcgatctggatctggagcaacaaacttctcactactcaaacaagcaggtgacgtggaggagaatcccgggcctactagtatggactggatttggcgcatccttttccttgtcggcgctgctaccggcgcgcattccttcgaacaagaagtgacacagatccctgccgctctgtctgtgcctgagggcgaaaacctggtgctgaactgctccttcaccgacagcgccatctacaacctccagtggttcaggcaggaccctggaaagggactgacaagcctgctgctgatccagagcagccagagagagcagacctccggcagactgaatgccagcctggataagagcagcggcaggtctaccctgtatatcgccgcttctcagcctggcgatagcgccacatatctgtgtgctgtgcggcctacaagcggcggcagctacatccctacatttggcagaggcaccagcctgatcgtgcacccttatacgcgtatccagaaccctgatcctgccgtgtaccagctgcgggatagcaagagcagcgacaagagcgtgtgtctgttcaccgacttcgacagccagaccaacgtgtcccagagcaaggactccgacgtgtacatcaccgataagaccgtgctggacatgcggagcatggacttcaagagcaactccgccgtggcctggtccaacaagtccgatttcgcctgcgccaacgccttcaacaacagcattatccccgaggacacattcttcccaagccccgagagcagctgcggtaccacaacgccgggcgaaaggagttccttgccggccttttaccccggcacaagcggaagctgtagtgggtgtggaagcctcagcctcccacttcttgcgggcctcgtcgcggcagatgcagtagcttcacttcttattgtaggcgcggtatttaagagaggccggaagaagctgctgtacatcttcaagcagcctttcatgcggcccgtgcagaccacccaggaagaggacggctgctcctgccggttccccgaggaagaagaaggcggctgcgagctgctctgtgctcgaccaaggaggtcacccgctcaggaggatggtaaggtgtatataaatatgccaggacgcggataa

SEQ ID NO: 2287 - DNA, 2523 bp, synthetic construct
  source 1..2523: mol_type = other DNA
atggccttaccagtgaccgccttgctcctgccgctggccttgctgctccacgccgccaggccggaattcaatgctggcgtgacccagacacctaagttccaggtgctgaaaaccggccagagcatgaccctgcaatgcgcccaggacatgaaccatgagtacatgagctggtacagacaggaccccggcatgggcctgagactgatccactactctgtggctatccagaccaccgaccagggcgaagtgcccaatggctacaacgtgtccagaagcaccatcgaggacttcccactgagactgctgtctgccgctcctagccagaccagcgtgtacttttgtgccagcagctacctgggcaacaccggcgagctgttttttggcgagggcagcagactgaccgtgctcgaggacctgaagaacgtgttcccacctgaggtggccgtgttcgagcctagcgaggccgagatcagccacacccagaaagccaccctcgtgtgcctggctaccggcttctaccccgaccatgtggaactgtcttggtgggtcaacggcaaagaggtgcacagcggcgtgtctaccgacccccagccactgaaagaacagcccgccctgaacgacagccggtactgcctgagcagcagactgagagtgtccgccaccttctggcagaacccccggaaccacttcagatgccaggtgcagttctacggcctgagcgagaacgacgagtggacccaggacagagccaagcccgtgacccagatcgtgtctgccgaagcctggggcagagccgattgcggatcccaggctcagagcgattgcagctgtagcacagtgtctccaggcgtgctggccggaattgtgatgggcgatctggtgctgacagtgctgattgccctggccgtgtacttcctgggtagactggtgcctagaggaagaggcgctgccgaagccgccacaagaaagcagagaatcaccgagacagagagcccctaccaagagctgcaaggccagagaagcgacgtgtacagcgacctgaatacccagagagtgaagttcagcagaagcgccgacgcccctgcctaccagcagggacagaaccaactgtacaacgagctgaacctgggcagacgggaagagtacgacgtgctggacaagcggagaggcagggaccctgagatgggcggaaagccccagcggagaaagaacccccaggaaggactgtataacgaactccagaaagacaagatggccgaagcctacagcgagatcggcatgaagggcgagcggagaagaggcaagggccacgatggcctgtaccagggcctgagcaccgccaccaaggacacctatgacgccctgcacatgcaggccctgcctccaagaagggccaagcgatctggatctggagcaacaaacttctcactactcaaacaagcaggtgacgtggaggagaatcccgggcctactagtatggactggatttggcgcatccttttccttgtcggcgctgctaccggcgcgcattccttcgaacaagaagtgacacagatccctgccgctctgtctgtgcctgagggcgaaaacctggtgctgaactgctccttcaccgacagcgccatctacaacctccagtggttcaggcaggaccctggaaagggactgacaagcctgctgctgatccagagcagccagagagagcagacctccggcagactgaatgccagcctggataagagcagcggcaggtctaccctgtatatcgccgcttctcagcctggcgatagcgccacatatctgtgtgctgtgcggcctacaagcggcggcagctacatccctacatttggcagaggcaccagcctgatcgtgcacccttatacgcgtatccagaaccctgatcctgccgtgtaccagctgcgggatagcaagagcagcgacaagagcgtgtgtctgttcaccgacttcgacagccagaccaacgtgtcccagagcaaggactccgacgtgtacatcaccgataagaccgtgctggacatgcggagcatggacttcaagagcaactccgccgtggcctggtccaacaagtccgatttcgcctgcgccaacgccttcaacaacagcattatccccgaggacacattcttcccaagccccgagagcagctgcggtaccacaacgccgggcgaaaggagttccttgccggccttttaccccggcacaagcggaagctgtagtgggtgtggaagcctcagcctcccacttcttgcgggcctcgtcgcggcagatgcagtagcttcacttcttattgtaggcgcggtatttaggagcaagcggtcacggctgctccacagcgattacatgaatatgacaccacgaagaccgggtcctactcgcaaacactaccaaccctacgcacctccccgcgactttgcagcgtaccgatctctctgtgctcgaccaaggaggtcacccgctcaggaggatggtaaggtgtatataaatatgccaggacgcggataa

SEQ ID NO: 2288 - DNA, 3258 bp, synthetic construct
  source 1..3258: mol_type = other DNA
atggccttaccagtgaccgccttgctcctgccgctggccttgctgctccacgccgccaggccggaattcaatgctggcgtgacccagacacctaagttccaggtgctgaaaaccggccagagcatgaccctgcaatgcgcccaggacatgaaccatgagtacatgagctggtacagacaggaccccggcatgggcctgagactgatccactactctgtggctatccagaccaccgaccagggcgaagtgcccaatggctacaacgtgtccagaagcaccatcgaggacttcccactgagactgctgtctgccgctcctagccagaccagcgtgtacttttgtgccagcagctacctgggcaacaccggcgagctgttttttggcgagggcagcagactgaccgtgctcgaggacctgaagaacgtgttcccacctgaggtggccgtgttcgagcctagcgaggccgagatcagccacacccagaaagccaccctcgtgtgcctggctaccggcttctaccccgaccatgtggaactgtcttggtgggtcaacggcaaagaggtgcacagcggcgtgtctaccgacccccagccactgaaagaacagcccgccctgaacgacagccggtactgcctgagcagcagactgagagtgtccgccaccttctggcagaacccccggaaccacttcagatgccaggtgcagttctacggcctgagcgagaacgacgagtggacccaggacagagccaagcccgtgacccagatcgtgtctgccgaagcctggggcagagccgattgcggatcccagagcttcggcctgctggaccccaagctgtgctacctgctggatggcatcctgttcatctacggcgtgatcctgaccgccctgttcctgagagtgaagttcagcagaagcgccgacgcccctgcctaccagcagggacagaaccaactgtacaacgagctgaacctgggcagacgggaagagtacgacgtgctggacaagcggagaggcagggaccctgagatgggcggaaagccccagcggagaaagaacccccaggaaggactgtataacgaactccagaaagacaagatggccgaagcctacagcgagatcggcatgaagggcgagcggagaagaggcaagggccacgatggcctgtaccagggcctgagcaccgccaccaaggacacctatgacgccctgcacatgcaggccctgcctccaagaagggccaagcgatctggatctggagcaacaaacttctcactactcaaacaagcaggtgacgtggaggagaatcccgggcctactagtatggactggatttggcgcatccttttccttgtcggcgctgctaccggcgcgcattccttcgaacaagaagtgacacagatccctgccgctctgtctgtgcctgagggcgaaaacctggtgctgaactgctccttcaccgacagcgccatctacaacctccagtggttcaggcaggaccctggaaagggactgacaagcctgctgctgatccagagcagccagagagagcagacctccggcagactgaatgccagcctggataagagcagcggcaggtctaccctgtatatcgccgcttctcagcctggcgatagcgccacatatctgtgtgctgtgcggcctacaagcggcggcagctacatccctacatttggcagaggcaccagcctgatcgtgcacccttatacgcgtatccagaaccctgatcctgccgtgtaccagctgcgggatagcaagagcagcgacaagagcgtgtgtctgttcaccgacttcgacagccagaccaacgtgtcccagagcaaggactccgacgtgtacatcaccgataagaccgtgctggacatgcggagcatggacttcaagagcaactccgccgtggcctggtccaacaagtccgatttcgcctgcgccaacgccttcaacaacagcattatccccgaggacacattcttcccaagccccgagagcagctgcggtacccagagttttgggttgttggaccctaaattgtgctatctgttggacggaatcctgttcatttacggagtgatcctgaccgcattgttcctgcgggttaagttttccagatccgcagacgcacccgcttaccaacaagggcagaaccaactctacaatgaacttaatttggggcggagggaagagtacgacgttctggacaaaaggaggggacgagatcccgagatgggcggaaagcctcagcgaaggaagaatccgcaagaggggctttataacgaactccagaaagataaaatggcagaagcctatagtgagattgggatgaagggagaaaggaggaggggtaaaggtcacgatgggttgtaccaaggattgagcacagccactaaagatacctatgatgcgctccacatgcaggccctgccgccaagacgcgccaagagaagcggatctggcgtgaagcagaccctgaatttcgacctgctgaagctggctggcgacgtggaatccaacccaggcccttctagaggccatatggctctgcctgtgacagctctgctgctgcctctggcactgctgcttcatgctgctagacctagccagtttagagtgtcccctctggacagaacctggaacctgggcgagacagtggaactgaagtgccaggtgctgctgagcaaccctacaagcggctgctcctggctgtttcagcctagaggtgcagccgcctctcctacctttctgctgtacctgagccagaacaagcccaaggccgccgaaggactggacacccagagattcagcggcaagagactgggcgacaccttcgtgctgaccctgagcgacttcagaagagagaacgagggctactacttctgtagcgccctgagcaacagcatcatgtacttcagccacttcgtgcccgtgtttctgcccgccaagcctacaacaacccctgctcctagacctcctacaccagctcctacaatcgccagccagcctctgtctctcagacccgaagcctgtagacctgctgctggcggagctgtgcataccagaggactggatttcgcctgcgacatctacatctgggctcctctggctggcacatgtggcgtgctgctgctgtccctggtcatcaccctgtactgcaaccaccggaacaggcggagagtgtgcaagtgccctagacctgtggtcaagagcggcgacaagcctagcctgagcgccagatatgtt

SEQ ID NO: 2289 - DNA, 2481 bp, synthetic construct
  source 1..2481: mol_type = other DNA
atggccttaccagtgaccgccttgctcctgccgctggccttgctgctccacgccgccaggccggaattcaatgctggcgtgacccagacacctaagttccaggtgctgaaaaccggccagagcatgaccctgcaatgcgcccaggacatgaaccatgagtacatgagctggtacagacaggaccccggcatgggcctgagactgatccactactctgtggctatccagaccaccgaccagggcgaagtgcccaatggctacaacgtgtccagaagcaccatcgaggacttcccactgagactgctgtctgccgctcctagccagaccagcgtgtacttttgtgccagcagctacctgggcaacaccggcgagctgttttttggcgagggcagcagactgaccgtgctcgaggacctgaagaacgtgttcccacctgaggtggccgtgttcgagcctagcgaggccgagatcagccacacccagaaagccaccctcgtgtgcctggctaccggcttctaccccgaccatgtggaactgtcttggtgggtcaacggcaaagaggtgcacagcggcgtgtctaccgacccccagccactgaaagaacagcccgccctgaacgacagccggtactgcctgagcagcagactgagagtgtccgccaccttctggcagaacccccggaaccacttcagatgccaggtgcagttctacggcctgagcgagaacgacgagtggacccaggacagagccaagcccgtgacccagatcgtgtctgccgaagcctggggcagagccgattgcggatcccagagcttcggcctgctggaccccaagctgtgctacctgctggatggcatcctgttcatctacggcgtgatcctgaccgccctgttcctgagagtgaagttcagcagaagcgccgacgcccctgcctaccagcagggacagaaccaactgtacaacgagctgaacctgggcagacgggaagagtacgacgtgctggacaagcggagaggcagggaccctgagatgggcggaaagccccagcggagaaagaacccccaggaaggactgtataacgaactccagaaagacaagatggccgaagcctacagcgagatcggcatgaagggcgagcggagaagaggcaagggccacgatggcctgtaccagggcctgagcaccgccaccaaggacacctatgacgccctgcacatgcaggccctgcctccaagaagggccaagcgatctggatctggagcaacaaacttctcactactcaaacaagcaggtgacgtggaggagaatcccgggcctactagtatggactggatttggcgcatccttttccttgtcggcgctgctaccggcgcgcattccttcgaacaagaagtgacacagatccctgccgctctgtctgtgcctgagggcgaaaacctggtgctgaactgctccttcaccgacagcgccatctacaacctccagtggttcaggcaggaccctggaaagggactgacaagcctgctgctgatccagagcagccagagagagcagacctccggcagactgaatgccagcctggataagagcagcggcaggtctaccctgtatatcgccgcttctcagcctggcgatagcgccacatatctgtgtgctgtgcggcctacaagcggcggcagctacatccctacatttggcagaggcaccagcctgatcgtgcacccttatacgcgtgcctctacaaagggaccctccgtgtttcctctggctcccagcagcaagtctacaagcggaggaacagccgctctgggctgcctggtcaaggattactttcccgagcctgtgaccgtgtcctggaatagcggagcactgacaagcggcgtgcacacctttccagccgtgctgcaaagcagcggcctgtactctctgagcagcgtggtcacagtgcctagctctagcctgggcacccagacctacatctgcaatgtgaaccacaagcctagcaacaccaaggtggacaagagagtggaacccaagagctgtggtacccagagttttgggttgttggaccctaaattgagctatctgttggacggaatcctgttcatttacggagtgatcctgaccgcattgttcctgcgggttaagttttccagatccgcagacgcacccgcttaccaacaagggcagaaccaactctacaatgaacttaatttggggcggagggaagagtacgacgttctggacaaaaggaggggacgagatcccgagatgggcggaaagcctcagcgaaggaagaatccgcaagaggggctttataacgaactccagaaagataaaatggcagaagcctatagtgagattgggatgaagggagaaaggaggaggggtaaaggtcacgatgggttgtaccaaggattgagcacagccactaaagatacctatgatgcgctccacatgcaggccctgccgccaagataa

SEQ ID NO: 2290 - DNA, 2454 bp, synthetic construct
  source 1..2454: mol_type = other DNA
atggccttaccagtgaccgccttgctcctgccgctggccttgctgctccacgccgccaggccggaattcaatgctggcgtgacccagacacctaagttccaggtgctgaaaaccggccagagcatgaccctgcaatgcgcccaggacatgaaccatgagtacatgagctggtacagacaggaccccggcatgggcctgagactgatccactactctgtggctatccagaccaccgaccagggcgaagtgcccaatggctacaacgtgtccagaagcaccatcgaggacttcccactgagactgctgtctgccgctcctagccagaccagcgtgtacttttgtgccagcagctacctgggcaacaccggcgagctgttttttggcgagggcagcagactgaccgtgctcgaggacctgaagaacgtgttcccacctgaggtggccgtgttcgagcctagcgaggccgagatcagccacacccagaaagccaccctcgtgtgcctggctaccggcttctaccccgaccatgtggaactgtcttggtgggtcaacggcaaagaggtgcacagcggcgtgtctaccgacccccagccactgaaagaacagcccgccctgaacgacagccggtactgcctgagcagcagactgagagtgtccgccaccttctggcagaacccccggaaccacttcagatgccaggtgcagttctacggcctgagcgagaacgacgagtggacccaggacagagccaagcccgtgacccagatcgtgtctgccgaagcctggggcagagccgattgcggatcccagagcttcggcctgctggaccccaagctgtgctacctgctggatggcatcctgttcatctacggcgtgatcctgaccgccctgttcctgagagtgaagttcagcagaagcgccgacgcccctgcctaccagcagggacagaaccaactgtacaacgagctgaacctgggcagacgggaagagtacgacgtgctggacaagcggagaggcagggaccctgagatgggcggaaagccccagcggagaaagaacccccaggaaggactgtataacgaactccagaaagacaagatggccgaagcctacagcgagatcggcatgaagggcgagcggagaagaggcaagggccacgatggcctgtaccagggcctgagcaccgccaccaaggacacctatgacgccctgcacatgcaggccctgcctccaagaagggccaagcgatctggatctggagcaacaaacttctcactactcaaacaagcaggtgacgtggaggagaatcccgggcctactagtatggactggatttggcgcatccttttccttgtcggcgctgctaccggcgcgcattccttcgaacaagaagtgacacagatccctgccgctctgtctgtgcctgagggcgaaaacctggtgctgaactgctccttcaccgacagcgccatctacaacctccagtggttcaggcaggaccctggaaagggactgacaagcctgctgctgatccagagcagccagagagagcagacctccggcagactgaatgccagcctggataagagcagcggcaggtctaccctgtatatcgccgcttctcagcctggcgatagcgccacatatctgtgtgctgtgcggcctacaagcggcggcagctacatccctacatttggcagaggcaccagcctgatcgtgcacccttatacgcgtatccagaaccctgatcctgccgtgtaccagctgcgggatagcaagagcagcgacaagagcgtgtgtctgttcaccgacttcgacagccagaccaacgtgtcccagagcaaggactccgacgtgtacatcaccgataagaccgtgctggacatgcggagcatggacttcaagagcaactccgccgtggcctggtccaacaagtccgatttcgcctgcgccaacgccttcaacaacagcattatccccgaggacacattcttcccaagccccgagagcagctgcggtacccagagttttgggttgttggaccctaaattgagctatctgttggacggaatcctgttcatttacggagtgatcctgaccgcattgttcctgcgggttaagttttccagatccgcagacgcacccgcttaccaacaagggcagaaccaactctacaatgaacttaatttggggcggagggaagagtacgacgttctggacaaaaggaggggacgagatcccgagatgggcggaaagcctcagcgaaggaagaatccgcaagaggggctttataacgaactccagaaagataaaatggcagaagcctatagtgagattgggatgaagggagaaaggaggaggggtaaaggtcacgatgggttgtaccaaggattgagcacagccactaaagatacctatgatgcgctccacatgcaggccctgccgccaagataa

SEQ ID NO: 2291 - DNA, 2961 bp, synthetic construct
  source 1..2961: mol_type = other DNA
atggccttaccagtgaccgccttgctcctgccgctggccttgctgctccacgccgccaggccggaattcaatgctggcgtgacccagacacctaagttccaggtgctgaaaaccggccagagcatgaccctgcaatgcgcccaggacatgaaccatgagtacatgagctggtacagacaggaccccggcatgggcctgagactgatccactactctgtggctatccagaccaccgaccagggcgaagtgcccaatggctacaacgtgtccagaagcaccatcgaggacttcccactgagactgctgtctgccgctcctagccagaccagcgtgtacttttgtgccagcagctacctgggcaacaccggcgagctgttttttggcgagggcagcagactgaccgtgctcgagggacagcctaaggccaatcctaccgtgacactgttccctccaagcagcgaagaactccaggccaacaaggccacacttgtgtgcctgatctccgacttctaccctggggctgtgacagtggcttggaaggccgatggatctcctgtgaaagccggcgtggaaaccaccaagccatccaagcagagcaacaacaaatacgccgccagctcctacctgagcctgacacctgagcagtggaagtcccacagatcctacagctgccaagtgacccacgaaggcagcaccgtggaaaagacagtggcccctacagagtgcagcggatccctgggagagcctcagctgtgctatatcctggacgccatcctgtttctgtacggcatcgtgctgaccctgctgtactgccggctgaagatccaagtgcggaaggccgccatcaccagctacgagaaatccgacggcgtgtacaccggcctgagcaccagaaatcaagagacatacgagacactgaagcacgaaaagcctccacaaagggccaagcgatctggatctggagcaacaaacttctcactactcaaacaagcaggtgacgtggaggagaatcccgggcctactagtatggactggatttggcgcatccttttccttgtcggcgctgctaccggcgcgcattccttcgaacaagaagtgacacagatccctgccgctctgtctgtgcctgagggcgaaaacctggtgctgaactgctccttcaccgacagcgccatctacaacctccagtggttcaggcaggaccctggaaagggactgacaagcctgctgctgatccagagcagccagagagagcagacctccggcagactgaatgccagcctggataagagcagcggcaggtctaccctgtatatcgccgcttctcagcctggcgatagcgccacatatctgtgtgctgtgcggcctacaagcggcggcagctacatccctacatttggcagaggcaccagcctgatcgtgcacccttatacgcgtatccagaaccctgatcctgccgtgtaccagctgcgggatagcaagagcagcgacaagagcgtgtgtctgttcaccgacttcgacagccagaccaacgtgtcccagagcaaggactccgacgtgtacatcaccgataagaccgtgctggacatgcggagcatggacttcaagagcaactccgccgtggcctggtccaacaagtccgatttcgcctgcgccaacgccttcaacaacagcattatccccgaggacacattcttcccaagccccgagagcagctgcggtacccagagttttgggttgttggaccctaaattgtgctatctgttggacggaatcctgttcatttacggagtgatcctgaccgcattgttcctgcgggttaagttttccagatccgcagacgcacccgcttaccaacaagggcagaaccaactctacaatgaacttaatttggggcggagggaagagtacgacgttctggacaaaaggaggggacgagatcccgagatgggcggaaagcctcagcgaaggaagaatccgcaagaggggctttataacgaactccagaaagataaaatggcagaagcctatagtgagattgggatgaagggagaaaggaggaggggtaaaggtcacgatgggttgtaccaaggattgagcacagccactaaagatacctatgatgcgctccacatgcaggccctgccgccaagacgcgccaagagaagcggatctggcgtgaagcagaccctgaatttcgacctgctgaagctggctggcgacgtggaatccaacccaggcccttctagaggccatatggctctgcctgtgacagctctgctgctgcctctggcactgctgcttcatgctgctagacctagccagtttagagtgtcccctctggacagaacctggaacctgggcgagacagtggaactgaagtgccaggtgctgctgagcaaccctacaagcggctgctcctggctgtttcagcctagaggtgcagccgcctctcctacctttctgctgtacctgagccagaacaagcccaaggccgccgaaggactggacacccagagattcagcggcaagagactgggcgacaccttcgtgctgaccctgagcgacttcagaagagagaacgagggctactacttctgtagcgccctgagcaacagcatcatgtacttcagccacttcgtgcccgtgtttctgcccgccaagcctacaacaacccctgctcctagacctcctacaccagctcctacaatcgccagccagcctctgtctctcagacccgaagcctgtagacctgctgctggcggagctgtgcataccagaggactggatttcgcctgcgacatctacatctgggctcctctggctggcacatgtggcgtgctgctgctgtccctggtcatcaccctgtactgcaaccaccggaacaggcggagagtgtgcaagtgccctagacctgtggtcaagagcggcgacaagcctagcctgagcgccagatatgtt

SEQ ID NO: 2292 - DNA, 2256 bp, synthetic construct; identical to SEQ ID NO: 983
  source 1..2256: mol_type = other DNA

SEQ ID NO: 2293 - DNA, 2256 bp, synthetic construct; identical to SEQ ID NO: 983
  source 1..2256: mol_type = other DNA

SEQ ID NO: 2294 - DNA, 2229 bp, synthetic construct; identical to SEQ ID NO: 988
  source 1..2229: mol_type = other DNA

SEQ ID NO: 2295 - DNA, 2973 bp, synthetic construct
  source 1..2973: mol_type = other DNA
atggccttaccagtgaccgccttgctcctgccgctggccttgctgctccacgccgccaggccggaattcaatgctggcgtgacccagacacctaagttccaggtgctgaaaaccggccagagcatgaccctgcaatgcgcccaggacatgaaccatgagtacatgagctggtacagacaggaccccggcatgggcctgagactgatccactactctgtggctatccagaccaccgaccagggcgaagtgcccaatggctacaacgtgtccagaagcaccatcgaggacttcccactgagactgctgtctgccgctcctagccagaccagcgtgtacttttgtgccagcagctacctgggcaacaccggcgagctgttttttggcgagggcagcagactgaccgtgctcgagggacagcctaaggccaatcctaccgtgacactgttccctccaagcagcgaagaactccaggccaacaaggccacacttgtgtgcctgatctccgacttctaccctggggctgtgacagtggcttggaaggccgatggatctcctgtgaaagccggcgtggaaaccaccaagccatccaagcagagcaacaacaaatacgccgccagctcctacctgagcctgacacctgagcagtggaagtcccacagatcctacagctgccaagtgacccacgaaggcagcaccgtggaaaagacagtggcccctacagagtgcagcacaacacctggcgagagaagtagcctgcctgccttctatcctggcaccagcggctcttgttctggctgtggatctctgagcctgcctctgctggctggactggttgctgctgatgctgtggcctctctgctgattgtgggagccgtgttcctgtgcgccagacctagaagaagccccgctcaagaggacggcaaggtgtacatcaacatgcccggcagaggaagggccaagcgatctggatctggagcaacaaacttctcactactcaaacaagcaggtgacgtggaggagaatcccgggcctactagtatggactggatttggcgcatccttttccttgtcggcgctgctaccggcgcgcattccttcgaacaagaagtgacacagatccctgccgctctgtctgtgcctgagggcgaaaacctggtgctgaactgctccttcaccgacagcgccatctacaacctccagtggttcaggcaggaccctggaaagggactgacaagcctgctgctgatccagagcagccagagagagcagacctccggcagactgaatgccagcctggataagagcagcggcaggtctaccctgtatatcgccgcttctcagcctggcgatagcgccacatatctgtgtgctgtgcggcctacaagcggcggcagctacatccctacatttggcagaggcaccagcctgatcgtgcacccttatacgcgtatccagaaccctgatcctgccgtgtaccagctgcgggatagcaagagcagcgacaagagcgtgtgtctgttcaccgacttcgacagccagaccaacgtgtcccagagcaaggactccgacgtgtacatcaccgataagaccgtgctggacatgcggagcatggacttcaagagcaactccgccgtggcctggtccaacaagtccgatttcgcctgcgccaacgccttcaacaacagcattatccccgaggacacattcttcccaagccccgagagcagctgcggtacccagagttttgggttgttggaccctaaattgtgctatctgttggacggaatcctgttcatttacggagtgatcctgaccgcattgttcctgcgggttaagttttccagatccgcagacgcacccgcttaccaacaagggcagaaccaactctacaatgaacttaatttggggcggagggaagagtacgacgttctggacaaaaggaggggacgagatcccgagatgggcggaaagcctcagcgaaggaagaatccgcaagaggggctttataacgaactccagaaagataaaatggcagaagcctatagtgagattgggatgaagggagaaaggaggaggggtaaaggtcacgatgggttgtaccaaggattgagcacagccactaaagatacctatgatgcgctccacatgcaggccctgccgccaagacgcgccaagagaagcggatctggcgtgaagcagaccctgaatttcgacctgctgaagctggctggcgacgtggaatccaacccaggcccttctagaggccatatggctctgcctgtgacagctctgctgctgcctctggcactgctgcttcatgctgctagacctagccagtttagagtgtcccctctggacagaacctggaacctgggcgagacagtggaactgaagtgccaggtgctgctgagcaaccctacaagcggctgctcctggctgtttcagcctagaggtgcagccgcctctcctacctttctgctgtacctgagccagaacaagcccaaggccgccgaaggactggacacccagagattcagcggcaagagactgggcgacaccttcgtgctgaccctgagcgacttcagaagagagaacgagggctactacttctgtagcgccctgagcaacagcatcatgtacttcagccacttcgtgcccgtgtttctgcccgccaagcctacaacaacccctgctcctagacctcctacaccagctcctacaatcgccagccagcctctgtctctcagacccgaagcctgtagacctgctgctggcggagctgtgcataccagaggactggatttcgcctgcgacatctacatctgggctcctctggctggcacatgtggcgtgctgctgctgtccctggtcatcaccctgtactgcaaccaccggaacaggcggagagtgtgcaagtgccctagacctgtggtcaagagcggcgacaagcctagcctgagcgccagatatgtt

SEQ ID NO: 2296 - DNA, 3072 bp, synthetic construct
  source 1..3072: mol_type = other DNA
atggccttaccagtgaccgccttgctcctgccgctggccttgctgctccacgccgccaggccggaattcaatgctggcgtgacccagacacctaagttccaggtgctgaaaaccggccagagcatgaccctgcaatgcgcccaggacatgaaccatgagtacatgagctggtacagacaggaccccggcatgggcctgagactgatccactactctgtggctatccagaccaccgaccagggcgaagtgcccaatggctacaacgtgtccagaagcaccatcgaggacttcccactgagactgctgtctgccgctcctagccagaccagcgtgtacttttgtgccagcagctacctgggcaacaccggcgagctgttttttggcgagggcagcagactgaccgtgctcgaggacctgaagaacgtgttcccacctgaggtggccgtgttcgagcctagcgaggccgagatcagccacacccagaaagccaccctcgtgtgcctggctaccggcttctaccccgaccatgtggaactgtcttggtgggtcaacggcaaagaggtgcacagcggcgtgtctaccgacccccagccactgaaagaacagcccgccctgaacgacagccggtactgcctgagcagcagactgagagtgtccgccaccttctggcagaacccccggaaccacttcagatgccaggtgcagttctacggcctgagcgagaacgacgagtggacccaggacagagccaagcccgtgacccagatcgtgtctgccgaagcctggggcagagccgattgcggatcccagagcttcggcctgctggaccccaagctgtgctacctgctggatggcatcctgttcatctacggcgtgatcctgaccgccctgttcctgagagtgaagttcagcagaagcgccgacgcccctgcctaccagcagggacagaaccaactgtacaacgagctgaacctgggcagacgggaagagtacgacgtgctggacaagcggagaggcagggaccctgagatgggcggaaagccccagcggagaaagaacccccaggaaggactgtataacgaactccagaaagacaagatggccgaagcctacagcgagatcggcatgaagggcgagcggagaagaggcaagggccacgatggcctgtaccagggcctgagcaccgccaccaaggacacctatgacgccctgcacatgcaggccctgcctccaagaagggccaagcgatctggatctggagcaacaaacttctcactactcaaacaagcaggtgacgtggaggagaatcccgggcctactagtatggactggatttggcgcatccttttccttgtcggcgctgctaccggcgcgcattccttcgaacaagaagtgacacagatccctgccgctctgtctgtgcctgagggcgaaaacctggtgctgaactgctccttcaccgacagcgccatctacaacctccagtggttcaggcaggaccctggaaagggactgacaagcctgctgctgatccagagcagccagagagagcagacctccggcagactgaatgccagcctggataagagcagcggcaggtctaccctgtatatcgccgcttctcagcctggcgatagcgccacatatctgtgtgctgtgcggcctacaagcggcggcagctacatccctacatttggcagaggcaccagcctgatcgtgcacccttatacgcgtgcctctacaaagggaccctccgtgtttcctctggctcccagcagcaagtctacaagcggaggaacagccgctctgggctgcctggtcaaggattactttcccgagcctgtgaccgtgtcctggaatagcggagcactgacaagcggcgtgcacacctttccagccgtgctgcaaagcagcggcctgtactctctgagcagcgtggtcacagtgcctagctctagcctgggcacccagacctacatctgcaatgtgaaccacaagcctagcaacaccaaggtggacaagagagtggaacccaagagctgtacaacgccgggcgaaaggagttccttgccggccttttaccccggcacaagcggaagctgtagtgggtgtggaagcctcagcctcccacttcttgcgggcctcgtcgcggcagatgcagtagcttcacttcttattgtaggcgcggtatttctctgtgctcgaccaaggaggtcacccgctcaggaggatggtaaggtgtatataaatatgccaggacgcggacgcgccaagagaagcggatctggcgtgaagcagaccctgaatttcgacctgctgaagctggctggcgacgtggaatccaacccaggcccttctagaggccatatggctctgcctgtgacagctctgctgctgcctctggcactgctgcttcatgctgctagacctagccagtttagagtgtcccctctggacagaacctggaacctgggcgagacagtggaactgaagtgccaggtgctgctgagcaaccctacaagcggctgctcctggctgtttcagcctagaggtgcagccgcctctcctacctttctgctgtacctgagccagaacaagcccaaggccgccgaaggactggacacccagagattcagcggcaagagactgggcgacaccttcgtgctgaccctgagcgacttcagaagagagaacgagggctactacttctgtagcgccctgagcaacagcatcatgtacttcagccacttcgtgcccgtgtttctgcccgccaagcctacaacaacccctgctcctagacctcctacaccagctcctacaatcgccagccagcctctgtctctcagacccgaagcctgtagacctgctgctggcggagctgtgcataccagaggactggatttcgcctgcgacatctacatctgggctcctctggctggcacatgtggcgtgctgctgctgtccctggtcatcaccctgtactgcaaccaccggaacaggcggagagtgtgcaagtgccctagacctgtggtcaagagcggcgacaagcctagcctgagcgccagatatgtt

SEQ ID NO: 2297 - DNA, 2808 bp, synthetic construct
  source 1..2808: mol_type = other DNA
atggccttaccagtgaccgccttgctcctgccgctggccttgctgctccacgccgccaggccgaatgctggcgtgacccagacacctaagttccaggtgctgaaaaccggccagagcatgaccctgcaatgcgcccaggacatgaaccatgagtacatgagctggtacagacaggaccccggcatgggcctgagactgatccactactctgtggctatccagaccaccgaccagggcgaagtgcccaatggctacaacgtgtccagaagcaccatcgaggacttcccactgagactgctgtctgccgctcctagccagaccagcgtgtacttttgtgccagcagctacctgggcaacaccggcgagctgttttttggcgagggcagcagactgaccgtgctcgagctgtgggtttcacagcctccagagatcagaaccctggaaggcagcagcgccttcctgccttgcagcttcaatgcctctcagggcagactggctatcggcagcgtgacctggttcagagatgaggtggtgcccggcaaagaagtgcggaacggcacccctgagtttagaggaaggctggcccctctggcctccagcagatttctgcacgatcaccaggccgagctgcacatcagagatgtgcgaggacacgacgccagcatctacgtgtgcagagtggaagtgctcggcctcggagttggcacaggcaatggaacaagactggtggtggaaaaagagcaccctcagctcggagccggaacagtgctgcttctgagagccggcttttacgccgtgtcctttctgtctgtggccgtgggcagcaccgtgtactatcagggcaagtgcctgacctggaagggacctagaaggcaactgcctgctgtggtgcctgctcctttgcctcctccatgtggaagctctgcccatctgctgccacctgttccaggcggaagggccaagcgatctggatctggagcaacaaacttctcactactcaaacaagcaggtgacgtggaggagaatcccgggcctactagtatggactggatttggcgcatccttttccttgtcggcgctgctaccggcgcgcattccttcgaacaagaagtgacacagatccctgccgctctgtctgtgcctgagggcgaaaacctggtgctgaactgctccttcaccgacagcgccatctacaacctccagtggttcaggcaggaccctggaaagggactgacaagcctgctgctgatccagagcagccagagagagcagacctccggcagactgaatgccagcctggataagagcagcggcaggtctaccctgtatatcgccgcttctcagcctggcgatagcgccacatatctgtgtgctgtgcggcctacaagcggcggcagctacatccctacatttggcagaggcaccagcctgatcgtgcacccttatacgcgtctgtgggtgtcccagccacctgaaattcggacactggaaggctcctccgcctttctgccctgtagctttaacgccagccaggggagactcgccatcggctctgtgacatggttccgggatgaagtcgtccctggaaaagaagttcgcaacggaacaccagagttcagaggcagactcgccccactggcaagctccagattcctgcatgaccatcaggctgaactgcacattagggacgtgcggggccacgatgcctccatctatgtgtgtcgggtcgaagtgcttggactcggcgtcggaactggaaacggcactaggctggtggtcgagaaagaacatccacagcttggcgctggcaccgtcctgttgcttagagccggattctatgccgtcagcttcctgtccgtggctgtggggtctacagtgtattaccagggaaaatgtctcacctggaaaggccccagacgccagcttccagctgttgttcctgctccactgccaccaccttgtggctcctctgctcacttgcttccaccagtgcctggcggacgcgccaagagaagcggatctggcgtgaagcagaccctgaatttcgacctgctgaagctggctggcgacgtggaatccaacccaggcccttctagaggccatatggctctgcctgtgacagctctgctgctgcctctggcactgctgcttcatgctgctagacctagccagtttagagtgtcccctctggacagaacctggaacctgggcgagacagtggaactgaagtgccaggtgctgctgagcaaccctacaagcggctgctcctggctgtttcagcctagaggtgcagccgcctctcctacctttctgctgtacctgagccagaacaagcccaaggccgccgaaggactggacacccagagattcagcggcaagagactgggcgacaccttcgtgctgaccctgagcgacttcagaagagagaacgagggctactacttctgtagcgccctgagcaacagcatcatgtacttcagccacttcgtgcccgtgtttctgcccgccaagcctacaacaacccctgctcctagacctcctacaccagctcctacaatcgccagccagcctctgtctctcagacccgaagcctgtagacctgctgctggcggagctgtgcataccagaggactggatttcgcctgcgacatctacatctgggctcctctggctggcacatgtggcgtgctgctgctgtccctggtcatcaccctgtactgcaaccaccggaacaggcggagagtgtgcaagtgccctagacctgtggtcaagagcggcgacaagcctagcctgagcgccagatatgtt

SEQ ID NO: 2298 - DNA, 3213 bp, synthetic construct
  source 1..3213: mol_type = other DNA
atggccttaccagtgaccgccttgctcctgccgctggccttgctgctccacgccgccaggccggaattcaatgctggcgtgacccagacacctaagttccaggtgctgaaaaccggccagagcatgaccctgcaatgcgcccaggacatgaaccatgagtacatgagctggtacagacaggaccccggcatgggcctgagactgatccactactctgtggctatccagaccaccgaccagggcgaagtgcccaatggctacaacgtgtccagaagcaccatcgaggacttcccactgagactgctgtctgccgctcctagccagaccagcgtgtacttttgtgccagcagctacctgggcaacaccggcgagctgttttttggcgagggcagcagactgaccgtgctcgagggacagcctaaggccaatcctaccgtgacactgttccctccaagcagcgaagaactccaggccaacaaggccacacttgtgtgcctgatctccgacttctaccctggggctgtgacagtggcttggaaggccgatggatctcctgtgaaagccggcgtggaaaccaccaagccatccaagcagagcaacaacaaatacgccgccagctcctacctgagcctgacacctgagcagtggaagtcccacagatcctacagctgccaagtgacccacgaaggcagcaccgtggaaaagacagtggcccctacagagtgcagcggatcccagagcttcggcctgctggaccccaagctgtgctacctgctggatggcatcctgttcatctacggcgtgatcctgaccgccctgttcctgagagtgaagttcagcagaagcgccgacgcccctgcctaccagcagggacagaaccaactgtacaacgagctgaacctgggcagacgggaagagtacgacgtgctggacaagcggagaggcagggaccctgagatgggcggaaagccccagcggagaaagaacccccaggaaggactgtataacgaactccagaaagacaagatggccgaagcctacagcgagatcggcatgaagggcgagcggagaagaggcaagggccacgatggcctgtaccagggcctgagcaccgccaccaaggacacctatgacgccctgcacatgcaggccctgcctccaagaagggccaagcgatctggatctggagcaacaaacttctcactactcaaacaagcaggtgacgtggaggagaatcccgggcctactagtatggactggatttggcgcatccttttccttgtcggcgctgctaccggcgcgcattccttcgaacaagaagtgacacagatccctgccgctctgtctgtgcctgagggcgaaaacctggtgctgaactgctccttcaccgacagcgccatctacaacctccagtggttcaggcaggaccctggaaagggactgacaagcctgctgctgatccagagcagccagagagagcagacctccggcagactgaatgccagcctggataagagcagcggcaggtctaccctgtatatcgccgcttctcagcctggcgatagcgccacatatctgtgtgctgtgcggcctacaagcggcggcagctacatccctacatttggcagaggcaccagcctgatcgtgcacccttatacgcgtgcctctacaaagggaccctccgtgtttcctctggctcccagcagcaagtctacaagcggaggaacagccgctctgggctgcctggtcaaggattactttcccgagcctgtgaccgtgtcctggaatagcggagcactgacaagcggcgtgcacacctttccagccgtgctgcaaagcagcggcctgtactctctgagcagcgtggtcacagtgcctagctctagcctgggcacccagacctacatctgcaatgtgaaccacaagcctagcaacaccaaggtggacaagagagtggaacccaagagctgtggtacccagagttttgggttgttggaccctaaattgtgctatctgttggacggaatcctgttcatttacggagtgatcctgaccgcattgttcctgcgggttaagttttccagatccgcagacgcacccgcttaccaacaagggcagaaccaactctacaatgaacttaatttggggcggagggaagagtacgacgttctggacaaaaggaggggacgagatcccgagatgggcggaaagcctcagcgaaggaagaatccgcaagaggggctttataacgaactccagaaagataaaatggcagaagcctatagtgagattgggatgaagggagaaaggaggaggggtaaaggtcacgatgggttgtaccaaggattgagcacagccactaaagatacctatgatgcgctccacatgcaggccctgccgccaagacgcgccaagagaagcggatctggcgtgaagcagaccctgaatttcgacctgctgaagctggctggcgacgtggaatccaacccaggcccttctagaggccatatggctctgcctgtgacagctctgctgctgcctctggcactgctgcttcatgctgctagacctagccagtttagagtgtcccctctggacagaacctggaacctgggcgagacagtggaactgaagtgccaggtgctgctgagcaaccctacaagcggctgctcctggctgtttcagcctagaggtgcagccgcctctcctacctttctgctgtacctgagccagaacaagcccaaggccgccgaaggactggacacccagagattcagcggcaagagactgggcgacaccttcgtgctgaccctgagcgacttcagaagagagaacgagggctactacttctgtagcgccctgagcaacagcatcatgtacttcagccacttcgtgcccgtgtttctgcccgccaagcctacaacaacccctgctcctagacctcctacaccagctcctacaatcgccagccagcctctgtctctcagacccgaagcctgtagacctgctgctggcggagctgtgcataccagaggactggatttcgcctgcgacatctacatctgggctcctctggctggcacatgtggcgtgctgctgctgtccctggtcatcaccctgtactgcaaccaccggaacaggcggagagtgtgcaagtgccctagacctgtggtcaagagcggcgacaagcctagcctgagcgccagatatgtt

SEQ ID NO: 2299 - DNA, 3267 bp, synthetic construct
  source 1..3267: mol_type = other DNA
atggccttaccagtgaccgccttgctcctgccgctggccttgctgctccacgccgccaggccggaattcaatgctggcgtgacccagacacctaagttccaggtgctgaaaaccggccagagcatgaccctgcaatgcgcccaggacatgaaccatgagtacatgagctggtacagacaggaccccggcatgggcctgagactgatccactactctgtggctatccagaccaccgaccagggcgaagtgcccaatggctacaacgtgtccagaagcaccatcgaggacttcccactgagactgctgtctgccgctcctagccagaccagcgtgtacttttgtgccagcagctacctgggcaacaccggcgagctgttttttggcgagggcagcagactgaccgtgctcgagggacagcctaaggccaatcctaccgtgacactgttccctccaagcagcgaagaactccaggccaacaaggccacacttgtgtgcctgatctccgacttctaccctggggctgtgacagtggcttggaaggccgatggatctcctgtgaaagccggcgtggaaaccaccaagccatccaagcagagcaacaacaaatacgccgccagctcctacctgagcctgacacctgagcagtggaagtcccacagatcctacagctgccaagtgacccacgaaggcagcaccgtggaaaagacagtggcccctacagagtgcagcggatcccagagcttcggcctgctggaccccaagctgtgctacctgctggatggcatcctgttcatctacggcgtgatcctgaccgccctgttcctgagagtgaagttcagcagaagcgccgacgcccctgcctaccagcagggacagaaccaactgtacaacgagctgaacctgggcagacgggaagagtacgacgtgctggacaagcggagaggcagggaccctgagatgggcggaaagccccagcggagaaagaacccccaggaaggactgtataacgaactccagaaagacaagatggccgaagcctacagcgagatcggcatgaagggcgagcggagaagaggcaagggccacgatggcctgtaccagggcctgagcaccgccaccaaggacacctatgacgccctgcacatgcaggccctgcctccaagaagggccaagcgatctggatctggagcaacaaacttctcactactcaaacaagcaggtgacgtggaggagaatcccgggcctactagtatggactggatttggcgcatccttttccttgtcggcgctgctaccggcgcgcattccttcgaacaagaagtgacacagatccctgccgctctgtctgtgcctgagggcgaaaacctggtgctgaactgctccttcaccgacagcgccatctacaacctccagtggttcaggcaggaccctggaaagggactgacaagcctgctgctgatccagagcagccagagagagcagacctccggcagactgaatgccagcctggataagagcagcggcaggtctaccctgtatatcgccgcttctcagcctggcgatagcgccacatatctgtgtgctgtgcggcctacaagcggcggcagctacatccctacatttggcagaggcaccagcctgatcgtgcacccttatacgcgtgcgtctcccacttctccgaaagttttccccctttccctctgtagcacacaacctgatggaaatgtggtcatcgcatgtctggtacaaggattctttccacaagagccattgagcgttacatggtcagagagcgggcagggagttaccgctaggaatttcccaccctcacaggatgcgagtggtgatctttataccacatcatcacaactcacgttgccagccactcagtgcctcgctggaaagtcagtaacatgccatgtcaaacattacactaatccctcacaagatgttaccgtgccttgcccagtaccttctacgccgcccaccccgtctccatctactccacccacgccatcacctagtggtacccagagttttgggttgttggaccctaaattgtgctatctgttggacggaatcctgttcatttacggagtgatcctgaccgcattgttcctgcgggttaagttttccagatccgcagacgcacccgcttaccaacaagggcagaaccaactctacaatgaacttaatttggggcggagggaagagtacgacgttctggacaaaaggaggggacgagatcccgagatgggcggaaagcctcagcgaaggaagaatccgcaagaggggctttataacgaactccagaaagataaaatggcagaagcctatagtgagattgggatgaagggagaaaggaggaggggtaaaggtcacgatgggttgtaccaaggattgagcacagccactaaagatacctatgatgcgctccacatgcaggccctgccgccaagacgcgccaagagaagcggatctggcgtgaagcagaccctgaatttcgacctgctgaagctggctggcgacgtggaatccaacccaggcccttctagaggccatatggctctgcctgtgacagctctgctgctgcctctggcactgctgcttcatgctgctagacctagccagtttagagtgtcccctctggacagaacctggaacctgggcgagacagtggaactgaagtgccaggtgctgctgagcaaccctacaagcggctgctcctggctgtttcagcctagaggtgcagccgcctctcctacctttctgctgtacctgagccagaacaagcccaaggccgccgaaggactggacacccagagattcagcggcaagagactgggcgacaccttcgtgctgaccctgagcgacttcagaagagagaacgagggctactacttctgtagcgccctgagcaacagcatcatgtacttcagccacttcgtgcccgtgtttctgcccgccaagcctacaacaacccctgctcctagacctcctacaccagctcctacaatcgccagccagcctctgtctctcagacccgaagcctgtagacctgctgctggcggagctgtgcataccagaggactggatttcgcctgcgacatctacatctgggctcctctggctggcacatgtggcgtgctgctgctgtccctggtcatcaccctgtactgcaaccaccggaacaggcggagagtgtgcaagtgccctagacctgtggtcaagagcggcgacaagcctagcctgagcgccagatatgtt

SEQ ID NO: 2300 - DNA, 3210 bp, synthetic construct
  source 1..3210: mol_type = other DNA
atggccttaccagtgaccgccttgctcctgccgctggccttgctgctccacgccgccaggccggaattcaatgctggcgtgacccagacacctaagttccaggtgctgaaaaccggccagagcatgaccctgcaatgcgcccaggacatgaaccatgagtacatgagctggtacagacaggaccccggcatgggcctgagactgatccactactctgtggctatccagaccaccgaccagggcgaagtgcccaatggctacaacgtgtccagaagcaccatcgaggacttcccactgagactgctgtctgccgctcctagccagaccagcgtgtacttttgtgccagcagctacctgggcaacaccggcgagctgttttttggcgagggcagcagactgaccgtgctcgagggacagcctaaggccaatcctaccgtgacactgttccctccaagcagcgaagaactccaggccaacaaggccacacttgtgtgcctgatctccgacttctaccctggggctgtgacagtggcttggaaggccgatggatctcctgtgaaagccggcgtggaaaccaccaagccatccaagcagagcaacaacaaatacgccgccagctcctacctgagcctgacacctgagcagtggaagtcccacagatcctacagctgccaagtgacccacgaaggcagcaccgtggaaaagacagtggcccctacagagtgcagcggatcccagagcttcggcctgctggaccccaagctgtgctacctgctggatggcatcctgttcatctacggcgtgatcctgaccgccctgttcctgagagtgaagttcagcagaagcgccgacgcccctgcctaccagcagggacagaaccaactgtacaacgagctgaacctgggcagacgggaagagtacgacgtgctggacaagcggagaggcagggaccctgagatgggcggaaagccccagcggagaaagaacccccaggaaggactgtataacgaactccagaaagacaagatggccgaagcctacagcgagatcggcatgaagggcgagcggagaagaggcaagggccacgatggcctgtaccagggcctgagcaccgccaccaaggacacctatgacgccctgcacatgcaggccctgcctccaagaagggccaagcgatctggatctggagcaacaaacttctcactactcaaacaagcaggtgacgtggaggagaatcccgggcctactagtatggactggatttggcgcatccttttccttgtcggcgctgctaccggcgcgcattccttcgaacaagaagtgacacagatccctgccgctctgtctgtgcctgagggcgaaaacctggtgctgaactgctccttcaccgacagcgccatctacaacctccagtggttcaggcaggaccctggaaagggactgacaagcctgctgctgatccagagcagccagagagagcagacctccggcagactgaatgccagcctggataagagcagcggcaggtctaccctgtatatcgccgcttctcagcctggcgatagcgccacatatctgtgtgctgtgcggcctacaagcggcggcagctacatccctacatttggcagaggcaccagcctgatcgtgcacccttatacgcgtgcctccacgaagggaccatctgttttccctcttgccccctgctcacggtcaacgtctgaatccacggcagccctgggctgcctcgttaaggactactttccagagccggtaacagtctcctggaacagtggagcccttacatcaggtgttcacactttccctgccgtcttgcaaagtagcggactgtacagccttagttccgttgttacggttccttctagcaacttcggtacacagacatatacttgtaacgtagatcataagcctagcaacaccaaggtggacaaaaccgtagagagaaagtgtggtacccagagttttgggttgttggaccctaaattgtgctatctgttggacggaatcctgttcatttacggagtgatcctgaccgcattgttcctgcgggttaagttttccagatccgcagacgcacccgcttaccaacaagggcagaaccaactctacaatgaacttaatttggggcggagggaagagtacgacgttctggacaaaaggaggggacgagatcccgagatgggcggaaagcctcagcgaaggaagaatccgcaagaggggctttataacgaactccagaaagataaaatggcagaagcctatagtgagattgggatgaagggagaaaggaggaggggtaaaggtcacgatgggttgtaccaaggattgagcacagccactaaagatacctatgatgcgctccacatgcaggccctgccgccaagacgcgccaagagaagcggatctggcgtgaagcagaccctgaatttcgacctgctgaagctggctggcgacgtggaatccaacccaggcccttctagaggccatatggctctgcctgtgacagctctgctgctgcctctggcactgctgcttcatgctgctagacctagccagtttagagtgtcccctctggacagaacctggaacctgggcgagacagtggaactgaagtgccaggtgctgctgagcaaccctacaagcggctgctcctggctgtttcagcctagaggtgcagccgcctctcctacctttctgctgtacctgagccagaacaagcccaaggccgccgaaggactggacacccagagattcagcggcaagagactgggcgacaccttcgtgctgaccctgagcgacttcagaagagagaacgagggctactacttctgtagcgccctgagcaacagcatcatgtacttcagccacttcgtgcccgtgtttctgcccgccaagcctacaacaacccctgctcctagacctcctacaccagctcctacaatcgccagccagcctctgtctctcagacccgaagcctgtagacctgctgctggcggagctgtgcataccagaggactggatttcgcctgcgacatctacatctgggctcctctggctggcacatgtggcgtgctgctgctgtccctggtcatcaccctgtactgcaaccaccggaacaggcggagagtgtgcaagtgccctagacctgtggtcaagagcggcgacaagcctagcctgagcgccagatatgtt

SEQ ID NO: 2301 - DNA, 3375 bp, synthetic construct
  source 1..3375: mol_type = other DNA
atggccttaccagtgaccgccttgctcctgccgctggccttgctgctccacgccgccaggccgaatgctggcgtgacccagacacctaagttccaggtgctgaaaaccggccagagcatgaccctgcaatgcgcccaggacatgaaccatgagtacatgagctggtacagacaggaccccggcatgggcctgagactgatccactactctgtggctatccagaccaccgaccagggcgaagtgcccaatggctacaacgtgtccagaagcaccatcgaggacttcccactgagactgctgtctgccgctcctagccagaccagcgtgtacttttgtgccagcagctacctgggcaacaccggcgagctgttttttggcgagggcagcagactgaccgtgctcgagggacagcctaaggccaatcctaccgtgacactgttccctccaagcagcgaagaactccaggccaacaaggccacacttgtgtgcctgatctccgacttctaccctggggctgtgacagtggcttggaaggccgatggatctcctgtgaaagccggcgtggaaaccaccaagccatccaagcagagcaacaacaaatacgccgccagctcctacctgagcctgacacctgagcagtggaagtcccacagatcctacagctgccaagtgacccacgaaggcagcaccgtggaaaagacagtggcccctacagagtgcagcggatcccagagcttcggcctgctggaccccaagctgtgctacctgctggatggcatcctgttcatctacggcgtgatcctgaccgccctgttcctgagagtgaagttcagcagaagcgccgacgcccctgcctaccagcagggacagaaccaactgtacaacgagctgaacctgggcagacgggaagagtacgacgtgctggacaagcggagaggcagggaccctgagatgggcggaaagccccagcggagaaagaacccccaggaaggactgtataacgaactccagaaagacaagatggccgaagcctacagcgagatcggcatgaagggcgagcggagaagaggcaagggccacgatggcctgtaccagggcctgagcaccgccaccaaggacacctatgacgccctgcacatgcaggccctgcctccaagaagggccaagcgatctggatctggagcaacaaacttctcactactcaaacaagcaggtgacgtggaggagaatcccgggcctactagtatggactggatttggcgcatccttttccttgtcggcgctgctaccggcgcgcattccttcgaacaagaagtgacacagatccctgccgctctgtctgtgcctgagggcgaaaacctggtgctgaactgctccttcaccgacagcgccatctacaacctccagtggttcaggcaggaccctggaaagggactgacaagcctgctgctgatccagagcagccagagagagcagacctccggcagactgaatgccagcctggataagagcagcggcaggtctaccctgtatatcgccgcttctcagcctggcgatagcgccacatatctgtgtgctgtgcggcctacaagcggcggcagctacatccctacatttggcagaggcaccagcctgatcgtgcacccttatacgcgtgctccgacaaaggcgccagacgtttttcctattatttcaggatgtcggcatccgaaagataattccccagttgttctggcgtgtcttatcacgggctaccatcctacatctgttaccgttacgtggtatatgggtacgcaaagccaacctcagcggacttttccagagatccaacggcgagattcatattatatgacatccagtcagttgagtacaccgctgcaacagtggcggcaaggtgagtataagtgtgtggtccaacacacagccagtaaaagtaagaaagagatattccggtggcctgaaagcccgaaggcacaagcatcttctgttccgacggcgcaaccgcaagctgaaggaagtcttgcaaaagcaaccacagcacccgcgacaacacgaaacacaggacgcggaggcgaggaaaagaaaaaagaaaaggaaaaggaagagcaagaggagagggaaactaagacccccggtacccagagttttgggttgttggaccctaaattgtgctatctgttggacggaatcctgttcatttacggagtgatcctgaccgcattgttcctgcgggttaagttttccagatccgcagacgcacccgcttaccaacaagggcagaaccaactctacaatgaacttaatttggggcggagggaagagtacgacgttctggacaaaaggaggggacgagatcccgagatgggcggaaagcctcagcgaaggaagaatccgcaagaggggctttataacgaactccagaaagataaaatggcagaagcctatagtgagattgggatgaagggagaaaggaggaggggtaaaggtcacgatgggttgtaccaaggattgagcacagccactaaagatacctatgatgcgctccacatgcaggccctgccgccaagacgcgccaagagaagcggatctggcgtgaagcagaccctgaatttcgacctgctgaagctggctggcgacgtggaatccaacccaggcccttctagaggccatatggctctgcctgtgacagctctgctgctgcctctggcactgctgcttcatgctgctagacctagccagtttagagtgtcccctctggacagaacctggaacctgggcgagacagtggaactgaagtgccaggtgctgctgagcaaccctacaagcggctgctcctggctgtttcagcctagaggtgcagccgcctctcctacctttctgctgtacctgagccagaacaagcccaaggccgccgaaggactggacacccagagattcagcggcaagagactgggcgacaccttcgtgctgaccctgagcgacttcagaagagagaacgagggctactacttctgtagcgccctgagcaacagcatcatgtacttcagccacttcgtgcccgtgtttctgcccgccaagcctacaacaacccctgctcctagacctcctacaccagctcctacaatcgccagccagcctctgtctctcagacccgaagcctgtagacctgctgctggcggagctgtgcataccagaggactggatttcgcctgcgacatctacatctgggctcctctggctggcacatgtggcgtgctgctgctgtccctggtcatcaccctgtactgcaaccaccggaacaggcggagagtgtgcaagtgccctagacctgtggtcaagagcggcgacaagcctagcctgagcgccagatatgtt

SEQ ID NO: 2302 - DNA, 3201 bp, synthetic construct
  source 1..3201: mol_type = other DNA
atggccttaccagtgaccgccttgctcctgccgctggccttgctgctccacgccgccaggccgaatgctggcgtgacccagacacctaagttccaggtgctgaaaaccggccagagcatgaccctgcaatgcgcccaggacatgaaccatgagtacatgagctggtacagacaggaccccggcatgggcctgagactgatccactactctgtggctatccagaccaccgaccagggcgaagtgcccaatggctacaacgtgtccagaagcaccatcgaggacttcccactgagactgctgtctgccgctcctagccagaccagcgtgtacttttgtgccagcagctacctgggcaacaccggcgagctgttttttggcgagggcagcagactgaccgtgctcgagggacagcctaaggccaatcctaccgtgacactgttccctccaagcagcgaagaactccaggccaacaaggccacacttgtgtgcctgatctccgacttctaccctggggctgtgacagtggcttggaaggccgatggatctcctgtgaaagccggcgtggaaaccaccaagccatccaagcagagcaacaacaaatacgccgccagctcctacctgagcctgacacctgagcagtggaagtcccacagatcctacagctgccaagtgacccacgaaggcagcaccgtggaaaagacagtggcccctacagagtgcagcggatcccagagcttcggcctgctggaccccaagctgtgctacctgctggatggcatcctgttcatctacggcgtgatcctgaccgccctgttcctgagagtgaagttcagcagaagcgccgacgcccctgcctaccagcagggacagaaccaactgtacaacgagctgaacctgggcagacgggaagagtacgacgtgctggacaagcggagaggcagggaccctgagatgggcggaaagccccagcggagaaagaacccccaggaaggactgtataacgaactccagaaagacaagatggccgaagcctacagcgagatcggcatgaagggcgagcggagaagaggcaagggccacgatggcctgtaccagggcctgagcaccgccaccaaggacacctatgacgccctgcacatgcaggccctgcctccaagaagggccaagcgatctggatctggagcaacaaacttctcactactcaaacaagcaggtgacgtggaggagaatcccgggcctactagtatggactggatttggcgcatccttttccttgtcggcgctgctaccggcgcgcattccttcgaacaagaagtgacacagatccctgccgctctgtctgtgcctgagggcgaaaacctggtgctgaactgctccttcaccgacagcgccatctacaacctccagtggttcaggcaggaccctggaaagggactgacaagcctgctgctgatccagagcagccagagagagcagacctccggcagactgaatgccagcctggataagagcagcggcaggtctaccctgtatatcgccgcttctcagcctggcgatagcgccacatatctgtgtgctgtgcggcctacaagcggcggcagctacatccctacatttggcagaggcaccagcctgatcgtgcacccttatacgcgtgcctcaacgaaagggcctagcgtcttccccctggcgccgtgctcacgatccacaagcgaatccaccgccgctctcggatgcctcgtaaaggattatttccctgaaccagtcacggtgtcatggaacagcggtgcccttaccagcggcgtccatacctttcctgctgtgctccagtccagcggactttatagtctcagctctgtcgtgaccgtcccttcctctaattttggcacccagacttacacgtgcaacgtcgatcataagcccagtaacaccaaggtagacaagacggtggaacgaaagggtacccagagttttgggttgttggaccctaaattgtgctatctgttggacggaatcctgttcatttacggagtgatcctgaccgcattgttcctgcgggttaagttttccagatccgcagacgcacccgcttaccaacaagggcagaaccaactctacaatgaacttaatttggggcggagggaagagtacgacgttctggacaaaaggaggggacgagatcccgagatgggcggaaagcctcagcgaaggaagaatccgcaagaggggctttataacgaactccagaaagataaaatggcagaagcctatagtgagattgggatgaagggagaaaggaggaggggtaaaggtcacgatgggttgtaccaaggattgagcacagccactaaagatacctatgatgcgctccacatgcaggccctgccgccaagacgcgccaagagaagcggatctggcgtgaagcagaccctgaatttcgacctgctgaagctggctggcgacgtggaatccaacccaggcccttctagaggccatatggctctgcctgtgacagctctgctgctgcctctggcactgctgcttcatgctgctagacctagccagtttagagtgtcccctctggacagaacctggaacctgggcgagacagtggaactgaagtgccaggtgctgctgagcaaccctacaagcggctgctcctggctgtttcagcctagaggtgcagccgcctctcctacctttctgctgtacctgagccagaacaagcccaaggccgccgaaggactggacacccagagattcagcggcaagagactgggcgacaccttcgtgctgaccctgagcgacttcagaagagagaacgagggctactacttctgtagcgccctgagcaacagcatcatgtacttcagccacttcgtgcccgtgtttctgcccgccaagcctacaacaacccctgctcctagacctcctacaccagctcctacaatcgccagccagcctctgtctctcagacccgaagcctgtagacctgctgctggcggagctgtgcataccagaggactggatttcgcctgcgacatctacatctgggctcctctggctggcacatgtggcgtgctgctgctgtccctggtcatcaccctgtactgcaaccaccggaacaggcggagagtgtgcaagtgccctagacctgtggtcaagagcggcgacaagcctagcctgagcgccagatatgtt

SEQ ID NO: 2303 - DNA, 3222 bp, synthetic construct
  source 1..3222: mol_type = other DNA
atggccttaccagtgaccgccttgctcctgccgctggccttgctgctccacgccgccaggccgaatgctggcgtgacccagacacctaagttccaggtgctgaaaaccggccagagcatgaccctgcaatgcgcccaggacatgaaccatgagtacatgagctggtacagacaggaccccggcatgggcctgagactgatccactactctgtggctatccagaccaccgaccagggcgaagtgcccaatggctacaacgtgtccagaagcaccatcgaggacttcccactgagactgctgtctgccgctcctagccagaccagcgtgtacttttgtgccagcagctacctgggcaacaccggcgagctgttttttggcgagggcagcagactgaccgtgctcgagggacagcctaaggccaatcctaccgtgacactgttccctccaagcagcgaagaactccaggccaacaaggccacacttgtgtgcctgatctccgacttctaccctggggctgtgacagtggcttggaaggccgatggatctcctgtgaaagccggcgtggaaaccaccaagccatccaagcagagcaacaacaaatacgccgccagctcctacctgagcctgacacctgagcagtggaagtcccacagatcctacagctgccaagtgacccacgaaggcagcaccgtggaaaagacagtggcccctacagagtgcagcggatcccagagcttcggcctgctggaccccaagctgtgctacctgctggatggcatcctgttcatctacggcgtgatcctgaccgccctgttcctgagagtgaagttcagcagaagcgccgacgcccctgcctaccagcagggacagaaccaactgtacaacgagctgaacctgggcagacgggaagagtacgacgtgctggacaagcggagaggcagggaccctgagatgggcggaaagccccagcggagaaagaacccccaggaaggactgtataacgaactccagaaagacaagatggccgaagcctacagcgagatcggcatgaagggcgagcggagaagaggcaagggccacgatggcctgtaccagggcctgagcaccgccaccaaggacacctatgacgccctgcacatgcaggccctgcctccaagaagggccaagcgatctggatctggagcaacaaacttctcactactcaaacaagcaggtgacgtggaggagaatcccgggcctactagtatggactggatttggcgcatccttttccttgtcggcgctgctaccggcgcgcattccttcgaacaagaagtgacacagatccctgccgctctgtctgtgcctgagggcgaaaacctggtgctgaactgctccttcaccgacagcgccatctacaacctccagtggttcaggcaggaccctggaaagggactgacaagcctgctgctgatccagagcagccagagagagcagacctccggcagactgaatgccagcctggataagagcagcggcaggtctaccctgtatatcgccgcttctcagcctggcgatagcgccacatatctgtgtgctgtgcggcctacaagcggcggcagctacatccctacatttggcagaggcaccagcctgatcgtgcacccttatacgcgtgcgtcacctacgtccccaaaagtgttcccgctgtcactcgattccactccacaggacggtaacgtggtggttgcctgcctggtacaaggtttctttcctcaagaaccactctctgtgacgtggtctgaaagtggtcagaatgttacagcacggaacttcccaccgagtcaagatgcgagtggggatctctatacgacatccagtcaactcacactgcccgcaacacaatgccccgatggcaaatctgttacctgccatgtgaaacattacaccaatccatcccaggatgtgacagtaccttgtccggttccgccccctcccccgggtacccagagttttgggttgttggaccctaaattgtgctatctgttggacggaatcctgttcatttacggagtgatcctgaccgcattgttcctgcgggttaagttttccagatccgcagacgcacccgcttaccaacaagggcagaaccaactctacaatgaacttaatttggggcggagggaagagtacgacgttctggacaaaaggaggggacgagatcccgagatgggcggaaagcctcagcgaaggaagaatccgcaagaggggctttataacgaactccagaaagataaaatggcagaagcctatagtgagattgggatgaagggagaaaggaggaggggtaaaggtcacgatgggttgtaccaaggattgagcacagccactaaagatacctatgatgcgctccacatgcaggccctgccgccaagacgcgccaagagaagcggatctggcgtgaagcagaccctgaatttcgacctgctgaagctggctggcgacgtggaatccaacccaggcccttctagaggccatatggctctgcctgtgacagctctgctgctgcctctggcactgctgcttcatgctgctagacctagccagtttagagtgtcccctctggacagaacctggaacctgggcgagacagtggaactgaagtgccaggtgctgctgagcaaccctacaagcggctgctcctggctgtttcagcctagaggtgcagccgcctctcctacctttctgctgtacctgagccagaacaagcccaaggccgccgaaggactggacacccagagattcagcggcaagagactgggcgacaccttcgtgctgaccctgagcgacttcagaagagagaacgagggctactacttctgtagcgccctgagcaacagcatcatgtacttcagccacttcgtgcccgtgtttctgcccgccaagcctacaacaacccctgctcctagacctcctacaccagctcctacaatcgccagccagcctctgtctctcagacccgaagcctgtagacctgctgctggcggagctgtgcataccagaggactggatttcgcctgcgacatctacatctgggctcctctggctggcacatgtggcgtgctgctgctgtccctggtcatcaccctgtactgcaaccaccggaacaggcggagagtgtgcaagtgccctagacctgtggtcaagagcggcgacaagcctagcctgagcgccagatatgtt

SEQ ID NO: 2304 - DNA, 3207 bp, synthetic construct
  source 1..3207: mol_type = other DNA
atggccttaccagtgaccgccttgctcctgccgctggccttgctgctccacgccgccaggccgaatgctggcgtgacccagacacctaagttccaggtgctgaaaaccggccagagcatgaccctgcaatgcgcccaggacatgaaccatgagtacatgagctggtacagacaggaccccggcatgggcctgagactgatccactactctgtggctatccagaccaccgaccagggcgaagtgcccaatggctacaacgtgtccagaagcaccatcgaggacttcccactgagactgctgtctgccgctcctagccagaccagcgtgtacttttgtgccagcagctacctgggcaacaccggcgagctgttttttggcgagggcagcagactgaccgtgctcgagggacagcctaaggccaatcctaccgtgacactgttccctccaagcagcgaagaactccaggccaacaaggccacacttgtgtgcctgatctccgacttctaccctggggctgtgacagtggcttggaaggccgatggatctcctgtgaaagccggcgtggaaaccaccaagccatccaagcagagcaacaacaaatacgccgccagctcctacctgagcctgacacctgagcagtggaagtcccacagatcctacagctgccaagtgacccacgaaggcagcaccgtggaaaagacagtggcccctacagagtgcagcggatcccagagcttcggcctgctggaccccaagctgtgctacctgctggatggcatcctgttcatctacggcgtgatcctgaccgccctgttcctgagagtgaagttcagcagaagcgccgacgcccctgcctaccagcagggacagaaccaactgtacaacgagctgaacctgggcagacgggaagagtacgacgtgctggacaagcggagaggcagggaccctgagatgggcggaaagccccagcggagaaagaacccccaggaaggactgtataacgaactccagaaagacaagatggccgaagcctacagcgagatcggcatgaagggcgagcggagaagaggcaagggccacgatggcctgtaccagggcctgagcaccgccaccaaggacacctatgacgccctgcacatgcaggccctgcctccaagaagggccaagcgatctggatctggagcaacaaacttctcactactcaaacaagcaggtgacgtggaggagaatcccgggcctactagtatggactggatttggcgcatccttttccttgtcggcgctgctaccggcgcgcattccttcgaacaagaagtgacacagatccctgccgctctgtctgtgcctgagggcgaaaacctggtgctgaactgctccttcaccgacagcgccatctacaacctccagtggttcaggcaggaccctggaaagggactgacaagcctgctgctgatccagagcagccagagagagcagacctccggcagactgaatgccagcctggataagagcagcggcaggtctaccctgtatatcgccgcttctcagcctggcgatagcgccacatatctgtgtgctgtgcggcctacaagcggcggcagctacatccctacatttggcagaggcaccagcctgatcgtgcacccttatacgcgtgctagtacccagtcaccttctgttttcccgcttactagatgctgcaagaacataccatccaatgccacttctgtcacactgggctgtcttgctacaggttattttcctgagccggtgatggtcacttgggataccggtagcctgaatggaactacaatgacgctgcctgccacgacgctcacattgagtgggcattacgcgacaattagtcttttgacggtaagcggagcttgggctaagcagatgttcacttgcagagtagcgcacactccctctagtactgactgggttgacaacaaaaccttttctggtacccagagttttgggttgttggaccctaaattgtgctatctgttggacggaatcctgttcatttacggagtgatcctgaccgcattgttcctgcgggttaagttttccagatccgcagacgcacccgcttaccaacaagggcagaaccaactctacaatgaacttaatttggggcggagggaagagtacgacgttctggacaaaaggaggggacgagatcccgagatgggcggaaagcctcagcgaaggaagaatccgcaagaggggctttataacgaactccagaaagataaaatggcagaagcctatagtgagattgggatgaagggagaaaggaggaggggtaaaggtcacgatgggttgtaccaaggattgagcacagccactaaagatacctatgatgcgctccacatgcaggccctgccgccaagacgcgccaagagaagcggatctggcgtgaagcagaccctgaatttcgacctgctgaagctggctggcgacgtggaatccaacccaggcccttctagaggccatatggctctgcctgtgacagctctgctgctgcctctggcactgctgcttcatgctgctagacctagccagtttagagtgtcccctctggacagaacctggaacctgggcgagacagtggaactgaagtgccaggtgctgctgagcaaccctacaagcggctgctcctggctgtttcagcctagaggtgcagccgcctctcctacctttctgctgtacctgagccagaacaagcccaaggccgccgaaggactggacacccagagattcagcggcaagagactgggcgacaccttcgtgctgaccctgagcgacttcagaagagagaacgagggctactacttctgtagcgccctgagcaacagcatcatgtacttcagccacttcgtgcccgtgtttctgcccgccaagcctacaacaacccctgctcctagacctcctacaccagctcctacaatcgccagccagcctctgtctctcagacccgaagcctgtagacctgctgctggcggagctgtgcataccagaggactggatttcgcctgcgacatctacatctgggctcctctggctggcacatgtggcgtgctgctgctgtccctggtcatcaccctgtactgcaaccaccggaacaggcggagagtgtgcaagtgccctagacctgtggtcaagagcggcgacaagcctagcctgagcgccagatatgtt

SEQ ID NO: 2305 - DNA, 3207 bp, synthetic construct
  source 1..3207: mol_type = other DNA
atggccttaccagtgaccgccttgctcctgccgctggccttgctgctccacgccgccaggccgaatgctggcgtgacccagacacctaagttccaggtgctgaaaaccggccagagcatgaccctgcaatgcgcccaggacatgaaccatgagtacatgagctggtacagacaggaccccggcatgggcctgagactgatccactactctgtggctatccagaccaccgaccagggcgaagtgcccaatggctacaacgtgtccagaagcaccatcgaggacttcccactgagactgctgtctgccgctcctagccagaccagcgtgtacttttgtgccagcagctacctgggcaacaccggcgagctgttttttggcgagggcagcagactgaccgtgctcgagggacagcctaaggccaatcctaccgtgacactgttccctccaagcagcgaagaactccaggccaacaaggccacacttgtgtgcctgatctccgacttctaccctggggctgtgacagtggcttggaaggccgatggatctcctgtgaaagccggcgtggaaaccaccaagccatccaagcagagcaacaacaaatacgccgccagctcctacctgagcctgacacctgagcagtggaagtcccacagatcctacagctgccaagtgacccacgaaggcagcaccgtggaaaagacagtggcccctacagagtgcagcggatcccagagcttcggcctgctggaccccaagctgtgctacctgctggatggcatcctgttcatctacggcgtgatcctgaccgccctgttcctgagagtgaagttcagcagaagcgccgacgcccctgcctaccagcagggacagaaccaactgtacaacgagctgaacctgggcagacgggaagagtacgacgtgctggacaagcggagaggcagggaccctgagatgggcggaaagccccagcggagaaagaacccccaggaaggactgtataacgaactccagaaagacaagatggccgaagcctacagcgagatcggcatgaagggcgagcggagaagaggcaagggccacgatggcctgtaccagggcctgagcaccgccaccaaggacacctatgacgccctgcacatgcaggccctgcctccaagaagggccaagcgatctggatctggagcaacaaacttctcactactcaaacaagcaggtgacgtggaggagaatcccgggcctactagtatggactggatttggcgcatccttttccttgtcggcgctgctaccggcgcgcattccttcgaacaagaagtgacacagatccctgccgctctgtctgtgcctgagggcgaaaacctggtgctgaactgctccttcaccgacagcgccatctacaacctccagtggttcaggcaggaccctggaaagggactgacaagcctgctgctgatccagagcagccagagagagcagacctccggcagactgaatgccagcctggataagagcagcggcaggtctaccctgtatatcgccgcttctcagcctggcgatagcgccacatatctgtgtgctgtgcggcctacaagcggcggcagctacatccctacatttggcagaggcaccagcctgatcgtgcacccttatacgcgtgcgtccactaagggtccgtcagtcttcccgctggcgccctgttcccgcagcacgagtgaatctaccgccgcccttgggtgcttggtaaaagactattttcctgagcccgttacagtatcatggaacagcggggctctgactagcggggtgcatacgttccctgcggttctgcaatctagcggactgtattctctctccagtgttgtgaccgtgccaagctccagcctcggtactaaaacttatacatgtaatgtggatcataaaccttcaaataccaaggttgacaaaagggtagagagtaagtacggtggtacccagagttttgggttgttggaccctaaattgtgctatctgttggacggaatcctgttcatttacggagtgatcctgaccgcattgttcctgcgggttaagttttccagatccgcagacgcacccgcttaccaacaagggcagaaccaactctacaatgaacttaatttggggcggagggaagagtacgacgttctggacaaaaggaggggacgagatcccgagatgggcggaaagcctcagcgaaggaagaatccgcaagaggggctttataacgaactccagaaagataaaatggcagaagcctatagtgagattgggatgaagggagaaaggaggaggggtaaaggtcacgatgggttgtaccaaggattgagcacagccactaaagatacctatgatgcgctccacatgcaggccctgccgccaagacgcgccaagagaagcggatctggcgtgaagcagaccctgaatttcgacctgctgaagctggctggcgacgtggaatccaacccaggcccttctagaggccatatggctctgcctgtgacagctctgctgctgcctctggcactgctgcttcatgctgctagacctagccagtttagagtgtcccctctggacagaacctggaacctgggcgagacagtggaactgaagtgccaggtgctgctgagcaaccctacaagcggctgctcctggctgtttcagcctagaggtgcagccgcctctcctacctttctgctgtacctgagccagaacaagcccaaggccgccgaaggactggacacccagagattcagcggcaagagactgggcgacaccttcgtgctgaccctgagcgacttcagaagagagaacgagggctactacttctgtagcgccctgagcaacagcatcatgtacttcagccacttcgtgcccgtgtttctgcccgccaagcctacaacaacccctgctcctagacctcctacaccagctcctacaatcgccagccagcctctgtctctcagacccgaagcctgtagacctgctgctggcggagctgtgcataccagaggactggatttcgcctgcgacatctacatctgggctcctctggctggcacatgtggcgtgctgctgctgtccctggtcatcaccctgtactgcaaccaccggaacaggcggagagtgtgcaagtgccctagacctgtggtcaagagcggcgacaagcctagcctgagcgccagatatgtt

SEQ ID NO: 2306 - DNA, 3207 bp, synthetic construct
  source 1..3207: mol_type = other DNA
atggccttaccagtgaccgccttgctcctgccgctggccttgctgctccacgccgccaggccgaatgctggcgtgacccagacacctaagttccaggtgctgaaaaccggccagagcatgaccctgcaatgcgcccaggacatgaaccatgagtacatgagctggtacagacaggaccccggcatgggcctgagactgatccactactctgtggctatccagaccaccgaccagggcgaagtgcccaatggctacaacgtgtccagaagcaccatcgaggacttcccactgagactgctgtctgccgctcctagccagaccagcgtgtacttttgtgccagcagctacctgggcaacaccggcgagctgttttttggcgagggcagcagactgaccgtgctcgagggacagcctaaggccaatcctaccgtgacactgttccctccaagcagcgaagaactccaggccaacaaggccacacttgtgtgcctgatctccgacttctaccctggggctgtgacagtggcttggaaggccgatggatctcctgtgaaagccggcgtggaaaccaccaagccatccaagcagagcaacaacaaatacgccgccagctcctacctgagcctgacacctgagcagtggaagtcccacagatcctacagctgccaagtgacccacgaaggcagcaccgtggaaaagacagtggcccctacagagtgcagcggatcccagagcttcggcctgctggaccccaagctgtgctacctgctggatggcatcctgttcatctacggcgtgatcctgaccgccctgttcctgagagtgaagttcagcagaagcgccgacgcccctgcctaccagcagggacagaaccaactgtacaacgagctgaacctgggcagacgggaagagtacgacgtgctggacaagcggagaggcagggaccctgagatgggcggaaagccccagcggagaaagaacccccaggaaggactgtataacgaactccagaaagacaagatggccgaagcctacagcgagatcggcatgaagggcgagcggagaagaggcaagggccacgatggcctgtaccagggcctgagcaccgccaccaaggacacctatgacgccctgcacatgcaggccctgcctccaagaagggccaagcgatctggatctggagcaacaaacttctcactactcaaacaagcaggtgacgtggaggagaatcccgggcctactagtatggactggatttggcgcatccttttccttgtcggcgctgctaccggcgcgcattccttcgaacaagaagtgacacagatccctgccgctctgtctgtgcctgagggcgaaaacctggtgctgaactgctccttcaccgacagcgccatctacaacctccagtggttcaggcaggaccctggaaagggactgacaagcctgctgctgatccagagcagccagagagagcagacctccggcagactgaatgccagcctggataagagcagcggcaggtctaccctgtatatcgccgcttctcagcctggcgatagcgccacatatctgtgtgctgtgcggcctacaagcggcggcagctacatccctacatttggcagaggcaccagcctgatcgtgcacccttatacgcgtgcaagtacaaagggacccagtgttttcccgctcgccccctgttcacgatcaacgagtgagtccactgcggctctcggatgcctcgtcaaagactacttccccgagccggtgactgttagttggaactctggggctcttacttcaggcgtacacacattccccgccgtgcttcagtcaagtgggctctactcacttagcagtgtggtaacggttccctctagcaactttggcacccaaacatatacttgcaacgtcgatcacaagccgtcaaataccaaagttgacaagaccgttgaaaggaaatgttgtggtacccagagttttgggttgttggaccctaaattgtgctatctgttggacggaatcctgttcatttacggagtgatcctgaccgcattgttcctgcgggttaagttttccagatccgcagacgcacccgcttaccaacaagggcagaaccaactctacaatgaacttaatttggggcggagggaagagtacgacgttctggacaaaaggaggggacgagatcccgagatgggcggaaagcctcagcgaaggaagaatccgcaagaggggctttataacgaactccagaaagataaaatggcagaagcctatagtgagattgggatgaagggagaaaggaggaggggtaaaggtcacgatgggttgtaccaaggattgagcacagccactaaagatacctatgatgcgctccacatgcaggccctgccgccaagacgcgccaagagaagcggatctggcgtgaagcagaccctgaatttcgacctgctgaagctggctggcgacgtggaatccaacccaggcccttctagaggccatatggctctgcctgtgacagctctgctgctgcctctggcactgctgcttcatgctgctagacctagccagtttagagtgtcccctctggacagaacctggaacctgggcgagacagtggaactgaagtgccaggtgctgctgagcaaccctacaagcggctgctcctggctgtttcagcctagaggtgcagccgcctctcctacctttctgctgtacctgagccagaacaagcccaaggccgccgaaggactggacacccagagattcagcggcaagagactgggcgacaccttcgtgctgaccctgagcgacttcagaagagagaacgagggctactacttctgtagcgccctgagcaacagcatcatgtacttcagccacttcgtgcccgtgtttctgcccgccaagcctacaacaacccctgctcctagacctcctacaccagctcctacaatcgccagccagcctctgtctctcagacccgaagcctgtagacctgctgctggcggagctgtgcataccagaggactggatttcgcctgcgacatctacatctgggctcctctggctggcacatgtggcgtgctgctgctgtccctggtcatcaccctgtactgcaaccaccggaacaggcggagagtgtgcaagtgccctagacctgtggtcaagagcggcgacaagcctagcctgagcgccagatatgtt

SEQ ID NO: 2307 - DNA, 3252 bp, synthetic construct
  source 1..3252: mol_type = other DNA
atggccttaccagtgaccgccttgctcctgccgctggccttgctgctccacgccgccaggccgaatgctggcgtgacccagacacctaagttccaggtgctgaaaaccggccagagcatgaccctgcaatgcgcccaggacatgaaccatgagtacatgagctggtacagacaggaccccggcatgggcctgagactgatccactactctgtggctatccagaccaccgaccagggcgaagtgcccaatggctacaacgtgtccagaagcaccatcgaggacttcccactgagactgctgtctgccgctcctagccagaccagcgtgtacttttgtgccagcagctacctgggcaacaccggcgagctgttttttggcgagggcagcagactgaccgtgctcgaggacctgaagaacgtgttcccacctgaggtggccgtgttcgagcctagcgaggccgagatcagccacacccagaaagccaccctcgtgtgcctggctaccggcttctaccccgaccatgtggaactgtcttggtgggtcaacggcaaagaggtgcacagcggcgtgtctaccgacccccagccactgaaagaacagcccgccctgaacgacagccggtactgcctgagcagcagactgagagtgtccgccaccttctggcagaacccccggaaccacttcagatgccaggtgcagttctacggcctgagcgagaacgacgagtggacccaggacagagccaagcccgtgacccagatcgtgtctgccgaagcctggggcagagccgattgcggatcccagagcttcggcctgctggaccccaagctgtgctacctgctggatggcatcctgttcatctacggcgtgatcctgaccgccctgttcctgagagtgaagttcagcagaagcgccgacgcccctgcctaccagcagggacagaaccaactgtacaacgagctgaacctgggcagacgggaagagtacgacgtgctggacaagcggagaggcagggaccctgagatgggcggaaagccccagcggagaaagaacccccaggaaggactgtataacgaactccagaaagacaagatggccgaagcctacagcgagatcggcatgaagggcgagcggagaagaggcaagggccacgatggcctgtaccagggcctgagcaccgccaccaaggacacctatgacgccctgcacatgcaggccctgcctccaagaagggccaagcgatctggatctggagcaacaaacttctcactactcaaacaagcaggtgacgtggaggagaatcccgggcctactagtatggactggatttggcgcatccttttccttgtcggcgctgctaccggcgcgcattccttcgaacaagaagtgacacagatccctgccgctctgtctgtgcctgagggcgaaaacctggtgctgaactgctccttcaccgacagcgccatctacaacctccagtggttcaggcaggaccctggaaagggactgacaagcctgctgctgatccagagcagccagagagagcagacctccggcagactgaatgccagcctggataagagcagcggcaggtctaccctgtatatcgccgcttctcagcctggcgatagcgccacatatctgtgtgctgtgcggcctacaagcggcggcagctacatccctacatttggcagaggcaccagcctgatcgtgcacccttatacgcgtatccagaaccctgatcctgccgtgtaccagctgcgggatagcaagagcagcgacaagagcgtgtgtctgttcaccgacttcgacagccagaccaacgtgtcccagagcaaggactccgacgtgtacatcaccgataagaccgtgctggacatgcggagcatggacttcaagagcaactccgccgtggcctggtccaacaagtccgatttcgcctgcgccaacgccttcaacaacagcattatccccgaggacacattcttcccaagccccgagagcagctgcggtacccagagttttgggttgttggaccctaaattgtgctatctgttggacggaatcctgttcatttacggagtgatcctgaccgcattgttcctgcgggttaagttttccagatccgcagacgcacccgcttaccaacaagggcagaaccaactctacaatgaacttaatttggggcggagggaagagtacgacgttctggacaaaaggaggggacgagatcccgagatgggcggaaagcctcagcgaaggaagaatccgcaagaggggctttataacgaactccagaaagataaaatggcagaagcctatagtgagattgggatgaagggagaaaggaggaggggtaaaggtcacgatgggttgtaccaaggattgagcacagccactaaagatacctatgatgcgctccacatgcaggccctgccgccaagacgcgccaagagaagcggatctggcgtgaagcagaccctgaatttcgacctgctgaagctggctggcgacgtggaatccaacccaggcccttctagaggccatatggctctgcctgtgacagctctgctgctgcctctggcactgctgcttcatgctgctagacctagccagtttagagtgtcccctctggacagaacctggaacctgggcgagacagtggaactgaagtgccaggtgctgctgagcaaccctacaagcggctgctcctggctgtttcagcctagaggtgcagccgcctctcctacctttctgctgtacctgagccagaacaagcccaaggccgccgaaggactggacacccagagattcagcggcaagagactgggcgacaccttcgtgctgaccctgagcgacttcagaagagagaacgagggctactacttctgtagcgccctgagcaacagcatcatgtacttcagccacttcgtgcccgtgtttctgcccgccaagcctacaacaacccctgctcctagacctcctacaccagctcctacaatcgccagccagcctctgtctctcagacccgaagcctgtagacctgctgctggcggagctgtgcataccagaggactggatttcgcctgcgacatctacatctgggctcctctggctggcacatgtggcgtgctgctgctgtccctggtcatcaccctgtactgcaaccaccggaacaggcggagagtgtgcaagtgccctagacctgtggtcaagagcggcgacaagcctagcctgagcgccagatatgtt

SEQ ID NO: 2308 - DNA, 3252 bp, synthetic construct
  source 1..3252: mol_type = other DNA
atggccttaccagtgaccgccttgctcctgccgctggccttgctgctccacgccgccaggccgaatgctggcgtgacccagacacctaagttccaggtgctgaaaaccggccagagcatgaccctgcaatgcgcccaggacatgaaccatgagtacatgagctggtacagacaggaccccggcatgggcctgagactgatccactactctgtggctatccagaccaccgaccagggcgaagtgcccaatggctacaacgtgtccagaagcaccatcgaggacttcccactgagactgctgtctgccgctcctagccagaccagcgtgtacttttgtgccagcagctacctgggcaacaccggcgagctgttttttggcgagggcagcagactgaccgtgctcgaggacctgaagaacgtgttcccacctgaggtggccgtgttcgagcctagcaaggccgagatcgcccacacccagaaagccaccctcgtgtgcctggctaccggcttctaccccgaccatgtggaactgtcttggtgggtcaacggcaaagaggtgcacagcggcgtgtgtaccgacccccagccactgaaagaacagcccgccctgaacgacagccggtactgcctgagcagcagactgagagtgtccgccaccttctggcagaacccccggaaccacttcagatgccaggtgcagttctacggcctgagcgagaacgacgagtggacccaggacagagccaagcccgtgacccagatcgtgtctgccgaagcctggggcagagccgattgcggatcccagagcttcggcctgctggaccccaagctgtgctacctgctggatggcatcctgttcatctacggcgtgatcctgaccgccctgttcctgagagtgaagttcagcagaagcgccgacgcccctgcctaccagcagggacagaaccaactgtacaacgagctgaacctgggcagacgggaagagtacgacgtgctggacaagcggagaggcagggaccctgagatgggcggaaagccccagcggagaaagaacccccaggaaggactgtataacgaactccagaaagacaagatggccgaagcctacagcgagatcggcatgaagggcgagcggagaagaggcaagggccacgatggcctgtaccagggcctgagcaccgccaccaaggacacctatgacgccctgcacatgcaggccctgcctccaagaagggccaagcgatctggatctggagcaacaaacttctcactactcaaacaagcaggtgacgtggaggagaatcccgggcctactagtatggactggatttggcgcatccttttccttgtcggcgctgctaccggcgcgcattccttcgaacaagaagtgacacagatccctgccgctctgtctgtgcctgagggcgaaaacctggtgctgaactgctccttcaccgacagcgccatctacaacctccagtggttcaggcaggaccctggaaagggactgacaagcctgctgctgatccagagcagccagagagagcagacctccggcagactgaatgccagcctggataagagcagcggcaggtctaccctgtatatcgccgcttctcagcctggcgatagcgccacatatctgtgtgctgtgcggcctacaagcggcggcagctacatccctacatttggcagaggcaccagcctgatcgtgcacccttatacgcgtatccagaaccctgatcctgccgtgtaccagctgcgggatagcaagagcagcgacaagagcgtgtgtctgttcaccgacttcgacagccagaccaacgtgtcccagagcaaggactccgacgtgtacatcaccgataagtgcgtgctggacatgcggagcatggacttcaagagcaactccgccgtggcctggtccaacaagtccgatttcgcctgcgccaacgccttcaacaacagcattatccccgaggacacattcttcccaagcagcgacgtgccctgcggtacccagagttttgggttgttggaccctaaattgtgctatctgttggacggaatcctgttcatttacggagtgatcctgaccgcattgttcctgcgggttaagttttccagatccgcagacgcacccgcttaccaacaagggcagaaccaactctacaatgaacttaatttggggcggagggaagagtacgacgttctggacaaaaggaggggacgagatcccgagatgggcggaaagcctcagcgaaggaagaatccgcaagaggggctttataacgaactccagaaagataaaatggcagaagcctatagtgagattgggatgaagggagaaaggaggaggggtaaaggtcacgatgggttgtaccaaggattgagcacagccactaaagatacctatgatgcgctccacatgcaggccctgccgccaagacgcgccaagagaagcggatctggcgtgaagcagaccctgaatttcgacctgctgaagctggctggcgacgtggaatccaacccaggcccttctagaggccatatggctctgcctgtgacagctctgctgctgcctctggcactgctgcttcatgctgctagacctagccagtttagagtgtcccctctggacagaacctggaacctgggcgagacagtggaactgaagtgccaggtgctgctgagcaaccctacaagcggctgctcctggctgtttcagcctagaggtgcagccgcctctcctacctttctgctgtacctgagccagaacaagcccaaggccgccgaaggactggacacccagagattcagcggcaagagactgggcgacaccttcgtgctgaccctgagcgacttcagaagagagaacgagggctactacttctgtagcgccctgagcaacagcatcatgtacttcagccacttcgtgcccgtgtttctgcccgccaagcctacaacaacccctgctcctagacctcctacaccagctcctacaatcgccagccagcctctgtctctcagacccgaagcctgtagacctgctgctggcggagctgtgcataccagaggactggatttcgcctgcgacatctacatctgggctcctctggctggcacatgtggcgtgctgctgctgtccctggtcatcaccctgtactgcaaccaccggaacaggcggagagtgtgcaagtgccctagacctgtggtcaagagcggcgacaagcctagcctgagcgccagatatgtt

SEQ ID NO: 2309 - DNA, 2445 bp, synthetic construct
  source 1..2445: mol_type = other DNA
atggccttaccagtgaccgccttgctcctgccgctggccttgctgctccacgccgccaggccgaatgctggcgtgacccagacacctaagttccaggtgctgaaaaccggccagagcatgaccctgcaatgcgcccaggacatgaaccatgagtacatgagctggtacagacaggaccccggcatgggcctgagactgatccactactctgtggctatccagaccaccgaccagggcgaagtgcccaatggctacaacgtgtccagaagcaccatcgaggacttcccactgagactgctgtctgccgctcctagccagaccagcgtgtacttttgtgccagcagctacctgggcaacaccggcgagctgttttttggcgagggcagcagactgaccgtgctcgaggacctgaagaacgtgttcccacctgaggtggccgtgttcgagcctagcgaggccgagatcagccacacccagaaagccaccctcgtgtgcctggctaccggcttctaccccgaccatgtggaactgtcttggtgggtcaacggcaaagaggtgcacagcggcgtgtgtaccgacccccagccactgaaagaacagcccgccctgaacgacagccggtactgcctgagcagcagactgagagtgtccgccaccttctggcagaacccccggaaccacttcagatgccaggtgcagttctacggcctgagcgagaacgacgagtggacccaggacagagccaagcccgtgacccagatcgtgtctgccgaagcctggggcagagccgattgcggatcccagagcttcggcctgctggaccccaagctgtgctacctgctggatggcatcctgttcatctacggcgtgatcctgaccgccctgttcctgagagtgaagttcagcagaagcgccgacgcccctgcctaccagcagggacagaaccaactgtacaacgagctgaacctgggcagacgggaagagtacgacgtgctggacaagcggagaggcagggaccctgagatgggcggaaagccccagcggagaaagaacccccaggaaggactgtataacgaactccagaaagacaagatggccgaagcctacagcgagatcggcatgaagggcgagcggagaagaggcaagggccacgatggcctgtaccagggcctgagcaccgccaccaaggacacctatgacgccctgcacatgcaggccctgcctccaagaagggccaagcgatctggatctggagcaacaaacttctcactactcaaacaagcaggtgacgtggaggagaatcccgggcctactagtatggactggatttggcgcatccttttccttgtcggcgctgctaccggcgcgcattccttcgaacaagaagtgacacagatccctgccgctctgtctgtgcctgagggcgaaaacctggtgctgaactgctccttcaccgacagcgccatctacaacctccagtggttcaggcaggaccctggaaagggactgacaagcctgctgctgatccagagcagccagagagagcagacctccggcagactgaatgccagcctggataagagcagcggcaggtctaccctgtatatcgccgcttctcagcctggcgatagcgccacatatctgtgtgctgtgcggcctacaagcggcggcagctacatccctacatttggcagaggcaccagcctgatcgtgcacccttatacgcgtatccagaaccctgatcctgccgtgtaccagctgcgggatagcaagagcagcgacaagagcgtgtgtctgttcaccgacttcgacagccagaccaacgtgtcccagagcaaggactccgacgtgtacatcaccgataagtgcgtgctggacatgcggagcatggacttcaagagcaactccgccgtggcctggtccaacaagtccgatttcgcctgcgccaacgccttcaacaacagcattatccccgaggacacattcttcccaagccccgagagcagctgcggtacccagagttttgggttgttggaccctaaattgtgctatctgttggacggaatcctgttcatttacggagtgatcctgaccgcattgttcctgcgggttaagttttccagatccgcagacgcacccgcttaccaacaagggcagaaccaactctacaatgaacttaatttggggcggagggaagagtacgacgttctggacaaaaggaggggacgagatcccgagatgggcggaaagcctcagcgaaggaagaatccgcaagaggggctttataacgaactccagaaagataaaatggcagaagcctatagtgagattgggatgaagggagaaaggaggaggggtaaaggtcacgatgggttgtaccaaggattgagcacagccactaaagatacctatgatgcgctccacatgcaggccctgccgccaaga

SEQ ID NO: 2310 - DNA, 2568 bp, synthetic construct
  source 1..2568: mol_type = other DNA
atggccttaccagtgaccgccttgctcctgccgctggccttgctgctccacgccgccaggccgaatgctggcgtgacccagacacctaagttccaggtgctgaaaaccggccagagcatgaccctgcaatgcgcccaggacatgaaccatgagtacatgagctggtacagacaggaccccggcatgggcctgagactgatccactactctgtggctatccagaccaccgaccagggcgaagtgcccaatggctacaacgtgtccagaagcaccatcgaggacttcccactgagactgctgtctgccgctcctagccagaccagcgtgtacttttgtgccagcagctacctgggcaacaccggcgagctgttttttggcgagggcagcagactgaccgtgctcgagcagagcttcggcctgctggaccccaagctgtgctacctgctggatggcatcctgttcatctacggcgtgatcctgaccgccctgttcctgagagtgaagttcagcagaagcgccgacgcccctgcctaccagcagggacagaaccaactgtacaacgagctgaacctgggcagacgggaagagtacgacgtgctggacaagcggagaggcagggaccctgagatgggcggaaagccccagcggagaaagaacccccaggaaggactgtataacgaactccagaaagacaagatggccgaagcctacagcgagatcggcatgaagggcgagcggagaagaggcaagggccacgatggcctgtaccagggcctgagcaccgccaccaaggacacctatgacgccctgcacatgcaggccctgcctccaagaagggccaagcgatctggatctggagcaacaaacttctcactactcaaacaagcaggtgacgtggaggagaatcccgggcctactagtatggactggatttggcgcatccttttccttgtcggcgctgctaccggcgcgcattccttcgaacaagaagtgacacagatccctgccgctctgtctgtgcctgagggcgaaaacctggtgctgaactgctccttcaccgacagcgccatctacaacctccagtggttcaggcaggaccctggaaagggactgacaagcctgctgctgatccagagcagccagagagagcagacctccggcagactgaatgccagcctggataagagcagcggcaggtctaccctgtatatcgccgcttctcagcctggcgatagcgccacatatctgtgtgctgtgcggcctacaagcggcggcagctacatccctacatttggcagaggcaccagcctgatcgtgcacccttatacgcgtcagagttttgggttgttggaccctaaattgtgctatctgttggacggaatcctgttcatttacggagtgatcctgaccgcattgttcctgcgggttaagttttccagatccgcagacgcacccgcttaccaacaagggcagaaccaactctacaatgaacttaatttggggcggagggaagagtacgacgttctggacaaaaggaggggacgagatcccgagatgggcggaaagcctcagcgaaggaagaatccgcaagaggggctttataacgaactccagaaagataaaatggcagaagcctatagtgagattgggatgaagggagaaaggaggaggggtaaaggtcacgatgggttgtaccaaggattgagcacagccactaaagatacctatgatgcgctccacatgcaggccctgccgccaagacgcgccaagagaagcggatctggcgtgaagcagaccctgaatttcgacctgctgaagctggctggcgacgtggaatccaacccaggcccttctagaggccatatggctctgcctgtgacagctctgctgctgcctctggcactgctgcttcatgctgctagacctagccagtttagagtgtcccctctggacagaacctggaacctgggcgagacagtggaactgaagtgccaggtgctgctgagcaaccctacaagcggctgctcctggctgtttcagcctagaggtgcagccgcctctcctacctttctgctgtacctgagccagaacaagcccaaggccgccgaaggactggacacccagagattcagcggcaagagactgggcgacaccttcgtgctgaccctgagcgacttcagaagagagaacgagggctactacttctgtagcgccctgagcaacagcatcatgtacttcagccacttcgtgcccgtgtttctgcccgccaagcctacaacaacccctgctcctagacctcctacaccagctcctacaatcgccagccagcctctgtctctcagacccgaagcctgtagacctgctgctggcggagctgtgcataccagaggactggatttcgcctgcgacatctacatctgggctcctctggctggcacatgtggcgtgctgctgctgtccctggtcatcaccctgtactgcaaccaccggaacaggcggagagtgtgcaagtgccctagacctgtggtcaagagcggcgacaagcctagcctgagcgccagatatgtt

SEQ ID NO: 2311 - DNA, 2568 bp, synthetic construct
  source 1..2568: mol_type = other DNA
atggccttaccagtgaccgccttgctcctgccgctggccttgctgctccacgccgccaggccgaatgctggcgtgacccagacacctaagttccaggtgctgaaaaccggccagagcatgaccctgcaatgcgcccaggacatgaaccatgagtacatgagctggtacagacaggaccccggcatgggcctgagactgatccactactctgtggctatccagaccaccgaccagggcgaagtgcccaatggctacaacgtgtccagaagcaccatcgaggacttcccactgagactgctgtctgccgctcctagccagaccagcgtgtacttttgtgccagcagctacctgggcaacaccggcgagctgttttttggcgagggcagcagactgaccgtgctcgaggacctgaagaacgtgttcccacctgaggtggccgtgttcgagcctagcgaggccgagatcagccacacccagaaagccaccctcgtgtgcctggctaccggcttctaccccgaccatgtggaactgtcttggtgggtcaacggcaaagaggtgcacagcggcgtgtgtaccgacccccagccactgaaagaacagcccgccctgaacgacagccggtactgcctgagcagcagactgagagtgtccgccaccttctggcagaacccccggaaccacttcagatgccaggtgcagttctacggcctgagcgagaacgacgagtggacccaggacagagccaagcccgtgacccagatcgtgtctgccgaagcctggggcagagccgattgcggatcccagagcttcggcctgctggaccccaagctgtgctacctgctggatggcatcctgttcatctacggcgtgatcctgaccgccctgttcctgaggagtaagaggagcaggctcctgcacagtgactacatgaacatgactccacgccgccccggacccacccgcaagcattaccagccctatgccccaccacgcgacttcgcagcctatcgctccagagtgaagttcagcagaagcgccgacgcccctgcctaccagcagggacagaaccaactgtacaacgagctgaacctgggcagacgggaagagtacgacgtgctggacaagcggagaggcagggaccctgagatgggcggaaagccccagcggagaaagaacccccaggaaggactgtataacgaactccagaaagacaagatggccgaagcctacagcgagatcggcatgaagggcgagcggagaagaggcaagggccacgatggcctgtaccagggcctgagcaccgccaccaaggacacctatgacgccctgcacatgcaggccctgcctccaagaagggccaagcgatctggatctggagcaacaaacttctcactactcaaacaagcaggtgacgtggaggagaatcccgggcctactagtatggactggatttggcgcatccttttccttgtcggcgctgctaccggcgcgcattccttcgaacaagaagtgacacagatccctgccgctctgtctgtgcctgagggcgaaaacctggtgctgaactgctccttcaccgacagcgccatctacaacctccagtggttcaggcaggaccctggaaagggactgacaagcctgctgctgatccagagcagccagagagagcagacctccggcagactgaatgccagcctggataagagcagcggcaggtctaccctgtatatcgccgcttctcagcctggcgatagcgccacatatctgtgtgctgtgcggcctacaagcggcggcagctacatccctacatttggcagaggcaccagcctgatcgtgcacccttatacgcgtatccagaaccctgatcctgccgtgtaccagctgcgggatagcaagagcagcgacaagagcgtgtgtctgttcaccgacttcgacagccagaccaacgtgtcccagagcaaggactccgacgtgtacatcaccgataagtgcgtgctggacatgcggagcatggacttcaagagcaactccgccgtggcctggtccaacaagtccgatttcgcctgcgccaacgccttcaacaacagcattatccccgaggacacattcttcccaagccccgagagcagctgcggtacccagagttttgggttgttggaccctaaattgtgctatctgttggacggaatcctgttcatttacggagtgatcctgaccgcattgttcctgcgggttaagttttccagatccgcagacgcacccgcttaccaacaagggcagaaccaactctacaatgaacttaatttggggcggagggaagagtacgacgttctggacaaaaggaggggacgagatcccgagatgggcggaaagcctcagcgaaggaagaatccgcaagaggggctttataacgaactccagaaagataaaatggcagaagcctatagtgagattgggatgaagggagaaaggaggaggggtaaaggtcacgatgggttgtaccaaggattgagcacagccactaaagatacctatgatgcgctccacatgcaggccctgccgccaaga

SEQ ID NO: 2312 - DNA, 2691 bp, synthetic construct
  source 1..2691: mol_type = other DNA
atggccttaccagtgaccgccttgctcctgccgctggccttgctgctccacgccgccaggccgaatgctggcgtgacccagacacctaagttccaggtgctgaaaaccggccagagcatgaccctgcaatgcgcccaggacatgaaccatgagtacatgagctggtacagacaggaccccggcatgggcctgagactgatccactactctgtggctatccagaccaccgaccagggcgaagtgcccaatggctacaacgtgtccagaagcaccatcgaggacttcccactgagactgctgtctgccgctcctagccagaccagcgtgtacttttgtgccagcagctacctgggcaacaccggcgagctgttttttggcgagggcagcagactgaccgtgctcgaggacctgaagaacgtgttcccacctgaggtggccgtgttcgagcctagcgaggccgagatcagccacacccagaaagccaccctcgtgtgcctggctaccggcttctaccccgaccatgtggaactgtcttggtgggtcaacggcaaagaggtgcacagcggcgtgtgtaccgacccccagccactgaaagaacagcccgccctgaacgacagccggtactgcctgagcagcagactgagagtgtccgccaccttctggcagaacccccggaaccacttcagatgccaggtgcagttctacggcctgagcgagaacgacgagtggacccaggacagagccaagcccgtgacccagatcgtgtctgccgaagcctggggcagagccgattgcggatcccagagcttcggcctgctggaccccaagctgtgctacctgctggatggcatcctgttcatctacggcgtgatcctgaccgccctgttcctgaggagtaagaggagcaggctcctgcacagtgactacatgaacatgactccacgccgccccggacccacccgcaagcattaccagccctatgccccaccacgcgacttcgcagcctatcgctccagagtgaagttcagcagaagcgccgacgcccctgcctaccagcagggacagaaccaactgtacaacgagctgaacctgggcagacgggaagagtacgacgtgctggacaagcggagaggcagggaccctgagatgggcggaaagccccagcggagaaagaacccccaggaaggactgtataacgaactccagaaagacaagatggccgaagcctacagcgagatcggcatgaagggcgagcggagaagaggcaagggccacgatggcctgtaccagggcctgagcaccgccaccaaggacacctatgacgccctgcacatgcaggccctgcctccaagaagggccaagcgatctggatctggagcaacaaacttctcactactcaaacaagcaggtgacgtggaggagaatcccgggcctactagtatggactggatttggcgcatccttttccttgtcggcgctgctaccggcgcgcattccttcgaacaagaagtgacacagatccctgccgctctgtctgtgcctgagggcgaaaacctggtgctgaactgctccttcaccgacagcgccatctacaacctccagtggttcaggcaggaccctggaaagggactgacaagcctgctgctgatccagagcagccagagagagcagacctccggcagactgaatgccagcctggataagagcagcggcaggtctaccctgtatatcgccgcttctcagcctggcgatagcgccacatatctgtgtgctgtgcggcctacaagcggcggcagctacatccctacatttggcagaggcaccagcctgatcgtgcacccttatacgcgtatccagaaccctgatcctgccgtgtaccagctgcgggatagcaagagcagcgacaagagcgtgtgtctgttcaccgacttcgacagccagaccaacgtgtcccagagcaaggactccgacgtgtacatcaccgataagtgcgtgctggacatgcggagcatggacttcaagagcaactccgccgtggcctggtccaacaagtccgatttcgcctgcgccaacgccttcaacaacagcattatccccgaggacacattcttcccaagccccgagagcagctgcggtacccagagttttgggttgttggaccctaaattgtgctatctgttggacggaatcctgttcatttacggagtgatcctgaccgcattgttcctgaggagcaagcggtcacggctgctccacagcgattacatgaatatgacaccacgaagaccgggtcctactcgcaaacactaccaaccctacgcacctccccgcgactttgcagcgtaccgatctcgggttaagttttccagatccgcagacgcacccgcttaccaacaagggcagaaccaactctacaatgaacttaatttggggcggagggaagagtacgacgttctggacaaaaggaggggacgagatcccgagatgggcggaaagcctcagcgaaggaagaatccgcaagaggggctttataacgaactccagaaagataaaatggcagaagcctatagtgagattgggatgaagggagaaaggaggaggggtaaaggtcacgatgggttgtaccaaggattgagcacagccactaaagatacctatgatgcgctccacatgcaggccctgccgccaaga

SEQ ID NO: 2313 - DNA, 2445 bp, synthetic construct
  source 1..2445: mol_type = other DNA
atggccttaccagtgaccgccttgctcctgccgctggccttgctgctccacgccgccaggccgaatgctggcgtgacccagacacctaagttccaggtgctgaaaaccggccagagcatgaccctgcaatgcgcccaggacatgaaccatgagtacatgagctggtacagacaggaccccggcatgggcctgagactgatccactactctgtggctatccagaccaccgaccagggcgaagtgcccaatggctacaacgtgtccagaagcaccatcgaggacttcccactgagactgctgtctgccgctcctagccagaccagcgtgtacttttgtgccagcagctacctgggcaacaccggcgagctgttttttggcgagggcagcagactgaccgtgctcgaggacctgaagaacgtgttcccacctgaggtggccgtgttcgagcctagcgaggccgagatcagccacacccagaaagccaccctcgtgtgcctggctaccggcttctaccccgaccatgtggaactgtcttggtgggtcaacggcaaagaggtgcacagcggcgtgtctaccgacccccagccactgaaagaacagcccgccctgaacgacagccggtactgcctgagcagcagactgagagtgtccgccaccttctggcagaacccccggaaccacttcagatgccaggtgcagttctacggcctgagcgagaacgacgagtggacccaggacagagccaagcccgtgacccagatcgtgtctgccgaagcctggggcagagccgattgcggatcccagagcttcggcctgctggaccccaagctgtgctacctgctggatggcatcctgttcatctacggcgtgatcctgaccgccctgttcctgagagtgaagttcagcagaagcgccgacgcccctgcctaccagcagggacagaaccaactgtacaacgagctgaacctgggcagacgggaagagtacgacgtgctggacaagcggagaggcagggaccctgagatgggcggaaagccccagcggagaaagaacccccaggaaggactgtataacgaactccagaaagacaagatggccgaagcctacagcgagatcggcatgaagggcgagcggagaagaggcaagggccacgatggcctgtaccagggcctgagcaccgccaccaaggacacctatgacgccctgcacatgcaggccctgcctccaagaagggccaagcgatctggatctggagcaacaaacttctcactactcaaacaagcaggtgacgtggaggagaatcccgggcctactagtatggactggatttggcgcatccttttccttgtcggcgctgctaccggcgcgcattccttcgaacaagaagtgacacagatccctgccgctctgtctgtgcctgagggcgaaaacctggtgctgaactgctccttcaccgacagcgccatctacaacctccagtggttcaggcaggaccctggaaagggactgacaagcctgctgctgatccagagcagccagagagagcagacctccggcagactgaatgccagcctggataagagcagcggcaggtctaccctgtatatcgccgcttctcagcctggcgatagcgccacatatctgtgtgctgtgcggcctacaagcggcggcagctacatccctacatttggcagaggcaccagcctgatcgtgcacccttatacgcgtatccagaaccctgatcctgccgtgtaccagctgcgggatagcaagagcagcgacaagagcgtgtgtctgttcaccgacttcgacagccagaccaacgtgtcccagagcaaggactccgacgtgtacatcaccgataagaccgtgctggacatgcggagcatggacttcaagagcaactccgccgtggcctggtccaacaagtccgatttcgcctgcgccaacgccttcaacaacagcattatccccgaggacacattcttcccaagccccgagagcagctgcggtacccagagttttgggttgttggaccctaaattgtgctatctgttggacggaatcctgttcatttacggagtgatcctgaccgcattgttcctgcgggttaagttttccagatccgcagacgcacccgcttaccaacaagggcagaaccaactctacaatgaacttaatttggggcggagggaagagtacgacgttctggacaaaaggaggggacgagatcccgagatgggcggaaagcctcagcgaaggaagaatccgcaagaggggctttataacgaactccagaaagataaaatggcagaagcctatagtgagattgggatgaagggagaaaggaggaggggtaaaggtcacgatgggttgtaccaaggattgagcacagccactaaagatacctatgatgcgctccacatgcaggccctgccgccaaga

SEQ ID NO: 2314 - DNA, 3177 bp, synthetic construct
  source 1..3177: mol_type = other DNA
atggccttaccagtgaccgccttgctcctgccgctggccttgctgctccacgccgccaggccgaatgctggcgtgacccagacacctaagttccaggtgctgaaaaccggccagagcatgaccctgcaatgcgcccaggacatgaaccatgagtacatgagctggtacagacaggaccccggcatgggcctgagactgatccactactctgtggctatccagaccaccgaccagggcgaagtgcccaatggctacaacgtgtccagaagcaccatcgaggacttcccactgagactgctgtctgccgctcctagccagaccagcgtgtacttttgtgccagcagctacctgggcaacaccggcgagctgttttttggcgagggcagcagactgaccgtgctcgaggacaagcagctggacgccgacgtgtcccccaagcctaccatcttcctgccctctatcgccgagacaaagctccagaaggccggcacctacctgtgcctgctggaaaagttcttcccagatgtgattaagatccactggcaggaaaagaagtccaacaccatcctgggcagccaggaaggcaacaccatgaagaccaacgacacctacatgaagttcagctggctgaccgtgcccgagaagtccctggacaaagaacacagatgcatcgtgcggcacgaaaacaacaagaacggcgtggaccaggaaatcatcttcccacccatcaagaccgatgtgattacaggatcccagagcttcggcctgctggaccccaagctgtgctacctgctggatggcatcctgttcatctacggcgtgatcctgaccgccctgttcctgagagtgaagttcagcagaagcgccgacgcccctgcctaccagcagggacagaaccaactgtacaacgagctgaacctgggcagacgggaagagtacgacgtgctggacaagcggagaggcagggaccctgagatgggcggaaagccccagcggagaaagaacccccaggaaggactgtataacgaactccagaaagacaagatggccgaagcctacagcgagatcggcatgaagggcgagcggagaagaggcaagggccacgatggcctgtaccagggcctgagcaccgccaccaaggacacctatgacgccctgcacatgcaggccctgcctccaagaagggccaagcgatctggatctggagcaacaaacttctcactactcaaacaagcaggtgacgtggaggagaatcccgggcctactagtatggactggatttggcgcatccttttccttgtcggcgctgctaccggcgcgcattccttcgaacaagaagtgacacagatccctgccgctctgtctgtgcctgagggcgaaaacctggtgctgaactgctccttcaccgacagcgccatctacaacctccagtggttcaggcaggaccctggaaagggactgacaagcctgctgctgatccagagcagccagagagagcagacctccggcagactgaatgccagcctggataagagcagcggcaggtctaccctgtatatcgccgcttctcagcctggcgatagcgccacatatctgtgtgctgtgcggcctacaagcggcggcagctacatccctacatttggcagaggcaccagcctgatcgtgcacccttatacgcgtagccagcctcacaccaagcccagcgtgttcgtgatgaagaacggcaccaacgtggcctgcctcgtgaaagagttctaccccaaggacatcaggatcaacctggtgtccagcaagaagatcaccgagttcgaccccgccatcgtgatctcccccagcggcaagtacaacgccgtgaagctggggaagtacgaggacagcaacagcgtgacctgctccgtgcagcacgacaacaagaccgtgcacagcaccgactttggtacccagagttttgggttgttggaccctaaattgtgctatctgttggacggaatcctgttcatttacggagtgatcctgaccgcattgttcctgcgggttaagttttccagatccgcagacgcacccgcttaccaacaagggcagaaccaactctacaatgaacttaatttggggcggagggaagagtacgacgttctggacaaaaggaggggacgagatcccgagatgggcggaaagcctcagcgaaggaagaatccgcaagaggggctttataacgaactccagaaagataaaatggcagaagcctatagtgagattgggatgaagggagaaaggaggaggggtaaaggtcacgatgggttgtaccaaggattgagcacagccactaaagatacctatgatgcgctccacatgcaggccctgccgccaagacgcgccaagagaagcggatctggcgtgaagcagaccctgaatttcgacctgctgaagctggctggcgacgtggaatccaacccaggcccttctagaggccatatggctctgcctgtgacagctctgctgctgcctctggcactgctgcttcatgctgctagacctagccagtttagagtgtcccctctggacagaacctggaacctgggcgagacagtggaactgaagtgccaggtgctgctgagcaaccctacaagcggctgctcctggctgtttcagcctagaggtgcagccgcctctcctacctttctgctgtacctgagccagaacaagcccaaggccgccgaaggactggacacccagagattcagcggcaagagactgggcgacaccttcgtgctgaccctgagcgacttcagaagagagaacgagggctactacttctgtagcgccctgagcaacagcatcatgtacttcagccacttcgtgcccgtgtttctgcccgccaagcctacaacaacccctgctcctagacctcctacaccagctcctacaatcgccagccagcctctgtctctcagacccgaagcctgtagacctgctgctggcggagctgtgcataccagaggactggatttcgcctgcgacatctacatctgggctcctctggctggcacatgtggcgtgctgctgctgtccctggtcatcaccctgtactgcaaccaccggaacaggcggagagtgtgcaagtgccctagacctgtggtcaagagcggcgacaagcctagcctgagcgccagatatgtt

SEQ ID NO: 2315 - DNA, 2781 bp, synthetic construct
  source 1..2781: mol_type = other DNA
atggccttaccagtgaccgccttgctcctgccgctggccttgctgctccacgccgccaggccgaatgctggcgtgacccagacacctaagttccaggtgctgaaaaccggccagagcatgaccctgcaatgcgcccaggacatgaaccatgagtacatgagctggtacagacaggaccccggcatgggcctgagactgatccactactctgtggctatccagaccaccgaccagggcgaagtgcccaatggctacaacgtgtccagaagcaccatcgaggacttcccactgagactgctgtctgccgctcctagccagaccagcgtgtacttttgtgccagcagctacctgggcaacaccggcgagctgttttttggcgagggcagcagactgaccgtgctcgagggacagcctaaggccaatcctaccgtgacactgttccctccaagcagcgaagaactccaggccaacaaggccacacttgtgtgcctgatctccgacttctaccctggggctgtgacagtggcttggaaggccgatggatctcctgtgaaagccggcgtggaaaccaccaagccatccaagcagagcaacaacaaatacgccgccagctcctacctgagcctgacacctgagcagtggaagtcccacagatcctacagctgccaagtgacccacgaaggcagcaccgtggaaaagacagtggcccctacagagtgcagcacaacacctggcgagagaagtagcctgcctgccttctatcctggcaccagcggctcttgttctggctgtggatctctgagcctgcctctgctggctggactggttgctgctgatgctgtggcctctctgctgattgtgggagccgtgttcctgtgcgccagacctagaagaagccccgctcaagaggacggcaaggtgtacatcaacatgcccggcagaggaagggccaagcgatctggatctggagcaacaaacttctcactactcaaacaagcaggtgacgtggaggagaatcccgggcctactagtatggactggatttggcgcatccttttccttgtcggcgctgctaccggcgcgcattccttcgaacaagaagtgacacagatccctgccgctctgtctgtgcctgagggcgaaaacctggtgctgaactgctccttcaccgacagcgccatctacaacctccagtggttcaggcaggaccctggaaagggactgacaagcctgctgctgatccagagcagccagagagagcagacctccggcagactgaatgccagcctggataagagcagcggcaggtctaccctgtatatcgccgcttctcagcctggcgatagcgccacatatctgtgtgctgtgcggcctacaagcggcggcagctacatccctacatttggcagaggcaccagcctgatcgtgcacccttatacgcgtgcctctacaaagggaccctccgtgtttcctctggctcccagcagcaagtctacaagcggaggaacagccgctctgggctgcctggtcaaggattactttcccgagcctgtgaccgtgtcctggaatagcggagcactgacaagcggcgtgcacacctttccagccgtgctgcaaagcagcggcctgtactctctgagcagcgtggtcacagtgcctagctctagcctgggcacccagacctacatctgcaatgtgaaccacaagcctagcaacaccaaggtggacaagagagtggaacccaagagctgtacaacgccgggcgaaaggagttccttgccggccttttaccccggcacaagcggaagctgtagtgggtgtggaagcctcagcctcccacttcttgcgggcctcgtcgcggcagatgcagtagcttcacttcttattgtaggcgcggtatttctctgtgctcgaccaaggaggtcacccgctcaggaggatggtaaggtgtatataaatatgccaggacgcggacgcgccaagagaagcggatctggcgtgaagcagaccctgaatttcgacctgctgaagctggctggcgacgtggaatccaacccaggcccttctagaggccatatggctctgcctgtgacagctctgctgctgcctctggcactgctgcttcatgctgctagacctagccagtttagagtgtcccctctggacagaacctggaacctgggcgagacagtggaactgaagtgccaggtgctgctgagcaaccctacaagcggctgctcctggctgtttcagcctagaggtgcagccgcctctcctacctttctgctgtacctgagccagaacaagcccaaggccgccgaaggactggacacccagagattcagcggcaagagactgggcgacaccttcgtgctgaccctgagcgacttcagaagagagaacgagggctactacttctgtagcgccctgagcaacagcatcatgtacttcagccacttcgtgcccgtgtttctgcccgccaagcctacaacaacccctgctcctagacctcctacaccagctcctacaatcgccagccagcctctgtctctcagacccgaagcctgtagacctgctgctggcggagctgtgcataccagaggactggatttcgcctgcgacatctacatctgggctcctctggctggcacatgtggcgtgctgctgctgtccctggtcatcaccctgtactgcaaccaccggaacaggcggagagtgtgcaagtgccctagacctgtggtcaagagcggcgacaagcctagcctgagcgccagatatgtt

SEQ ID NO: 2316 - DNA, 2268 bp, synthetic construct
  source 1..2268: mol_type = other DNA
atggccttaccagtgaccgccttgctcctgccgctggccttgctgctccacgccgccaggccgaatgctggcgtgacccagacacctaagttccaggtgctgaaaaccggccagagcatgaccctgcaatgcgcccaggacatgaaccatgagtacatgagctggtacagacaggaccccggcatgggcctgagactgatccactactctgtggctatccagaccaccgaccagggcgaagtgcccaatggctacaacgtgtccagaagcaccatcgaggacttcccactgagactgctgtctgccgctcctagccagaccagcgtgtacttttgtgccagcagctacctgggcaacaccggcgagctgttttttggcgagggcagcagactgaccgtgctcgagggcgacatcgagaacaccagtctggcccctgaggaccctacctttcctgccgatacctggggcacctacctgctgaccacagagacaggactccagaaagatcacgccctgtgggaccacacagcccagaacctgctgagaatgggcctcgcctttctggtgctggttgccctcgtgtggttcctggtggaagattggctgagccggaagcggacaagagagagagccagcagagcctctacctgggagggaagaagaaggctgaacacccagacacttagggccaagcgatctggatctggagcaacaaacttctcactactcaaacaagcaggtgacgtggaggagaatcccgggcctactagtatggactggatttggcgcatccttttccttgtcggcgctgctaccggcgcgcattccttcgaacaagaagtgacacagatccctgccgctctgtctgtgcctgagggcgaaaacctggtgctgaactgctccttcaccgacagcgccatctacaacctccagtggttcaggcaggaccctggaaagggactgacaagcctgctgctgatccagagcagccagagagagcagacctccggcagactgaatgccagcctggataagagcagcggcaggtctaccctgtatatcgccgcttctcagcctggcgatagcgccacatatctgtgtgctgtgcggcctacaagcggcggcagctacatccctacatttggcagaggcaccagcctgatcgtgcacccttatacgcgtggcgatattgagaatacctctctggccccagaagatcctacattccccgccgacacatggggaacatatctgctgacaaccgaaaccgggctgcaaaaggaccatgctctgtgggatcataccgctcagaatctgcttcggatggggcttgcattcctggtcctggtggctcttgtctggtttctggtcgaggactggctgtcccggaagagaaccagagaaagagcttccagggccagcacctgggaaggcagacgcagactgaatactcagaccctgcgcgccaagagaagcggatctggcgtgaagcagaccctgaatttcgacctgctgaagctggctggcgacgtggaatccaacccaggcccttctagaggccatatggctctgcctgtgacagctctgctgctgcctctggcactgctgcttcatgctgctagacctagccagtttagagtgtcccctctggacagaacctggaacctgggcgagacagtggaactgaagtgccaggtgctgctgagcaaccctacaagcggctgctcctggctgtttcagcctagaggtgcagccgcctctcctacctttctgctgtacctgagccagaacaagcccaaggccgccgaaggactggacacccagagattcagcggcaagagactgggcgacaccttcgtgctgaccctgagcgacttcagaagagagaacgagggctactacttctgtagcgccctgagcaacagcatcatgtacttcagccacttcgtgcccgtgtttctgcccgccaagcctacaacaacccctgctcctagacctcctacaccagctcctacaatcgccagccagcctctgtctctcagacccgaagcctgtagacctgctgctggcggagctgtgcataccagaggactggatttcgcctgcgacatctacatctgggctcctctggctggcacatgtggcgtgctgctgctgtccctggtcatcaccctgtactgcaaccaccggaacaggcggagagtgtgcaagtgccctagacctgtggtcaagagcggcgacaagcctagcctgagcgccagatatgtt

SEQ ID NO: 2317 - DNA, 2100 bp, synthetic construct
  source 1..2100: mol_type = other DNA
atggccttaccagtgaccgccttgctcctgccgctggccttgctgctccacgccgccaggccgaatgctggcgtgacccagacacctaagttccaggtgctgaaaaccggccagagcatgaccctgcaatgcgcccaggacatgaaccatgagtacatgagctggtacagacaggaccccggcatgggcctgagactgatccactactctgtggctatccagaccaccgaccagggcgaagtgcccaatggctacaacgtgtccagaagcaccatcgaggacttcccactgagactgctgtctgccgctcctagccagaccagcgtgtacttttgtgccagcagctacctgggcaacaccggcgagctgttttttggcgagggcagcagactgaccgtgctcgagatcactcaaggtttggcagtgtcaaccatctcatcattctttccacctggctaccaagtgtccttctgcctggtcatggtgctgctgttcgccgtggataccggcctgtacttcagcgtcaagaccaacatccggtccagcaccagagactggaaggaccacaagttcaagtggcggaaggaccctcaggacaagagggccaagcgatctggatctggagcaacaaacttctcactactcaaacaagcaggtgacgtggaggagaatcccgggcctactagtatggactggatttggcgcatccttttccttgtcggcgctgctaccggcgcgcattccttcgaacaagaagtgacacagatccctgccgctctgtctgtgcctgagggcgaaaacctggtgctgaactgctccttcaccgacagcgccatctacaacctccagtggttcaggcaggaccctggaaagggactgacaagcctgctgctgatccagagcagccagagagagcagacctccggcagactgaatgccagcctggataagagcagcggcaggtctaccctgtatatcgccgcttctcagcctggcgatagcgccacatatctgtgtgctgtgcggcctacaagcggcggcagctacatccctacatttggcagaggcaccagcctgatcgtgcacccttatacgcgtatcacccagggcctggccgtgtctaccatcagcagctttttcccacccggctaccaggtgtccttctgcctcgtgatggtgctgctgttcgccgtggacaccggcctgtacttcagcgtgaaaacaaacatccggtccagcaccagagactggaaggaccacaagttcaagtggcggaaggacccccaggacaagcgcgccaagagaagcggatctggcgtgaagcagaccctgaatttcgacctgctgaagctggctggcgacgtggaatccaacccaggcccttctagaggccatatggctctgcctgtgacagctctgctgctgcctctggcactgctgcttcatgctgctagacctagccagtttagagtgtcccctctggacagaacctggaacctgggcgagacagtggaactgaagtgccaggtgctgctgagcaaccctacaagcggctgctcctggctgtttcagcctagaggtgcagccgcctctcctacctttctgctgtacctgagccagaacaagcccaaggccgccgaaggactggacacccagagattcagcggcaagagactgggcgacaccttcgtgctgaccctgagcgacttcagaagagagaacgagggctactacttctgtagcgccctgagcaacagcatcatgtacttcagccacttcgtgcccgtgtttctgcccgccaagcctacaacaacccctgctcctagacctcctacaccagctcctacaatcgccagccagcctctgtctctcagacccgaagcctgtagacctgctgctggcggagctgtgcataccagaggactggatttcgcctgcgacatctacatctgggctcctctggctggcacatgtggcgtgctgctgctgtccctggtcatcaccctgtactgcaaccaccggaacaggcggagagtgtgcaagtgccctagacctgtggtcaagagcggcgacaagcctagcctgagcgccagatatgtt

SEQ ID NO: 2318 - DNA, 2370 bp, synthetic construct
  source 1..2370: mol_type = other DNA
atggccttaccagtgaccgccttgctcctgccgctggccttgctgctccacgccgccaggccggatggcggcattacacagagccccaagtacctgttcagaaaagagggccagaacgtcaccctgagctgcgagcagaacctgaaccacgacgccatgtactggtacagacaggacccaggccagggcctgagactgatctactactcttgggctcagggcgacttccagaagggcgatattgccgagggctacagcgtgtccagagagaagaaagagtcctttccactgaccgtgacaagcgcccagaagaaccctaccgccttctacctgtgtgccagctcttggggagccccttacgagcagtatttcggccctggcaccagactgacagttggacagcctaaggccaatcctaccgtgacactgttccctccaagcagcgaagaactccaggccaacaaggccacacttgtgtgcctgatctccgacttctaccctggggctgtgacagtggcttggaaggccgatggatctcctgtgaaagccggcgtggaaaccaccaagccatccaagcagagcaacaacaaatacgccgccagctcctacctgagcctgacacctgagcagtggaagtcccacagatcctacagctgccaagtgacccacgaaggcagcaccgtggaaaagacagtggcccctacagagtgcagcggatcccagagcttcggcctgctggaccccaagctgtgctacctgctggatggcatcctgttcatctacggcgtgatcctgaccgccctgttcctgagagtgaagttcagcagaagcgccgacgcccctgcctaccagcagggacagaaccaactgtacaacgagctgaacctgggcagacgggaagagtacgacgtgctggacaagcggagaggcagggaccctgagatgggcggaaagccccagcggagaaagaacccccaggaaggactgtataacgaactccagaaagacaagatggccgaagcctacagcgagatcggcatgaagggcgagcggagaagaggcaagggccacgatggcctgtaccagggcctgagcaccgccaccaaggacacctatgacgccctgcacatgcaggccctgcctccaagaagggccaagcgatctggatctggagcaacaaacttctcactactcaaacaagcaggtgacgtggaggagaatcccgggcctactagtatggactggatttggcgcatccttttccttgtcggcgctgctaccggcgcgcattccttcgaacaacaaggcgaagaagatccccaggctctgagcatccaagagggcgagaatgccaccatgaactgctcctacaagaccagcatcaacaacctccagtggtacaggcagaacagcggcagaggactggtgcacctgatcctgatccggtccaacgagagagagaagcactccggcagactgagagtgaccctggacaccagcaagaagtccagcagcctgctgattaccgccagcagagccgccgatacagccagctacttttgtgccaccgacggcgatacccctctggtgtttggcaagggcacaagactgagcgtgatcgccaatgcctctacaaagggaccctccgtgtttcctctggctcccagcagcaagtctacaagcggaggaacagccgctctgggctgcctggtcaaggattactttcccgagcctgtgaccgtgtcctggaatagcggagcactgacaagcggcgtgcacacctttccagccgtgctgcaaagcagcggcctgtactctctgagcagcgtggtcacagtgcctagctctagcctgggcacccagacctacatctgcaatgtgaaccacaagcctagcaacaccaaggtggacaagagagtggaacccaagagctgtggtacccagagttttgggttgttggaccctaaattgtgctatctgttggacggaatcctgttcatttacggagtgatcctgaccgcattgttcctgcgggttaagttttccagatccgcagacgcacccgcttaccaacaagggcagaaccaactctacaatgaacttaatttggggcggagggaagagtacgacgttctggacaaaaggaggggacgagatcccgagatgggcggaaagcctcagcgaaggaagaatccgcaagaggggctttataacgaactccagaaagataaaatggcagaagcctatagtgagattgggatgaagggagaaaggaggaggggtaaaggtcacgatgggttgtaccaaggattgagcacagccactaaagatacctatgatgcgctccacatgcaggccctgccgccaaga

SEQ ID NO: 2319 - DNA, 1668 bp, synthetic construct
  source 1..1668: mol_type = other DNA
atggccttaccagtgaccgccttgctcctgccgctggccttgctgctccacgccgccaggccggatggcggcattacacagagccccaagtacctgttcagaaaagagggccagaacgtcaccctgagctgcgagcagaacctgaaccacgacgccatgtactggtacagacaggacccaggccagggcctgagactgatctactactcttgggctcagggcgacttccagaagggcgatattgccgagggctacagcgtgtccagagagaagaaagagtcctttccactgaccgtgacaagcgcccagaagaaccctaccgccttctacctgtgtgccagctcttggggagccccttacgagcagtatttcggccctggcaccagactgacagttctcgagcagagcttcggcctgctggaccccaagctgtgctacctgctggatggcatcctgttcatctacggcgtgatcctgaccgccctgttcctgagagtgaagttcagcagaagcgccgacgcccctgcctaccagcagggacagaaccaactgtacaacgagctgaacctgggcagacgggaagagtacgacgtgctggacaagcggagaggcagggaccctgagatgggcggaaagccccagcggagaaagaacccccaggaaggactgtataacgaactccagaaagacaagatggccgaagcctacagcgagatcggcatgaagggcgagcggagaagaggcaagggccacgatggcctgtaccagggcctgagcaccgccaccaaggacacctatgacgccctgcacatgcaggccctgcctccaagaagggccaagcgatctggatctggagcaacaaacttctcactactcaaacaagcaggtgacgtggaggagaatcccgggcctactagtatggactggatttggcgcatccttttccttgtcggcgctgctaccggcgcgcattccttcgaacaacaaggcgaagaagatccccaggctctgagcatccaagagggcgagaatgccaccatgaactgctcctacaagaccagcatcaacaacctccagtggtacaggcagaacagcggcagaggactggtgcacctgatcctgatccggtccaacgagagagagaagcactccggcagactgagagtgaccctggacaccagcaagaagtccagcagcctgctgattaccgccagcagagccgccgatacagccagctacttttgtgccaccgacggcgatacccctctggtgtttggcaagggcacaagactgagcgtgatcgccaatacgcgtcagagttttgggttgttggaccctaaattgtgctatctgttggacggaatcctgttcatttacggagtgatcctgaccgcattgttcctgcgggttaagttttccagatccgcagacgcacccgcttaccaacaagggcagaaccaactctacaatgaacttaatttggggcggagggaagagtacgacgttctggacaaaaggaggggacgagatcccgagatgggcggaaagcctcagcgaaggaagaatccgcaagaggggctttataacgaactccagaaagataaaatggcagaagcctatagtgagattgggatgaagggagaaaggaggaggggtaaaggtcacgat

SEQ ID NO: 2320 - DNA, 2820 bp, synthetic construct
  source 1..2820: mol_type = other DNA
atggccttaccagtgaccgccttgctcctgccgctggccttgctgctccacgccgccaggccggatggcggcattacacagagccccaagtacctgttcagaaaagagggccagaacgtcaccctgagctgcgagcagaacctgaaccacgacgccatgtactggtacagacaggacccaggccagggcctgagactgatctactactcttgggctcagggcgacttccagaagggcgatattgccgagggctacagcgtgtccagagagaagaaagagtcctttccactgaccgtgacaagcgcccagaagaaccctaccgccttctacctgtgtgccagctcttggggagccccttacgagcagtatttcggccctggcaccagactgacagttctcgagacaacacctggcgagagaagtagcctgcctgccttctatcctggcaccagcggctcttgttctggctgtggatctctgagcctgcctctgctggctggactggttgctgctgatgctgtggcctctctgctgattgtgggagccgtgttcctgtgcgccagacctagaagaagccccgctcaagaggacggcaaggtgtacatcaacatgcccggcagaggaagcactagtagagtgaagttcagcagaagcgccgacgcccctgcctaccagcagggacagaaccaactgtacaacgagctgaacctgggcagacgggaagagtacgacgtgctggacaagcggagaggcagggaccctgagatgggcggaaagccccagcggagaaagaacccccaggaaggactgtataacgaactccagaaagacaagatggccgaagcctacagcgagatcggcatgaagggcgagcggagaagaggcaagggccacgatggcctgtaccagggcctgagcaccgccaccaaggacacctatgacgccctgcacatgcaggccctgcctccaagaagggccaagcgatctggatctggagcaacaaacttctcactactcaaacaagcaggtgacgtggaggagaatcccgggcctatggactggatttggcgcatccttttccttgtcggcgctgctaccggcgcgcattccttcgaacaacaaggcgaagaagatccccaggctctgagcatccaagagggcgagaatgccaccatgaactgctcctacaagaccagcatcaacaacctccagtggtacaggcagaacagcggcagaggactggtgcacctgatcctgatccggtccaacgagagagagaagcactccggcagactgagagtgaccctggacaccagcaagaagtccagcagcctgctgattaccgccagcagagccgccgatacagccagctacttttgtgccaccgacggcgatacccctctggtgtttggcaagggcacaagactgagcgtgatcgccaatacgcgtacaacgccgggcgaaaggagttccttgccggccttttaccccggcacaagcggaagctgtagtgggtgtggaagcctcagcctcccacttcttgcgggcctcgtcgcggcagatgcagtagcttcacttcttattgtaggcgcggtatttctctgtgctcgaccaaggaggtcacccgctcaggaggatggtaaggtgtatataaatatgccaggacgcggaagctctagacgggttaagttttccagatccgcagacgcacccgcttaccaacaagggcagaaccaactctacaatgaacttaatttggggcggagggaagagtacgacgttctggacaaaaggaggggacgagatcccgagatgggcggaaagcctcagcgaaggaagaatccgcaagaggggctttataacgaactccagaaagataaaatggcagaagcctatagtgagattgggatgaagggagaaaggaggaggggtaaaggtcacgatgggttgtaccaaggattgagcacagccactaaagatacctatgatgcgctccacatgcaggccctgccgccaagacgcgccaagagaagcggatctggcgtgaagcagaccctgaatttcgacctgctgaagctggctggcgacgtggaatccaacccaggccctggccatatggctctgcctgtgacagctctgctgctgcctctggcactgctgcttcatgctgctagacctagccagtttagagtgtcccctctggacagaacctggaacctgggcgagacagtggaactgaagtgccaggtgctgctgagcaaccctacaagcggctgctcctggctgtttcagcctagaggtgcagccgcctctcctacctttctgctgtacctgagccagaacaagcccaaggccgccgaaggactggacacccagagattcagcggcaagagactgggcgacaccttcgtgctgaccctgagcgacttcagaagagagaacgagggctactacttctgtagcgccctgagcaacagcatcatgtacttcagccacttcgtgcccgtgtttctgcccgccaagcctacaacaacccctgctcctagacctcctacaccagctcctacaatcgccagccagcctctgtctctcagacccgaagcctgtagacctgctgctggcggagctgtgcataccagaggactggatttcgcctgcgacatctacatctgggctcctctggctggcacatgtggcgtgctgctgctgtccctggtcatcaccctgtactgcaaccaccggaacaggcggagagtgtgcaagtgccctagacctgtggtcaagagcggcgacaagcctagcctgagcgccagatatgtt

SEQ ID NO: 2321 - DNA, 2820 bp, synthetic construct; identical to SEQ ID NO: 2320
  source 1..2820: mol_type = other DNA

SEQ ID NO: 2322 - DNA, 3318 bp, synthetic construct
  source 1..3318: mol_type = other DNA
atggccttaccagtgaccgccttgctcctgccgctggccttgctgctccacgccgccaggccggatggcggcattacacagagccccaagtacctgttcagaaaagagggccagaacgtcaccctgagctgcgagcagaacctgaaccacgacgccatgtactggtacagacaggacccaggccagggcctgagactgatctactactcttgggctcagggcgacttccagaagggcgatattgccgagggctacagcgtgtccagagagaagaaagagtcctttccactgaccgtgacaagcgcccagaagaaccctaccgccttctacctgtgtgccagctcttggggagccccttacgagcagtatttcggccctggcaccagactgacagttctcgagggacagcctaaggccaatcctaccgtgacactgttccctccaagcagcgaagaactccaggccaacaaggccacacttgtgtgcctgatctccgacttctaccctggggctgtgacagtggcttggaaggccgatggatctcctgtgaaagccggcgtggaaaccaccaagccatccaagcagagcaacaacaaatacgccgccagctcctacctgagcctgacacctgagcagtggaagtcccacagatcctacagctgccaagtgacccacgaaggcagcaccgtggaaaagacagtggcccctacagagtgcagcggatccacaacacctggcgagagaagtagcctgcctgccttctatcctggcaccagcggctcttgttctggctgtggatctctgagcctgcctctgctggctggactggttgctgctgatgctgtggcctctctgctgattgtgggagccgtgttcctgtgcgccagacctagaagaagccccgctcaagaggacggcaaggtgtacatcaacatgcccggcagaggaagcactagtagagtgaagttcagcagaagcgccgacgcccctgcctaccagcagggacagaaccaactgtacaacgagctgaacctgggcagacgggaagagtacgacgtgctggacaagcggagaggcagggaccctgagatgggcggaaagccccagcggagaaagaacccccaggaaggactgtataacgaactccagaaagacaagatggccgaagcctacagcgagatcggcatgaagggcgagcggagaagaggcaagggccacgatggcctgtaccagggcctgagcaccgccaccaaggacacctatgacgccctgcacatgcaggccctgcctccaagaagggccaagcgatctggatctggagcaacaaacttctcactactcaaacaagcaggtgacgtggaggagaatcccgggcctatggactggatttggcgcatccttttccttgtcggcgctgctaccggcgcgcattccttcgaacaacaaggcgaagaagatccccaggctctgagcatccaagagggcgagaatgccaccatgaactgctcctacaagaccagcatcaacaacctccagtggtacaggcagaacagcggcagaggactggtgcacctgatcctgatccggtccaacgagagagagaagcactccggcagactgagagtgaccctggacaccagcaagaagtccagcagcctgctgattaccgccagcagagccgccgatacagccagctacttttgtgccaccgacggcgatacccctctggtgtttggcaagggcacaagactgagcgtgatcgccaatacgcgtgcctctacaaagggaccctccgtgtttcctctggctcccagcagcaagtctacaagcggaggaacagccgctctgggctgcctggtcaaggattactttcccgagcctgtgaccgtgtcctggaatagcggagcactgacaagcggcgtgcacacctttccagccgtgctgcaaagcagcggcctgtactctctgagcagcgtggtcacagtgcctagctctagcctgggcacccagacctacatctgcaatgtgaaccacaagcctagcaacaccaaggtggacaagagagtggaacccaagagctgtggtaccacaacgccgggcgaaaggagttccttgccggccttttaccccggcacaagcggaagctgtagtgggtgtggaagcctcagcctcccacttcttgcgggcctcgtcgcggcagatgcagtagcttcacttcttattgtaggcgcggtatttctctgtgctcgaccaaggaggtcacccgctcaggaggatggtaaggtgtatataaatatgccaggacgcggaagctctagacgggttaagttttccagatccgcagacgcacccgcttaccaacaagggcagaaccaactctacaatgaacttaatttggggcggagggaagagtacgacgttctggacaaaaggaggggacgagatcccgagatgggcggaaagcctcagcgaaggaagaatccgcaagaggggctttataacgaactccagaaagataaaatggcagaagcctatagtgagattgggatgaagggagaaaggaggaggggtaaaggtcacgatgggttgtaccaaggattgagcacagccactaaagatacctatgatgcgctccacatgcaggccctgccgccaagacgcgccaagagaagcggatctggcgtgaagcagaccctgaatttcgacctgctgaagctggctggcgacgtggaatccaacccaggccctggccatatggctacctacgaggtgctgtgcgaggtggcaagaaagctgggcaccgacgacagagaagtggtgctgttcctgctgaacgtgttcatccctcagcctacactggcccagctgatcggtgcactgagagccctgaaagaggaaggccggctgacctttcctctgctggccgaatgcctgttcagagccggaagaagggatctgctgcgggacctgctgcatctggaccccagatttctggaaagacacctggccggcaccatgagctacttcagcccttaccagctgaccgtgctgcacgttgacggcgaactgtgcgccagagatattcggagcctgatcttcctgagcaaggacaccatcggcagccggtctacccctcagacatttctgcactgggtgtactgcatggaaaacctggacctgctcggccccacagatgtggatgccctgatgtccatgctgagaagcctgagcagagtggacctccagagacaggtgcagacactgatgggactgcacctgagcggacctagccacagccagcactacagacacacccct

SEQ ID NO: 2323 - DNA, 3477 bp, synthetic construct
  source 1..3477: mol_type = other DNA
atggccttaccagtgaccgccttgctcctgccgctggccttgctgctccacgccgccaggccggatggcggcattacacagagccccaagtacctgttcagaaaagagggccagaacgtcaccctgagctgcgagcagaacctgaaccacgacgccatgtactggtacagacaggacccaggccagggcctgagactgatctactactcttgggctcagggcgacttccagaagggcgatattgccgagggctacagcgtgtccagagagaagaaagagtcctttccactgaccgtgacaagcgcccagaagaaccctaccgccttctacctgtgtgccagctcttggggagccccttacgagcagtatttcggccctggcaccagactgacagttctcgagggacagcctaaggccaatcctaccgtgacactgttccctccaagcagcgaagaactccaggccaacaaggccacacttgtgtgcctgatctccgacttctaccctggggctgtgacagtggcttggaaggccgatggatctcctgtgaaagccggcgtggaaaccaccaagccatccaagcagagcaacaacaaatacgccgccagctcctacctgagcctgacacctgagcagtggaagtcccacagatcctacagctgccaagtgacccacgaaggcagcaccgtggaaaagacagtggcccctacagagtgcagcggatccacaacacctggcgagagaagtagcctgcctgccttctatcctggcaccagcggctcttgttctggctgtggatctctgagcctgcctctgctggctggactggttgctgctgatgctgtggcctctctgctgattgtgggagccgtgttcctgtgcgccagacctagaagaagccccgctcaagaggacggcaaggtgtacatcaacatgcccggcagaggaagcactagtagagtgaagttcagcagaagcgccgacgcccctgcctaccagcagggacagaaccaactgtacaacgagctgaacctgggcagacgggaagagtacgacgtgctggacaagcggagaggcagggaccctgagatgggcggaaagccccagcggagaaagaacccccaggaaggactgtataacgaactccagaaagacaagatggccgaagcctacagcgagatcggcatgaagggcgagcggagaagaggcaagggccacgatggcctgtaccagggcctgagcaccgccaccaaggacacctatgacgccctgcacatgcaggccctgcctccaagaagggccaagcgatctggatctggagcaacaaacttctcactactcaaacaagcaggtgacgtggaggagaatcccgggcctatggactggatttggcgcatccttttccttgtcggcgctgctaccggcgcgcattccttcgaacaacaaggcgaagaagatccccaggctctgagcatccaagagggcgagaatgccaccatgaactgctcctacaagaccagcatcaacaacctccagtggtacaggcagaacagcggcagaggactggtgcacctgatcctgatccggtccaacgagagagagaagcactccggcagactgagagtgaccctggacaccagcaagaagtccagcagcctgctgattaccgccagcagagccgccgatacagccagctacttttgtgccaccgacggcgatacccctctggtgtttggcaagggcacaagactgagcgtgatcgccaatacgcgtgcctctacaaagggaccctccgtgtttcctctggctcccagcagcaagtctacaagcggaggaacagccgctctgggctgcctggtcaaggattactttcccgagcctgtgaccgtgtcctggaatagcggagcactgacaagcggcgtgcacacctttccagccgtgctgcaaagcagcggcctgtactctctgagcagcgtggtcacagtgcctagctctagcctgggcacccagacctacatctgcaatgtgaaccacaagcctagcaacaccaaggtggacaagagagtggaacccaagagctgtggtaccacaacgccgggcgaaaggagttccttgccggccttttaccccggcacaagcggaagctgtagtgggtgtggaagcctcagcctcccacttcttgcgggcctcgtcgcggcagatgcagtagcttcacttcttattgtaggcgcggtatttctctgtgctcgaccaaggaggtcacccgctcaggaggatggtaaggtgtatataaatatgccaggacgcggaagctctagacgggttaagttttccagatccgcagacgcacccgcttaccaacaagggcagaaccaactctacaatgaacttaatttggggcggagggaagagtacgacgttctggacaaaaggaggggacgagatcccgagatgggcggaaagcctcagcgaaggaagaatccgcaagaggggctttataacgaactccagaaagataaaatggcagaagcctatagtgagattgggatgaagggagaaaggaggaggggtaaaggtcacgatgggttgtaccaaggattgagcacagccactaaagatacctatgatgcgctccacatgcaggccctgccgccaagacgcgccaagagaagcggatctggcgtgaagcagaccctgaatttcgacctgctgaagctggctggcgacgtggaatccaacccaggccctggccatatgtccgactccaaggaggtccctagccttccatttttgcgacacttgctcgaagagttggacagccatgaggacagcttgctgctgtttctgtgtcacgacgcggccccgggctgcacgacggtcacgcaagctttgtgctcgcttagccaacagcgcaagctgaccctcgcggctctggtcgagatgctctacgtgctgcagcgtatggatcttctcaagagccgcttcgggctcagcaaggagggggccgagcaattgctgggcacaagctttctcacgcgctaccgcaagctcatggtttgcgtgggtgaggagctcgactcgagcgagctacgcgctctacgcttgttcgcgtgcaacctgaatccgagcctgagcacggcgctttctgagagcagccgctttgtcgagcttgtactcgcgcttgaaaacgtaggactcgtctcgccatcgagtgtttccgtgcttgcggacatgttgcgcactcttcggcgcctcgatttgtgccagcagcttgttgagtacgaacaacaagagcaagccaggtaccgttactgttacgcggcctcgccctcattgccagttcgtacgttacgtcgggggcacggcgcgagtgaacacgagcagctgtgcatgcccgtgcaagaatcctctgacagccccgagctgctgcgcacgcccgtacaagaatcctccagcgacagccccgagcaaacgact

SEQ ID NO: 2324 - DNA, 3459 bp, synthetic construct
  source 1..3459: mol_type = other DNA
atggccttaccagtgaccgccttgctcctgccgctggccttgctgctccacgccgccaggccggatggcggcattacacagagccccaagtacctgttcagaaaagagggccagaacgtcaccctgagctgcgagcagaacctgaaccacgacgccatgtactggtacagacaggacccaggccagggcctgagactgatctactactcttgggctcagggcgacttccagaagggcgatattgccgagggctacagcgtgtccagagagaagaaagagtcctttccactgaccgtgacaagcgcccagaagaaccctaccgccttctacctgtgtgccagctcttggggagccccttacgagcagtatttcggccctggcaccagactgacagttctcgagggacagcctaaggccaatcctaccgtgacactgttccctccaagcagcgaagaactccaggccaacaaggccacacttgtgtgcctgatctccgacttctaccctggggctgtgacagtggcttggaaggccgatggatctcctgtgaaagccggcgtggaaaccaccaagccatccaagcagagcaacaacaaatacgccgccagctcctacctgagcctgacacctgagcagtggaagtcccacagatcctacagctgccaagtgacccacgaaggcagcaccgtggaaaagacagtggcccctacagagtgcagcggatccacaacacctggcgagagaagtagcctgcctgccttctatcctggcaccagcggctcttgttctggctgtggatctctgagcctgcctctgctggctggactggttgctgctgatgctgtggcctctctgctgattgtgggagccgtgttcctgtgcgccagacctagaagaagccccgctcaagaggacggcaaggtgtacatcaacatgcccggcagaggaagcactagtagagtgaagttcagcagaagcgccgacgcccctgcctaccagcagggacagaaccaactgtacaacgagctgaacctgggcagacgggaagagtacgacgtgctggacaagcggagaggcagggaccctgagatgggcggaaagccccagcggagaaagaacccccaggaaggactgtataacgaactccagaaagacaagatggccgaagcctacagcgagatcggcatgaagggcgagcggagaagaggcaagggccacgatggcctgtaccagggcctgagcaccgccaccaaggacacctatgacgccctgcacatgcaggccctgcctccaagaagggccaagcgatctggatctggagcaacaaacttctcactactcaaacaagcaggtgacgtggaggagaatcccgggcctatggactggatttggcgcatccttttccttgtcggcgctgctaccggcgcgcattccttcgaacaacaaggcgaagaagatccccaggctctgagcatccaagagggcgagaatgccaccatgaactgctcctacaagaccagcatcaacaacctccagtggtacaggcagaacagcggcagaggactggtgcacctgatcctgatccggtccaacgagagagagaagcactccggcagactgagagtgaccctggacaccagcaagaagtccagcagcctgctgattaccgccagcagagccgccgatacagccagctacttttgtgccaccgacggcgatacccctctggtgtttggcaagggcacaagactgagcgtgatcgccaatacgcgtgcctctacaaagggaccctccgtgtttcctctggctcccagcagcaagtctacaagcggaggaacagccgctctgggctgcctggtcaaggattactttcccgagcctgtgaccgtgtcctggaatagcggagcactgacaagcggcgtgcacacctttccagccgtgctgcaaagcagcggcctgtactctctgagcagcgtggtcacagtgcctagctctagcctgggcacccagacctacatctgcaatgtgaaccacaagcctagcaacaccaaggtggacaagagagtggaacccaagagctgtggtaccacaacgccgggcgaaaggagttccttgccggccttttaccccggcacaagcggaagctgtagtgggtgtggaagcctcagcctcccacttcttgcgggcctcgtcgcggcagatgcagtagcttcacttcttattgtaggcgcggtatttctctgtgctcgaccaaggaggtcacccgctcaggaggatggtaaggtgtatataaatatgccaggacgcggaagctctagacgggttaagttttccagatccgcagacgcacccgcttaccaacaagggcagaaccaactctacaatgaacttaatttggggcggagggaagagtacgacgttctggacaaaaggaggggacgagatcccgagatgggcggaaagcctcagcgaaggaagaatccgcaagaggggctttataacgaactccagaaagataaaatggcagaagcctatagtgagattgggatgaagggagaaaggaggaggggtaaaggtcacgatgggttgtaccaaggattgagcacagccactaaagatacctatgatgcgctccacatgcaggccctgccgccaagacgcgccaagagaagcggatctggcgtgaagcagaccctgaatttcgacctgctgaagctggctggcgacgtggaatccaacccaggccctggccatatggctctgcctgtgacagctctgctgctgcctctggcactgctgcttcatgctgctagacctagccagtttagagtgtcccctctggacagaacctggaacctgggcgagacagtggaactgaagtgccaggtgctgctgagcaaccctacaagcggctgctcctggctgtttcagcctagaggtgcagccgcctctcctacctttctgctgtacctgagccagaacaagcccaaggccgccgaaggactggacacccagagattcagcggcaagagactgggcgacaccttcgtgctgaccctgagcgacttcagaagagagaacgagggctactacttctgtagcgccctgagcaacagcatcatgtacttcagccacttcgtgcccgtgtttctgcccgccaagcctacaacaacccctgctcctagacctcctacaccagctcctacaatcgccagccagcctctgtctctcagacccgaagcctgtagacctgctgctggcggagctgtgcataccagaggactggatttcgcctgcgacatctacatctgggctcctctggctggcacatgtggcgtgctgctgctgtccctggtcatcaccctgtactgcaaccaccggaacaggcggagagtgtgcaagtgccctagacctgtggtcaagagcggcgacaagcctagcctgagcgccagatatgtt

SEQ ID NO: 2325 - DNA, 3870 bp, synthetic construct
  source 1..3870: mol_type = other DNA
atggccttaccagtgaccgccttgctcctgccgctggccttgctgctccacgccgccaggccggaagtgcagctggttgaatctggcggaggactggttcaggctggcggatctctgagactgtcttgtgccgccagcggcagaacctttagcatgggctggtttagacaggcccctggcaaagagagagagttcgtcgccgccatcacatactctggcggcagcccttactacgccgactctgtgaagggcagattcaccatcagccgggacaacgccaagaacaccgtgtacctccagatgaacagcctgaagcctgaggacaccgccgtgtactactgcgccgccaatccaacatacggcagcgactggaacgccgagaattggggccagggaacccaagtgacagtgtctagcggtaccggcggaggcggatctggcggcggaggtagcggtggcggaggatctgaattcgatggcggcattacacagagccccaagtacctgttcagaaaagagggccagaacgtcaccctgagctgcgagcagaacctgaaccacgacgccatgtactggtacagacaggacccaggccagggcctgagactgatctactactcttgggctcagggcgacttccagaagggcgatattgccgagggctacagcgtgtccagagagaagaaagagtcctttccactgaccgtgacaagcgcccagaagaaccctaccgccttctacctgtgtgccagctcttggggagccccttacgagcagtatttcggccctggcaccagactgacagttctcgagggacagcctaaggccaatcctaccgtgacactgttccctccaagcagcgaagaactccaggccaacaaggccacacttgtgtgcctgatctccgacttctaccctggggctgtgacagtggcttggaaggccgatggatctcctgtgaaagccggcgtggaaaccaccaagccatccaagcagagcaacaacaaatacgccgccagctcctacctgagcctgacacctgagcagtggaagtcccacagatcctacagctgccaagtgacccacgaaggcagcaccgtggaaaagacagtggcccctacagagtgcagcggatccacaacacctggcgagagaagtagcctgcctgccttctatcctggcaccagcggctcttgttctggctgtggatctctgagcctgcctctgctggctggactggttgctgctgatgctgtggcctctctgctgattgtgggagccgtgttcctgtgcgccagacctagaagaagccccgctcaagaggacggcaaggtgtacatcaacatgcccggcagaggaagcactagtagagtgaagttcagcagaagcgccgacgcccctgcctaccagcagggacagaaccaactgtacaacgagctgaacctgggcagacgggaagagtacgacgtgctggacaagcggagaggcagggaccctgagatgggcggaaagccccagcggagaaagaacccccaggaaggactgtataacgaactccagaaagacaagatggccgaagcctacagcgagatcggcatgaagggcgagcggagaagaggcaagggccacgatggcctgtaccagggcctgagcaccgccaccaaggacacctatgacgccctgcacatgcaggccctgcctccaagaagggccaagcgatctggatctggagcaacaaacttctcactactcaaacaagcaggtgacgtggaggagaatcccgggcctatggactggatttggcgcatccttttccttgtcggcgctgctaccggcgcgcattccttcgaacaacaaggcgaagaagatccccaggctctgagcatccaagagggcgagaatgccaccatgaactgctcctacaagaccagcatcaacaacctccagtggtacaggcagaacagcggcagaggactggtgcacctgatcctgatccggtccaacgagagagagaagcactccggcagactgagagtgaccctggacaccagcaagaagtccagcagcctgctgattaccgccagcagagccgccgatacagccagctacttttgtgccaccgacggcgatacccctctggtgtttggcaagggcacaagactgagcgtgatcgccaatacgcgtgcctctacaaagggaccctccgtgtttcctctggctcccagcagcaagtctacaagcggaggaacagccgctctgggctgcctggtcaaggattactttcccgagcctgtgaccgtgtcctggaatagcggagcactgacaagcggcgtgcacacctttccagccgtgctgcaaagcagcggcctgtactctctgagcagcgtggtcacagtgcctagctctagcctgggcacccagacctacatctgcaatgtgaaccacaagcctagcaacaccaaggtggacaagagagtggaacccaagagctgtggtaccacaacgccgggcgaaaggagttccttgccggccttttaccccggcacaagcggaagctgtagtgggtgtggaagcctcagcctcccacttcttgcgggcctcgtcgcggcagatgcagtagcttcacttcttattgtaggcgcggtatttctctgtgctcgaccaaggaggtcacccgctcaggaggatggtaaggtgtatataaatatgccaggacgcggaagctctagacgggttaagttttccagatccgcagacgcacccgcttaccaacaagggcagaaccaactctacaatgaacttaatttggggcggagggaagagtacgacgttctggacaaaaggaggggacgagatcccgagatgggcggaaagcctcagcgaaggaagaatccgcaagaggggctttataacgaactccagaaagataaaatggcagaagcctatagtgagattgggatgaagggagaaaggaggaggggtaaaggtcacgatgggttgtaccaaggattgagcacagccactaaagatacctatgatgcgctccacatgcaggccctgccgccaagacgcgccaagagaagcggatctggcgtgaagcagaccctgaatttcgacctgctgaagctggctggcgacgtggaatccaacccaggccctggccatatggctctgcctgtgacagctctgctgctgcctctggcactgctgcttcatgctgctagacctagccagtttagagtgtcccctctggacagaacctggaacctgggcgagacagtggaactgaagtgccaggtgctgctgagcaaccctacaagcggctgctcctggctgtttcagcctagaggtgcagccgcctctcctacctttctgctgtacctgagccagaacaagcccaaggccgccgaaggactggacacccagagattcagcggcaagagactgggcgacaccttcgtgctgaccctgagcgacttcagaagagagaacgagggctactacttctgtagcgccctgagcaacagcatcatgtacttcagccacttcgtgcccgtgtttctgcccgccaagcctacaacaacccctgctcctagacctcctacaccagctcctacaatcgccagccagcctctgtctctcagacccgaagcctgtagacctgctgctggcggagctgtgcataccagaggactggatttcgcctgcgacatctacatctgggctcctctggctggcacatgtggcgtgctgctgctgtccctggtcatcaccctgtactgcaaccaccggaacaggcggagagtgtgcaagtgccctagacctgtggtcaagagcggcgacaagcctagcctgagcgccagatatgtt

SEQ ID NO: 2326 - DNA, 4281 bp, synthetic construct
  source 1..4281: mol_type = other DNA
atggccttaccagtgaccgccttgctcctgccgctggccttgctgctccacgccgccaggccggaagtgcagctggttgaatctggcggaggactggttcaggctggcggatctctgagactgtcttgtgccgccagcggcagaacctttagcatgggctggtttagacaggcccctggcaaagagagagagttcgtcgccgccatcacatactctggcggcagcccttactacgccgactctgtgaagggcagattcaccatcagccgggacaacgccaagaacaccgtgtacctccagatgaacagcctgaagcctgaggacaccgccgtgtactactgcgccgccaatccaacatacggcagcgactggaacgccgagaattggggccagggaacccaagtgacagtgtctagcggtaccggcggaggcggatctggcggcggaggtagcggtggcggaggatctgaattcgatggcggcattacacagagccccaagtacctgttcagaaaagagggccagaacgtcaccctgagctgcgagcagaacctgaaccacgacgccatgtactggtacagacaggacccaggccagggcctgagactgatctactactcttgggctcagggcgacttccagaagggcgatattgccgagggctacagcgtgtccagagagaagaaagagtcctttccactgaccgtgacaagcgcccagaagaaccctaccgccttctacctgtgtgccagctcttggggagccccttacgagcagtatttcggccctggcaccagactgacagttctcgagggacagcctaaggccaatcctaccgtgacactgttccctccaagcagcgaagaactccaggccaacaaggccacacttgtgtgcctgatctccgacttctaccctggggctgtgacagtggcttggaaggccgatggatctcctgtgaaagccggcgtggaaaccaccaagccatccaagcagagcaacaacaaatacgccgccagctcctacctgagcctgacacctgagcagtggaagtcccacagatcctacagctgccaagtgacccacgaaggcagcaccgtggaaaagacagtggcccctacagagtgcagcggatccacaacacctggcgagagaagtagcctgcctgccttctatcctggcaccagcggctcttgttctggctgtggatctctgagcctgcctctgctggctggactggttgctgctgatgctgtggcctctctgctgattgtgggagccgtgttcctgtgcgccagacctagaagaagccccgctcaagaggacggcaaggtgtacatcaacatgcccggcagaggaagcactagtagagtgaagttcagcagaagcgccgacgcccctgcctaccagcagggacagaaccaactgtacaacgagctgaacctgggcagacgggaagagtacgacgtgctggacaagcggagaggcagggaccctgagatgggcggaaagccccagcggagaaagaacccccaggaaggactgtataacgaactccagaaagacaagatggccgaagcctacagcgagatcggcatgaagggcgagcggagaagaggcaagggccacgatggcctgtaccagggcctgagcaccgccaccaaggacacctatgacgccctgcacatgcaggccctgcctccaagaagggccaagcgatctggatctggagcaacaaacttctcactactcaaacaagcaggtgacgtggaggagaatcccgggcctatggactggatttggcgcatccttttccttgtcggcgctgctaccggcgcgcattccgggcccgaagtgcaactggttgaatccggtggcggcctggtgcaagcaggcggatctctcagacttagctgtgccgcctccggcagaaccttcacaatgggatggtttaggcaggctccagggaaagagagagagttcgtcgccgccatctctctgtctcccacactggcctactacgccgactctgtgaaaggccggttcaccatctccagagataatgccaagaacaccgtggtgctgcaaatgaactctctgaaacccgaggatacagccctgtactattgtgccgctgaccggaagtccgtgatgagcatcagacccgattactggggacagggcacacaagtcacagtgtcctctggatccggcggcggaggatctggcggaggcggatctgggggcggaggctctttcgaacaacaaggcgaagaagatccccaggctctgagcatccaagagggcgagaatgccaccatgaactgctcctacaagaccagcatcaacaacctccagtggtacaggcagaacagcggcagaggactggtgcacctgatcctgatccggtccaacgagagagagaagcactccggcagactgagagtgaccctggacaccagcaagaagtccagcagcctgctgattaccgccagcagagccgccgatacagccagctacttttgtgccaccgacggcgatacccctctggtgtttggcaagggcacaagactgagcgtgatcgccaatacgcgtgcctctacaaagggaccctccgtgtttcctctggctcccagcagcaagtctacaagcggaggaacagccgctctgggctgcctggtcaaggattactttcccgagcctgtgaccgtgtcctggaatagcggagcactgacaagcggcgtgcacacctttccagccgtgctgcaaagcagcggcctgtactctctgagcagcgtggtcacagtgcctagctctagcctgggcacccagacctacatctgcaatgtgaaccacaagcctagcaacaccaaggtggacaagagagtggaacccaagagctgtggtaccacaacgccgggcgaaaggagttccttgccggccttttaccccggcacaagcggaagctgtagtgggtgtggaagcctcagcctcccacttcttgcgggcctcgtcgcggcagatgcagtagcttcacttcttattgtaggcgcggtatttctctgtgctcgaccaaggaggtcacccgctcaggaggatggtaaggtgtatataaatatgccaggacgcggaagctctagacgggttaagttttccagatccgcagacgcacccgcttaccaacaagggcagaaccaactctacaatgaacttaatttggggcggagggaagagtacgacgttctggacaaaaggaggggacgagatcccgagatgggcggaaagcctcagcgaaggaagaatccgcaagaggggctttataacgaactccagaaagataaaatggcagaagcctatagtgagattgggatgaagggagaaaggaggaggggtaaaggtcacgatgggttgtaccaaggattgagcacagccactaaagatacctatgatgcgctccacatgcaggccctgccgccaagacgcgccaagagaagcggatctggcgtgaagcagaccctgaatttcgacctgctgaagctggctggcgacgtggaatccaacccaggccctggccatatggctctgcctgtgacagctctgctgctgcctctggcactgctgcttcatgctgctagacctagccagtttagagtgtcccctctggacagaacctggaacctgggcgagacagtggaactgaagtgccaggtgctgctgagcaaccctacaagcggctgctcctggctgtttcagcctagaggtgcagccgcctctcctacctttctgctgtacctgagccagaacaagcccaaggccgccgaaggactggacacccagagattcagcggcaagagactgggcgacaccttcgtgctgaccctgagcgacttcagaagagagaacgagggctactacttctgtagcgccctgagcaacagcatcatgtacttcagccacttcgtgcccgtgtttctgcccgccaagcctacaacaacccctgctcctagacctcctacaccagctcctacaatcgccagccagcctctgtctctcagacccgaagcctgtagacctgctgctggcggagctgtgcataccagaggactggatttcgcctgcgacatctacatctgggctcctctggctggcacatgtggcgtgctgctgctgtccctggtcatcaccctgtactgcaaccaccggaacaggcggagagtgtgcaagtgccctagacctgtggtcaagagcggcgacaagcctagcctgagcgccagatatgtt

SEQ ID NO: 2327 - DNA, 2436 bp, synthetic construct
  source 1..2436: mol_type = other DNA
atggccttaccagtgaccgccttgctcctgccgctggccttgctgctccacgccgccaggccggaattcgatggcggcattacacagagccccaagtacctgttcagaaaagagggccagaacgtcaccctgagctgcgagcagaacctgaaccacgacgccatgtactggtacagacaggacccaggccagggcctgagactgatctactactcttgggctcagggcgacttccagaagggcgatattgccgagggctacagcgtgtccagagagaagaaagagtcctttccactgaccgtgacaagcgcccagaagaaccctaccgccttctacctgtgtgccagctcttggggagccccttacgagcagtatttcggccctggcaccagactgacagttctcgaggacctgaagaacgtgttcccacctgaggtggccgtgttcgagcctagcgaggccgagatcagccacacccagaaagccaccctcgtgtgcctggctaccggcttctaccccgaccatgtggaactgtcttggtgggtcaacggcaaagaggtgcacagcggcgtgtctaccgacccccagccactgaaagaacagcccgccctgaacgacagccggtactgcctgagcagcagactgagagtgtccgccaccttctggcagaacccccggaaccacttcagatgccaggtgcagttctacggcctgagcgagaacgacgagtggacccaggacagagccaagcccgtgacccagatcgtgtctgccgaagcctggggcagagccgattgcggatcccagagcttcggcctgctggaccccaagctgtgctacctgctggatggcatcctgttcatctacggcgtgatcctgaccgccctgttcctgagagtgaagttcagcagaagcgccgacgcccctgcctaccagcagggacagaaccaactgtacaacgagctgaacctgggcagacgggaagagtacgacgtgctggacaagcggagaggcagggaccctgagatgggcggaaagccccagcggagaaagaacccccaggaaggactgtataacgaactccagaaagacaagatggccgaagcctacagcgagatcggcatgaagggcgagcggagaagaggcaagggccacgatggcctgtaccagggcctgagcaccgccaccaaggacacctatgacgccctgcacatgcaggccctgcctccaagaagggccaagcgatctggatctggagcaacaaacttctcactactcaaacaagcaggtgacgtggaggagaatcccgggcctactagtatggactggatttggcgcatccttttccttgtcggcgctgctaccggcgcgcattccttcgaacaacaaggcgaagaagatccccaggctctgagcatccaagagggcgagaatgccaccatgaactgctcctacaagaccagcatcaacaacctccagtggtacaggcagaacagcggcagaggactggtgcacctgatcctgatccggtccaacgagagagagaagcactccggcagactgagagtgaccctggacaccagcaagaagtccagcagcctgctgattaccgccagcagagccgccgatacagccagctacttttgtgccaccgacggcgatacccctctggtgtttggcaagggcacaagactgagcgtgatcgccaatacgcgtatccagaaccctgatcctgccgtgtaccagctgcgggatagcaagagcagcgacaagagcgtgtgtctgttcaccgacttcgacagccagaccaacgtgtcccagagcaaggactccgacgtgtacatcaccgataagaccgtgctggacatgcggagcatggacttcaagagcaactccgccgtggcctggtccaacaagtccgatttcgcctgcgccaacgccttcaacaacagcattatccccgaggacacattcttcccaagccccgagagcagctgcggtacccagagttttgggttgttggaccctaaattgtgctatctgttggacggaatcctgttcatttacggagtgatcctgaccgcattgttcctgcgggttaagttttccagatccgcagacgcacccgcttaccaacaagggcagaaccaactctacaatgaacttaatttggggcggagggaagagtacgacgttctggacaaaaggaggggacgagatcccgagatgggcggaaagcctcagcgaaggaagaatccgcaagaggggctttataacgaactccagaaagataaaatggcagaagcctatagtgagattgggatgaagggagaaaggaggaggggtaaaggtcacgatgggttgtaccaaggattgagcacagccactaaagatacctatgatgcgctccacatgcaggccctgccgccaagataa

SEQ ID NO: 2328 - DNA, 2562 bp, synthetic construct
  source 1..2562: mol_type = other DNA
atggccttaccagtgaccgccttgctcctgccgctggccttgctgctccacgccgccaggccggaattcgatggcggcattacacagagccccaagtacctgttcagaaaagagggccagaacgtcaccctgagctgcgagcagaacctgaaccacgacgccatgtactggtacagacaggacccaggccagggcctgagactgatctactactcttgggctcagggcgacttccagaagggcgatattgccgagggctacagcgtgtccagagagaagaaagagtcctttccactgaccgtgacaagcgcccagaagaaccctaccgccttctacctgtgtgccagctcttggggagccccttacgagcagtatttcggccctggcaccagactgacagttctcgaggacctgaagaacgtgttcccacctgaggtggccgtgttcgagcctagcgaggccgagatcagccacacccagaaagccaccctcgtgtgcctggctaccggcttctaccccgaccatgtggaactgtcttggtgggtcaacggcaaagaggtgcacagcggcgtgtctaccgacccccagccactgaaagaacagcccgccctgaacgacagccggtactgcctgagcagcagactgagagtgtccgccaccttctggcagaacccccggaaccacttcagatgccaggtgcagttctacggcctgagcgagaacgacgagtggacccaggacagagccaagcccgtgacccagatcgtgtctgccgaagcctggggcagagccgattgcggatcccagagcttcggcctgctggaccccaagctgtgctacctgctggatggcatcctgttcatctacggcgtgatcctgaccgccctgttcctgagagtgaagttcagcagaagcgccgacgcccctgcctaccagcagggacagaaccaactgtacaacgagctgaacctgggcagacgggaagagtacgacgtgctggacaagcggagaggcagggaccctgagatgggcggaaagccccagcggagaaagaacccccaggaaggactgtataacgaactccagaaagacaagatggccgaagcctacagcgagatcggcatgaagggcgagcggagaagaggcaagggccacgatggcctgtaccagggcctgagcaccgccaccaaggacacctatgacgccctgcacatgcaggccctgcctccaagaagggccaagcgatctggatctggagcaacaaacttctcactactcaaacaagcaggtgacgtggaggagaatcccgggcctactagtatggactggatttggcgcatccttttccttgtcggcgctgctaccggcgcgcattccttcgaacaacaaggcgaagaagatccccaggctctgagcatccaagagggcgagaatgccaccatgaactgctcctacaagaccagcatcaacaacctccagtggtacaggcagaacagcggcagaggactggtgcacctgatcctgatccggtccaacgagagagagaagcactccggcagactgagagtgaccctggacaccagcaagaagtccagcagcctgctgattaccgccagcagagccgccgatacagccagctacttttgtgccaccgacggcgatacccctctggtgtttggcaagggcacaagactgagcgtgatcgccaatacgcgtatccagaaccctgatcctgccgtgtaccagctgcgggatagcaagagcagcgacaagagcgtgtgtctgttcaccgacttcgacagccagaccaacgtgtcccagagcaaggactccgacgtgtacatcaccgataagaccgtgctggacatgcggagcatggacttcaagagcaactccgccgtggcctggtccaacaagtccgatttcgcctgcgccaacgccttcaacaacagcattatccccgaggacacattcttcccaagccccgagagcagctgcggtacccagagcttcggcctgctggaccccaagctgtgctacctgctggatggcatcctgttcatctacggcgtgatcctgaccgccctgttcctgaaacggggcagaaagaaactcctgtatatattcaaacaaccatttatgagaccagtacaaactactcaagaggaagatggctgtagctgccgatttccagaagaagaagaaggaggatgtgaactgagagtgaagttcagcagaagcgccgacgcccctgcctaccagcagggacagaaccaactgtacaacgagctgaacctgggcagacgggaagagtacgacgtgctggacaagcggagaggcagggaccctgagatgggcggaaagccccagcggagaaagaacccccaggaaggactgtataacgaactccagaaagacaagatggccgaagcctacagcgagatcggcatgaagggcgagcggagaagaggcaagggccacgatggcctgtaccagggcctgagcaccgccaccaaggacacctatgacgccctgcacatgcaggccctgcctccaagataa

SEQ ID NO: 2329 - DNA, 2559 bp, synthetic construct
  source 1..2559: mol_type = other DNA
atggccttaccagtgaccgccttgctcctgccgctggccttgctgctccacgccgccaggccggaattcgatggcggcattacacagagccccaagtacctgttcagaaaagagggccagaacgtcaccctgagctgcgagcagaacctgaaccacgacgccatgtactggtacagacaggacccaggccagggcctgagactgatctactactcttgggctcagggcgacttccagaagggcgatattgccgagggctacagcgtgtccagagagaagaaagagtcctttccactgaccgtgacaagcgcccagaagaaccctaccgccttctacctgtgtgccagctcttggggagccccttacgagcagtatttcggccctggcaccagactgacagttctcgaggacctgaagaacgtgttcccacctgaggtggccgtgttcgagcctagcgaggccgagatcagccacacccagaaagccaccctcgtgtgcctggctaccggcttctaccccgaccatgtggaactgtcttggtgggtcaacggcaaagaggtgcacagcggcgtgtctaccgacccccagccactgaaagaacagcccgccctgaacgacagccggtactgcctgagcagcagactgagagtgtccgccaccttctggcagaacccccggaaccacttcagatgccaggtgcagttctacggcctgagcgagaacgacgagtggacccaggacagagccaagcccgtgacccagatcgtgtctgccgaagcctggggcagagccgattgcggatcccagagcttcggcctgctggaccccaagctgtgctacctgctggatggcatcctgttcatctacggcgtgatcctgaccgccctgttcctgagagtgaagttcagcagaagcgccgacgcccctgcctaccagcagggacagaaccaactgtacaacgagctgaacctgggcagacgggaagagtacgacgtgctggacaagcggagaggcagggaccctgagatgggcggaaagccccagcggagaaagaacccccaggaaggactgtataacgaactccagaaagacaagatggccgaagcctacagcgagatcggcatgaagggcgagcggagaagaggcaagggccacgatggcctgtaccagggcctgagcaccgccaccaaggacacctatgacgccctgcacatgcaggccctgcctccaagaagggccaagcgatctggatctggagcaacaaacttctcactactcaaacaagcaggtgacgtggaggagaatcccgggcctactagtatggactggatttggcgcatccttttccttgtcggcgctgctaccggcgcgcattccttcgaacaacaaggcgaagaagatccccaggctctgagcatccaagagggcgagaatgccaccatgaactgctcctacaagaccagcatcaacaacctccagtggtacaggcagaacagcggcagaggactggtgcacctgatcctgatccggtccaacgagagagagaagcactccggcagactgagagtgaccctggacaccagcaagaagtccagcagcctgctgattaccgccagcagagccgccgatacagccagctacttttgtgccaccgacggcgatacccctctggtgtttggcaagggcacaagactgagcgtgatcgccaatacgcgtatccagaaccctgatcctgccgtgtaccagctgcgggatagcaagagcagcgacaagagcgtgtgtctgttcaccgacttcgacagccagaccaacgtgtcccagagcaaggactccgacgtgtacatcaccgataagaccgtgctggacatgcggagcatggacttcaagagcaactccgccgtggcctggtccaacaagtccgatttcgcctgcgccaacgccttcaacaacagcattatccccgaggacacattcttcccaagccccgagagcagctgcggtacccagagcttcggcctgctggaccccaagctgtgctacctgctggatggcatcctgttcatctacggcgtgatcctgaccgccctgttcctgaggagtaagaggagcaggctcctgcacagtgactacatgaacatgactccacgccgccccggacccacccgcaagcattaccagccctatgccccaccacgcgacttcgcagcctatcgctccagagtgaagttcagcagaagcgccgacgcccctgcctaccagcagggacagaaccaactgtacaacgagctgaacctgggcagacgggaagagtacgacgtgctggacaagcggagaggcagggaccctgagatgggcggaaagccccagcggagaaagaacccccaggaaggactgtataacgaactccagaaagacaagatggccgaagcctacagcgagatcggcatgaagggcgagcggagaagaggcaagggccacgatggcctgtaccagggcctgagcaccgccaccaaggacacctatgacgccctgcacatgcaggccctgcctccaagataa

SEQ ID NO: 2330 - DNA, 2544 bp, synthetic construct
  source 1..2544: mol_type = other DNA
atggccttaccagtgaccgccttgctcctgccgctggccttgctgctccacgccgccaggccggaattcgatggcggcattacacagagccccaagtacctgttcagaaaagagggccagaacgtcaccctgagctgcgagcagaacctgaaccacgacgccatgtactggtacagacaggacccaggccagggcctgagactgatctactactcttgggctcagggcgacttccagaagggcgatattgccgagggctacagcgtgtccagagagaagaaagagtcctttccactgaccgtgacaagcgcccagaagaaccctaccgccttctacctgtgtgccagctcttggggagccccttacgagcagtatttcggccctggcaccagactgacagttctcgaggacctgaagaacgtgttcccacctgaggtggccgtgttcgagcctagcgaggccgagatcagccacacccagaaagccaccctcgtgtgcctggctaccggcttctaccccgaccatgtggaactgtcttggtgggtcaacggcaaagaggtgcacagcggcgtgtctaccgacccccagccactgaaagaacagcccgccctgaacgacagccggtactgcctgagcagcagactgagagtgtccgccaccttctggcagaacccccggaaccacttcagatgccaggtgcagttctacggcctgagcgagaacgacgagtggacccaggacagagccaagcccgtgacccagatcgtgtctgccgaagcctggggcagagccgattgcggatcccagagcttcggcctgctggaccccaagctgtgctacctgctggatggcatcctgttcatctacggcgtgatcctgaccgccctgttcctgagagtgaagttcagcagaagcgccgacgcccctgcctaccagcagggacagaaccaactgtacaacgagctgaacctgggcagacgggaagagtacgacgtgctggacaagcggagaggcagggaccctgagatgggcggaaagccccagcggagaaagaacccccaggaaggactgtataacgaactccagaaagacaagatggccgaagcctacagcgagatcggcatgaagggcgagcggagaagaggcaagggccacgatggcctgtaccagggcctgagcaccgccaccaaggacacctatgacgccctgcacatgcaggccctgcctccaagaagggccaagcgatctggatctggagcaacaaacttctcactactcaaacaagcaggtgacgtggaggagaatcccgggcctactagtatggactggatttggcgcatccttttccttgtcggcgctgctaccggcgcgcattccttcgaacaacaaggcgaagaagatccccaggctctgagcatccaagagggcgagaatgccaccatgaactgctcctacaagaccagcatcaacaacctccagtggtacaggcagaacagcggcagaggactggtgcacctgatcctgatccggtccaacgagagagagaagcactccggcagactgagagtgaccctggacaccagcaagaagtccagcagcctgctgattaccgccagcagagccgccgatacagccagctacttttgtgccaccgacggcgatacccctctggtgtttggcaagggcacaagactgagcgtgatcgccaatacgcgtatccagaaccctgatcctgccgtgtaccagctgcgggatagcaagagcagcgacaagagcgtgtgtctgttcaccgacttcgacagccagaccaacgtgtcccagagcaaggactccgacgtgtacatcaccgataagaccgtgctggacatgcggagcatggacttcaagagcaactccgccgtggcctggtccaacaagtccgatttcgcctgcgccaacgccttcaacaacagcattatccccgaggacacattcttcccaagccccgagagcagctgcggtacccagagcttcggcctgctggaccccaagctgtgctacctgctggatggcatcctgttcatctacggcgtgatcctgaccgccctgttcctgagggaccaaagactgcctcctgacgctcacaaacctccaggcggaggcagcttcagaacccctatccaagaggaacaggctgacgcccacagcaccctggcaaaaattagagtgaagttcagcagaagcgccgacgcccctgcctaccagcagggacagaaccaactgtacaacgagctgaacctgggcagacgggaagagtacgacgtgctggacaagcggagaggcagggaccctgagatgggcggaaagccccagcggagaaagaacccccaggaaggactgtataacgaactccagaaagacaagatggccgaagcctacagcgagatcggcatgaagggcgagcggagaagaggcaagggccacgatggcctgtaccagggcctgagcaccgccaccaaggacacctatgacgccctgcacatgcaggccctgcctccaagataa

SEQ ID NO: 2331 - DNA, 2796 bp, synthetic construct
  source 1..2796: mol_type = other DNA
atggccttaccagtgaccgccttgctcctgccgctggccttgctgctccacgccgccaggccggaattcgatggcggcattacacagagccccaagtacctgttcagaaaagagggccagaacgtcaccctgagctgcgagcagaacctgaaccacgacgccatgtactggtacagacaggacccaggccagggcctgagactgatctactactcttgggctcagggcgacttccagaagggcgatattgccgagggctacagcgtgtccagagagaagaaagagtcctttccactgaccgtgacaagcgcccagaagaaccctaccgccttctacctgtgtgccagctcttggggagccccttacgagcagtatttcggccctggcaccagactgacagttctcgaggacctgaagaacgtgttcccacctgaggtggccgtgttcgagcctagcgaggccgagatcagccacacccagaaagccaccctcgtgtgcctggctaccggcttctaccccgaccatgtggaactgtcttggtgggtcaacggcaaagaggtgcacagcggcgtgtctaccgacccccagccactgaaagaacagcccgccctgaacgacagccggtactgcctgagcagcagactgagagtgtccgccaccttctggcagaacccccggaaccacttcagatgccaggtgcagttctacggcctgagcgagaacgacgagtggacccaggacagagccaagcccgtgacccagatcgtgtctgccgaagcctggggcagagccgattgcggatcccagagcttcggcctgctggaccccaagctgtgctacctgctggatggcatcctgttcatctacggcgtgatcctgaccgccctgttcctgagagtgaagttcagcagaagcgccgacgcccctgcctaccagcagggacagaaccaactgtacaacgagctgaacctgggcagacgggaagagtacgacgtgctggacaagcggagaggcagggaccctgagatgggcggaaagccccagcggagaaagaacccccaggaaggactgtataacgaactccagaaagacaagatggccgaagcctacagcgagatcggcatgaagggcgagcggagaagaggcaagggccacgatggcctgtaccagggcctgagcaccgccaccaaggacacctatgacgccctgcacatgcaggccctgcctccaagaagggccaagcgatctggatctggagcaacaaacttctcactactcaaacaagcaggtgacgtggaggagaatcccgggcctactagtatggactggatttggcgcatccttttccttgtcggcgctgctaccggcgcgcattccttcgaacaacaaggcgaagaagatccccaggctctgagcatccaagagggcgagaatgccaccatgaactgctcctacaagaccagcatcaacaacctccagtggtacaggcagaacagcggcagaggactggtgcacctgatcctgatccggtccaacgagagagagaagcactccggcagactgagagtgaccctggacaccagcaagaagtccagcagcctgctgattaccgccagcagagccgccgatacagccagctacttttgtgccaccgacggcgatacccctctggtgtttggcaagggcacaagactgagcgtgatcgccaatacgcgtatccagaaccctgatcctgccgtgtaccagctgcgggatagcaagagcagcgacaagagcgtgtgtctgttcaccgacttcgacagccagaccaacgtgtcccagagcaaggactccgacgtgtacatcaccgataagaccgtgctggacatgcggagcatggacttcaagagcaactccgccgtggcctggtccaacaagtccgatttcgcctgcgccaacgccttcaacaacagcattatccccgaggacacattcttcccaagccccgagagcagctgcggtacccagagcttcggcctgctggaccccaagctgtgctacctgctggatggcatcctgttcatctacggcgtgatcctgaccgccctgttcctgtggcggcggaagcggaaagagaagcagtctgagacaagccccaaagagttcctgaccatctacgaggacgtgaaggacctgaaaacccggcggaaccacgaacaagagcagacctttcctggcggaggcagcaccatctacagcatgatccagagccagagcagcgcccctacaagccaagagcctgcctacacactgtactccctgatccagcctagcagaaagagcggcagccggaagagaaatcacagccccagcttcaacagcacgatctacgaagtgatcggcaagagccagccaaaggctcagaaccctgccagactgagccggaaagagctggaaaacttcgacgtgtacagcagagtgaagttcagcagaagcgccgacgcccctgcctaccagcagggacagaaccaactgtacaacgagctgaacctgggcagacgggaagagtacgacgtgctggacaagcggagaggcagggaccctgagatgggcggaaagccccagcggagaaagaacccccaggaaggactgtataacgaactccagaaagacaagatggccgaagcctacagcgagatcggcatgaagggcgagcggagaagaggcaagggccacgatggcctgtaccagggcctgagcaccgccaccaaggacacctatgacgccctgcacatgcaggccctgcctccaagataa

SEQ ID NO: 2332 - DNA, 2685 bp, synthetic construct
  source 1..2685: mol_type = other DNA
atggccttaccagtgaccgccttgctcctgccgctggccttgctgctccacgccgccaggccggaattcgatggcggcattacacagagccccaagtacctgttcagaaaagagggccagaacgtcaccctgagctgcgagcagaacctgaaccacgacgccatgtactggtacagacaggacccaggccagggcctgagactgatctactactcttgggctcagggcgacttccagaagggcgatattgccgagggctacagcgtgtccagagagaagaaagagtcctttccactgaccgtgacaagcgcccagaagaaccctaccgccttctacctgtgtgccagctcttggggagccccttacgagcagtatttcggccctggcaccagactgacagttctcgaggacctgaagaacgtgttcccacctgaggtggccgtgttcgagcctagcgaggccgagatcagccacacccagaaagccaccctcgtgtgcctggctaccggcttctaccccgaccatgtggaactgtcttggtgggtcaacggcaaagaggtgcacagcggcgtgtctaccgacccccagccactgaaagaacagcccgccctgaacgacagccggtactgcctgagcagcagactgagagtgtccgccaccttctggcagaacccccggaaccacttcagatgccaggtgcagttctacggcctgagcgagaacgacgagtggacccaggacagagccaagcccgtgacccagatcgtgtctgccgaagcctggggcagagccgattgcggatcccagagcttcggcctgctggaccccaagctgtgctacctgctggatggcatcctgttcatctacggcgtgatcctgaccgccctgttcctgaggagtaagaggagcaggctcctgcacagtgactacatgaacatgactccacgccgccccggacccacccgcaagcattaccagccctatgccccaccacgcgacttcgcagcctatcgctccagagtgaagttcagcagaagcgccgacgcccctgcctaccagcagggacagaaccaactgtacaacgagctgaacctgggcagacgggaagagtacgacgtgctggacaagcggagaggcagggaccctgagatgggcggaaagccccagcggagaaagaacccccaggaaggactgtataacgaactccagaaagacaagatggccgaagcctacagcgagatcggcatgaagggcgagcggagaagaggcaagggccacgatggcctgtaccagggcctgagcaccgccaccaaggacacctatgacgccctgcacatgcaggccctgcctccaagaagggccaagcgatctggatctggagcaacaaacttctcactactcaaacaagcaggtgacgtggaggagaatcccgggcctactagtatggactggatttggcgcatccttttccttgtcggcgctgctaccggcgcgcattccttcgaacaacaaggcgaagaagatccccaggctctgagcatccaagagggcgagaatgccaccatgaactgctcctacaagaccagcatcaacaacctccagtggtacaggcagaacagcggcagaggactggtgcacctgatcctgatccggtccaacgagagagagaagcactccggcagactgagagtgaccctggacaccagcaagaagtccagcagcctgctgattaccgccagcagagccgccgatacagccagctacttttgtgccaccgacggcgatacccctctggtgtttggcaagggcacaagactgagcgtgatcgccaatacgcgtatccagaaccctgatcctgccgtgtaccagctgcgggatagcaagagcagcgacaagagcgtgtgtctgttcaccgacttcgacagccagaccaacgtgtcccagagcaaggactccgacgtgtacatcaccgataagaccgtgctggacatgcggagcatggacttcaagagcaactccgccgtggcctggtccaacaagtccgatttcgcctgcgccaacgccttcaacaacagcattatccccgaggacacattcttcccaagccccgagagcagctgcggtacccagagcttcggcctgctggaccccaagctgtgctacctgctggatggcatcctgttcatctacggcgtgatcctgaccgccctgttcctgaaacggggcagaaagaaactcctgtatatattcaaacaaccatttatgagaccagtacaaactactcaagaggaagatggctgtagctgccgatttccagaagaagaagaaggaggatgtgaactgagagtgaagttcagcagaagcgccgacgcccctgcctaccagcagggacagaaccaactgtacaacgagctgaacctgggcagacgggaagagtacgacgtgctggacaagcggagaggcagggaccctgagatgggcggaaagccccagcggagaaagaacccccaggaaggactgtataacgaactccagaaagacaagatggccgaagcctacagcgagatcggcatgaagggcgagcggagaagaggcaagggccacgatggcctgtaccagggcctgagcaccgccaccaaggacacctatgacgccctgcacatgcaggccctgcctccaagataa

SEQ ID NO: 2333 - DNA, 2682 bp, synthetic construct
  source 1..2682: mol_type = other DNA
atggccttaccagtgaccgccttgctcctgccgctggccttgctgctccacgccgccaggccggaattcgatggcggcattacacagagccccaagtacctgttcagaaaagagggccagaacgtcaccctgagctgcgagcagaacctgaaccacgacgccatgtactggtacagacaggacccaggccagggcctgagactgatctactactcttgggctcagggcgacttccagaagggcgatattgccgagggctacagcgtgtccagagagaagaaagagtcctttccactgaccgtgacaagcgcccagaagaaccctaccgccttctacctgtgtgccagctcttggggagccccttacgagcagtatttcggccctggcaccagactgacagttctcgaggacctgaagaacgtgttcccacctgaggtggccgtgttcgagcctagcgaggccgagatcagccacacccagaaagccaccctcgtgtgcctggctaccggcttctaccccgaccatgtggaactgtcttggtgggtcaacggcaaagaggtgcacagcggcgtgtctaccgacccccagccactgaaagaacagcccgccctgaacgacagccggtactgcctgagcagcagactgagagtgtccgccaccttctggcagaacccccggaaccacttcagatgccaggtgcagttctacggcctgagcgagaacgacgagtggacccaggacagagccaagcccgtgacccagatcgtgtctgccgaagcctggggcagagccgattgcggatcccagagcttcggcctgctggaccccaagctgtgctacctgctggatggcatcctgttcatctacggcgtgatcctgaccgccctgttcctgaggagtaagaggagcaggctcctgcacagtgactacatgaacatgactccacgccgccccggacccacccgcaagcattaccagccctatgccccaccacgcgacttcgcagcctatcgctccagagtgaagttcagcagaagcgccgacgcccctgcctaccagcagggacagaaccaactgtacaacgagctgaacctgggcagacgggaagagtacgacgtgctggacaagcggagaggcagggaccctgagatgggcggaaagccccagcggagaaagaacccccaggaaggactgtataacgaactccagaaagacaagatggccgaagcctacagcgagatcggcatgaagggcgagcggagaagaggcaagggccacgatggcctgtaccagggcctgagcaccgccaccaaggacacctatgacgccctgcacatgcaggccctgcctccaagaagggccaagcgatctggatctggagcaacaaacttctcactactcaaacaagcaggtgacgtggaggagaatcccgggcctactagtatggactggatttggcgcatccttttccttgtcggcgctgctaccggcgcgcattccttcgaacaacaaggcgaagaagatccccaggctctgagcatccaagagggcgagaatgccaccatgaactgctcctacaagaccagcatcaacaacctccagtggtacaggcagaacagcggcagaggactggtgcacctgatcctgatccggtccaacgagagagagaagcactccggcagactgagagtgaccctggacaccagcaagaagtccagcagcctgctgattaccgccagcagagccgccgatacagccagctacttttgtgccaccgacggcgatacccctctggtgtttggcaagggcacaagactgagcgtgatcgccaatacgcgtatccagaaccctgatcctgccgtgtaccagctgcgggatagcaagagcagcgacaagagcgtgtgtctgttcaccgacttcgacagccagaccaacgtgtcccagagcaaggactccgacgtgtacatcaccgataagaccgtgctggacatgcggagcatggacttcaagagcaactccgccgtggcctggtccaacaagtccgatttcgcctgcgccaacgccttcaacaacagcattatccccgaggacacattcttcccaagccccgagagcagctgcggtacccagagttttgggttgttggaccctaaattgtgctatctgttggacggaatcctgttcatttacggagtgatcctgaccgcattgttcctgaggagcaagcggtcacggctgctccacagcgattacatgaatatgacaccacgaagaccgggtcctactcgcaaacactaccaaccctacgcacctccccgcgactttgcagcgtaccgatctcgggttaagttttccagatccgcagacgcacccgcttaccaacaagggcagaaccaactctacaatgaacttaatttggggcggagggaagagtacgacgttctggacaaaaggaggggacgagatcccgagatgggcggaaagcctcagcgaaggaagaatccgcaagaggggctttataacgaactccagaaagataaaatggcagaagcctatagtgagattgggatgaagggagaaaggaggaggggtaaaggtcacgatgggttgtaccaaggattgagcacagccactaaagatacctatgatgcgctccacatgcaggccctgccgccaagataa

SEQ ID NO: 2334 - DNA, 2685 bp, synthetic construct
  source 1..2685: mol_type = other DNA
atggccttaccagtgaccgccttgctcctgccgctggccttgctgctccacgccgccaggccggaattcgatggcggcattacacagagccccaagtacctgttcagaaaagagggccagaacgtcaccctgagctgcgagcagaacctgaaccacgacgccatgtactggtacagacaggacccaggccagggcctgagactgatctactactcttgggctcagggcgacttccagaagggcgatattgccgagggctacagcgtgtccagagagaagaaagagtcctttccactgaccgtgacaagcgcccagaagaaccctaccgccttctacctgtgtgccagctcttggggagccccttacgagcagtatttcggccctggcaccagactgacagttctcgaggacctgaagaacgtgttcccacctgaggtggccgtgttcgagcctagcgaggccgagatcagccacacccagaaagccaccctcgtgtgcctggctaccggcttctaccccgaccatgtggaactgtcttggtgggtcaacggcaaagaggtgcacagcggcgtgtctaccgacccccagccactgaaagaacagcccgccctgaacgacagccggtactgcctgagcagcagactgagagtgtccgccaccttctggcagaacccccggaaccacttcagatgccaggtgcagttctacggcctgagcgagaacgacgagtggacccaggacagagccaagcccgtgacccagatcgtgtctgccgaagcctggggcagagccgattgcggatcccagagcttcggcctgctggaccccaagctgtgctacctgctggatggcatcctgttcatctacggcgtgatcctgaccgccctgttcctgaggagtaagaggagcaggctcctgcacagtgactacatgaacatgactccacgccgccccggacccacccgcaagcattaccagccctatgccccaccacgcgacttcgcagcctatcgctccagagtgaagttcagcagaagcgccgacgcccctgcctaccagcagggacagaaccaactgtacaacgagctgaacctgggcagacgggaagagtacgacgtgctggacaagcggagaggcagggaccctgagatgggcggaaagccccagcggagaaagaacccccaggaaggactgtataacgaactccagaaagacaagatggccgaagcctacagcgagatcggcatgaagggcgagcggagaagaggcaagggccacgatggcctgtaccagggcctgagcaccgccaccaaggacacctatgacgccctgcacatgcaggccctgcctccaagaagggccaagcgatctggatctggagcaacaaacttctcactactcaaacaagcaggtgacgtggaggagaatcccgggcctactagtatggactggatttggcgcatccttttccttgtcggcgctgctaccggcgcgcattccttcgaacaacaaggcgaagaagatccccaggctctgagcatccaagagggcgagaatgccaccatgaactgctcctacaagaccagcatcaacaacctccagtggtacaggcagaacagcggcagaggactggtgcacctgatcctgatccggtccaacgagagagagaagcactccggcagactgagagtgaccctggacaccagcaagaagtccagcagcctgctgattaccgccagcagagccgccgatacagccagctacttttgtgccaccgacggcgatacccctctggtgtttggcaagggcacaagactgagcgtgatcgccaatacgcgtatccagaaccctgatcctgccgtgtaccagctgcgggatagcaagagcagcgacaagagcgtgtgtctgttcaccgacttcgacagccagaccaacgtgtcccagagcaaggactccgacgtgtacatcaccgataagaccgtgctggacatgcggagcatggacttcaagagcaactccgccgtggcctggtccaacaagtccgatttcgcctgcgccaacgccttcaacaacagcattatccccgaggacacattcttcccaagccccgagagcagctgcggtacccagagttttgggttgttggaccctaaattgtgctatctgttggacggaatcctgttcatttacggagtgatcctgaccgcattgttcctgaagagaggccggaagaagctgctgtacatcttcaagcagcctttcatgcggcccgtgcagaccacccaggaagaggacggctgctcctgccggttccccgaggaagaagaaggcggctgcgagctgcgggttaagttttccagatccgcagacgcacccgcttaccaacaagggcagaaccaactctacaatgaacttaatttggggcggagggaagagtacgacgttctggacaaaaggaggggacgagatcccgagatgggcggaaagcctcagcgaaggaagaatccgcaagaggggctttataacgaactccagaaagataaaatggcagaagcctatagtgagattgggatgaagggagaaaggaggaggggtaaaggtcacgatgggttgtaccaaggattgagcacagccactaaagatacctatgatgcgctccacatgcaggccctgccgccaagataa

SEQ ID NO: 2335 - DNA, 2436 bp, synthetic construct
  source 1..2436: mol_type = other DNA
atggccttaccagtgaccgccttgctcctgccgctggccttgctgctccacgccgccaggccggaattcgatggcggcattacacagagccccaagtacctgttcagaaaagagggccagaacgtcaccctgagctgcgagcagaacctgaaccacgacgccatgtactggtacagacaggacccaggccagggcctgagactgatctactactcttgggctcagggcgacttccagaagggcgatattgccgagggctacagcgtgtccagagagaagaaagagtcctttccactgaccgtgacaagcgcccagaagaaccctaccgccttctacctgtgtgccagctcttggggagccccttacgagcagtatttcggccctggcaccagactgacagttctcgaggacctgaagaacgtgttcccacctgaggtggccgtgttcgagcctagcgaggccgagatcagccacacccagaaagccaccctcgtgtgcctggctaccggcttctaccccgaccatgtggaactgtcttggtgggtcaacggcaaagaggtgcacagcggcgtgtctaccgacccccagccactgaaagaacagcccgccctgaacgacagccggtactgcctgagcagcagactgagagtgtccgccaccttctggcagaacccccggaaccacttcagatgccaggtgcagttctacggcctgagcgagaacgacgagtggacccaggacagagccaagcccgtgacccagatcgtgtctgccgaagcctggggcagagccgattgcggatcccagagcttcggcctgctggaccccaagctgtgctacctgctggatggcatcctgttcatctacggcgtgatcctgaccgccctgttcctgagagtgaagttcagcagaagcgccgacgcccctgcctaccagcagggacagaaccaactgtacaacgagctgaacctgggcagacgggaagagtacgacgtgctggacaagcggagaggcagggaccctgagatgggcggaaagccccagcggagaaagaacccccaggaaggactgttcaacgaactccagaaagacaagatggccgaagccttcagcgagatcggcatgaagggcgagcggagaagaggcaagggccacgatggcctgttccagggcctgagcaccgccaccaaggacaccttcgacgccctgcacatgcaggccctgcctccaagaagggccaagcgatctggatctggagcaacaaacttctcactactcaaacaagcaggtgacgtggaggagaatcccgggcctactagtatggactggatttggcgcatccttttccttgtcggcgctgctaccggcgcgcattccttcgaacaacaaggcgaagaagatccccaggctctgagcatccaagagggcgagaatgccaccatgaactgctcctacaagaccagcatcaacaacctccagtggtacaggcagaacagcggcagaggactggtgcacctgatcctgatccggtccaacgagagagagaagcactccggcagactgagagtgaccctggacaccagcaagaagtccagcagcctgctgattaccgccagcagagccgccgatacagccagctacttttgtgccaccgacggcgatacccctctggtgtttggcaagggcacaagactgagcgtgatcgccaatacgcgtatccagaaccctgatcctgccgtgtaccagctgcgggatagcaagagcagcgacaagagcgtgtgtctgttcaccgacttcgacagccagaccaacgtgtcccagagcaaggactccgacgtgtacatcaccgataagaccgtgctggacatgcggagcatggacttcaagagcaactccgccgtggcctggtccaacaagtccgatttcgcctgcgccaacgccttcaacaacagcattatccccgaggacacattcttcccaagccccgagagcagctgcggtacccagagttttgggttgttggaccctaaattgtgctatctgttggacggaatcctgttcatttacggagtgatcctgaccgcattgttcctgcgggttaagttttccagatccgcagacgcacccgcttaccaacaagggcagaaccaactctacaatgaacttaatttggggcggagggaagagtacgacgttctggacaaaaggaggggacgagatcccgagatgggcggaaagcctcagcgaaggaagaatccgcaagaggggctttataacgaactccagaaagataaaatggcagaagcctatagtgagattgggatgaagggagaaaggaggaggggtaaaggtcacgatgggttgtaccaaggattgagcacagccactaaagatacctatgatgcgctccacatgcaggccctgccgccaagataa

SEQ ID NO: 2336 - DNA, 2436 bp, synthetic construct
  source 1..2436: mol_type = other DNA
atggccttaccagtgaccgccttgctcctgccgctggccttgctgctccacgccgccaggccggaattcgatggcggcattacacagagccccaagtacctgttcagaaaagagggccagaacgtcaccctgagctgcgagcagaacctgaaccacgacgccatgtactggtacagacaggacccaggccagggcctgagactgatctactactcttgggctcagggcgacttccagaagggcgatattgccgagggctacagcgtgtccagagagaagaaagagtcctttccactgaccgtgacaagcgcccagaagaaccctaccgccttctacctgtgtgccagctcttggggagccccttacgagcagtatttcggccctggcaccagactgacagttctcgaggacctgaagaacgtgttcccacctgaggtggccgtgttcgagcctagcgaggccgagatcagccacacccagaaagccaccctcgtgtgcctggctaccggcttctaccccgaccatgtggaactgtcttggtgggtcaacggcaaagaggtgcacagcggcgtgtctaccgacccccagccactgaaagaacagcccgccctgaacgacagccggtactgcctgagcagcagactgagagtgtccgccaccttctggcagaacccccggaaccacttcagatgccaggtgcagttctacggcctgagcgagaacgacgagtggacccaggacagagccaagcccgtgacccagatcgtgtctgccgaagcctggggcagagccgattgcggatcccagagcttcggcctgctggaccccaagctgtgctacctgctggatggcatcctgttcatctacggcgtgatcctgaccgccctgttcctgagagtgaagttcagcagaagcgccgacgcccctgcctaccagcagggacagaaccaactgtacaacgagctgaacctgggcagacgggaagagtacgacgtgctggacaagcggagaggcagggaccctgagatgggcggaaagccccagcggagaaagaacccccaggaaggactgttcaacgaactccagaaagacaagatggccgaagccttcagcgagatcggcatgaagggcgagcggagaagaggcaagggccacgatggcctgttccagggcctgagcaccgccaccaaggacaccttcgacgccctgcacatgcaggccctgcctccaagaagggccaagcgatctggatctggagcaacaaacttctcactactcaaacaagcaggtgacgtggaggagaatcccgggcctactagtatggactggatttggcgcatccttttccttgtcggcgctgctaccggcgcgcattccttcgaacaacaaggcgaagaagatccccaggctctgagcatccaagagggcgagaatgccaccatgaactgctcctacaagaccagcatcaacaacctccagtggtacaggcagaacagcggcagaggactggtgcacctgatcctgatccggtccaacgagagagagaagcactccggcagactgagagtgaccctggacaccagcaagaagtccagcagcctgctgattaccgccagcagagccgccgatacagccagctacttttgtgccaccgacggcgatacccctctggtgtttggcaagggcacaagactgagcgtgatcgccaatacgcgtatccagaaccctgatcctgccgtgtaccagctgcgggatagcaagagcagcgacaagagcgtgtgtctgttcaccgacttcgacagccagaccaacgtgtcccagagcaaggactccgacgtgtacatcaccgataagaccgtgctggacatgcggagcatggacttcaagagcaactccgccgtggcctggtccaacaagtccgatttcgcctgcgccaacgccttcaacaacagcattatccccgaggacacattcttcccaagccccgagagcagctgcggtacccagagcttcggcctgctggaccccaagctgtgctacctgctggatggcatcctgttcatctacggcgtgatcctgaccgccctgttcctgagagtgaagttcagcagaagcgccgacgcccctgcctaccagcagggacagaaccaactgtacaacgagctgaacctgggcagacgggaagagtacgacgtgctggacaagcggagaggcagggaccctgagatgggcggaaagccccagcggagaaagaacccccaggaaggactgtataacgaactccagaaagacaagatggccgaagcctacagcgagatcggcatgaagggcgagcggagaagaggcaagggccacgatggcctgtaccagggcctgagcaccgccaccaaggacacctatgacgccctgcacatgcaggccctgcctccaagataa

SEQ ID NO: 2337 - DNA, 2562 bp, synthetic construct
  source 1..2562: mol_type = other DNA
atggccttaccagtgaccgccttgctcctgccgctggccttgctgctccacgccgccaggccggaattcgatggcggcattacacagagccccaagtacctgttcagaaaagagggccagaacgtcaccctgagctgcgagcagaacctgaaccacgacgccatgtactggtacagacaggacccaggccagggcctgagactgatctactactcttgggctcagggcgacttccagaagggcgatattgccgagggctacagcgtgtccagagagaagaaagagtcctttccactgaccgtgacaagcgcccagaagaaccctaccgccttctacctgtgtgccagctcttggggagccccttacgagcagtatttcggccctggcaccagactgacagttctcgaggacctgaagaacgtgttcccacctgaggtggccgtgttcgagcctagcgaggccgagatcagccacacccagaaagccaccctcgtgtgcctggctaccggcttctaccccgaccatgtggaactgtcttggtgggtcaacggcaaagaggtgcacagcggcgtgtctaccgacccccagccactgaaagaacagcccgccctgaacgacagccggtactgcctgagcagcagactgagagtgtccgccaccttctggcagaacccccggaaccacttcagatgccaggtgcagttctacggcctgagcgagaacgacgagtggacccaggacagagccaagcccgtgacccagatcgtgtctgccgaagcctggggcagagccgattgcggatcccagagcttcggcctgctggaccccaagctgtgctacctgctggatggcatcctgttcatctacggcgtgatcctgaccgccctgttcctgagagtgaagttcagcagaagcgccgacgcccctgcctaccagcagggacagaaccaactgtacaacgagctgaacctgggcagacgggaagagtacgacgtgctggacaagcggagaggcagggaccctgagatgggcggaaagccccagcggagaaagaacccccaggaaggactgttcaacgaactccagaaagacaagatggccgaagccttcagcgagatcggcatgaagggcgagcggagaagaggcaagggccacgatggcctgttccagggcctgagcaccgccaccaaggacaccttcgacgccctgcacatgcaggccctgcctccaagaagggccaagcgatctggatctggagcaacaaacttctcactactcaaacaagcaggtgacgtggaggagaatcccgggcctactagtatggactggatttggcgcatccttttccttgtcggcgctgctaccggcgcgcattccttcgaacaacaaggcgaagaagatccccaggctctgagcatccaagagggcgagaatgccaccatgaactgctcctacaagaccagcatcaacaacctccagtggtacaggcagaacagcggcagaggactggtgcacctgatcctgatccggtccaacgagagagagaagcactccggcagactgagagtgaccctggacaccagcaagaagtccagcagcctgctgattaccgccagcagagccgccgatacagccagctacttttgtgccaccgacggcgatacccctctggtgtttggcaagggcacaagactgagcgtgatcgccaatacgcgtatccagaaccctgatcctgccgtgtaccagctgcgggatagcaagagcagcgacaagagcgtgtgtctgttcaccgacttcgacagccagaccaacgtgtcccagagcaaggactccgacgtgtacatcaccgataagaccgtgctggacatgcggagcatggacttcaagagcaactccgccgtggcctggtccaacaagtccgatttcgcctgcgccaacgccttcaacaacagcattatccccgaggacacattcttcccaagccccgagagcagctgcggtacccagagcttcggcctgctggaccccaagctgtgctacctgctggatggcatcctgttcatctacggcgtgatcctgaccgccctgttcctgaaacggggcagaaagaaactcctgtatatattcaaacaaccatttatgagaccagtacaaactactcaagaggaagatggctgtagctgccgatttccagaagaagaagaaggaggatgtgaactgagagtgaagttcagcagaagcgccgacgcccctgcctaccagcagggacagaaccaactgtacaacgagctgaacctgggcagacgggaagagtacgacgtgctggacaagcggagaggcagggaccctgagatgggcggaaagccccagcggagaaagaacccccaggaaggactgtataacgaactccagaaagacaagatggccgaagcctacagcgagatcggcatgaagggcgagcggagaagaggcaagggccacgatggcctgtaccagggcctgagcaccgccaccaaggacacctatgacgccctgcacatgcaggccctgcctccaagataa

SEQ ID NO: 2338 - DNA, 2559 bp, synthetic construct
  source 1..2559: mol_type = other DNA
atggccttaccagtgaccgccttgctcctgccgctggccttgctgctccacgccgccaggccggaattcgatggcggcattacacagagccccaagtacctgttcagaaaagagggccagaacgtcaccctgagctgcgagcagaacctgaaccacgacgccatgtactggtacagacaggacccaggccagggcctgagactgatctactactcttgggctcagggcgacttccagaagggcgatattgccgagggctacagcgtgtccagagagaagaaagagtcctttccactgaccgtgacaagcgcccagaagaaccctaccgccttctacctgtgtgccagctcttggggagccccttacgagcagtatttcggccctggcaccagactgacagttctcgaggacctgaagaacgtgttcccacctgaggtggccgtgttcgagcctagcgaggccgagatcagccacacccagaaagccaccctcgtgtgcctggctaccggcttctaccccgaccatgtggaactgtcttggtgggtcaacggcaaagaggtgcacagcggcgtgtctaccgacccccagccactgaaagaacagcccgccctgaacgacagccggtactgcctgagcagcagactgagagtgtccgccaccttctggcagaacccccggaaccacttcagatgccaggtgcagttctacggcctgagcgagaacgacgagtggacccaggacagagccaagcccgtgacccagatcgtgtctgccgaagcctggggcagagccgattgcggatcccagagcttcggcctgctggaccccaagctgtgctacctgctggatggcatcctgttcatctacggcgtgatcctgaccgccctgttcctgagagtgaagttcagcagaagcgccgacgcccctgcctaccagcagggacagaaccaactgtacaacgagctgaacctgggcagacgggaagagtacgacgtgctggacaagcggagaggcagggaccctgagatgggcggaaagccccagcggagaaagaacccccaggaaggactgttcaacgaactccagaaagacaagatggccgaagccttcagcgagatcggcatgaagggcgagcggagaagaggcaagggccacgatggcctgttccagggcctgagcaccgccaccaaggacaccttcgacgccctgcacatgcaggccctgcctccaagaagggccaagcgatctggatctggagcaacaaacttctcactactcaaacaagcaggtgacgtggaggagaatcccgggcctactagtatggactggatttggcgcatccttttccttgtcggcgctgctaccggcgcgcattccttcgaacaacaaggcgaagaagatccccaggctctgagcatccaagagggcgagaatgccaccatgaactgctcctacaagaccagcatcaacaacctccagtggtacaggcagaacagcggcagaggactggtgcacctgatcctgatccggtccaacgagagagagaagcactccggcagactgagagtgaccctggacaccagcaagaagtccagcagcctgctgattaccgccagcagagccgccgatacagccagctacttttgtgccaccgacggcgatacccctctggtgtttggcaagggcacaagactgagcgtgatcgccaatacgcgtatccagaaccctgatcctgccgtgtaccagctgcgggatagcaagagcagcgacaagagcgtgtgtctgttcaccgacttcgacagccagaccaacgtgtcccagagcaaggactccgacgtgtacatcaccgataagaccgtgctggacatgcggagcatggacttcaagagcaactccgccgtggcctggtccaacaagtccgatttcgcctgcgccaacgccttcaacaacagcattatccccgaggacacattcttcccaagccccgagagcagctgcggtacccagagcttcggcctgctggaccccaagctgtgctacctgctggatggcatcctgttcatctacggcgtgatcctgaccgccctgttcctgaggagtaagaggagcaggctcctgcacagtgactacatgaacatgactccacgccgccccggacccacccgcaagcattaccagccctatgccccaccacgcgacttcgcagcctatcgctccagagtgaagttcagcagaagcgccgacgcccctgcctaccagcagggacagaaccaactgtacaacgagctgaacctgggcagacgggaagagtacgacgtgctggacaagcggagaggcagggaccctgagatgggcggaaagccccagcggagaaagaacccccaggaaggactgtataacgaactccagaaagacaagatggccgaagcctacagcgagatcggcatgaagggcgagcggagaagaggcaagggccacgatggcctgtaccagggcctgagcaccgccaccaaggacacctatgacgccctgcacatgcaggccctgcctccaagataa

SEQ ID NO: 2339 - DNA, 2544 bp, synthetic construct
  source 1..2544: mol_type = other DNA
atggccttaccagtgaccgccttgctcctgccgctggccttgctgctccacgccgccaggccggaattcgatggcggcattacacagagccccaagtacctgttcagaaaagagggccagaacgtcaccctgagctgcgagcagaacctgaaccacgacgccatgtactggtacagacaggacccaggccagggcctgagactgatctactactcttgggctcagggcgacttccagaagggcgatattgccgagggctacagcgtgtccagagagaagaaagagtcctttccactgaccgtgacaagcgcccagaagaaccctaccgccttctacctgtgtgccagctcttggggagccccttacgagcagtatttcggccctggcaccagactgacagttctcgaggacctgaagaacgtgttcccacctgaggtggccgtgttcgagcctagcgaggccgagatcagccacacccagaaagccaccctcgtgtgcctggctaccggcttctaccccgaccatgtggaactgtcttggtgggtcaacggcaaagaggtgcacagcggcgtgtctaccgacccccagccactgaaagaacagcccgccctgaacgacagccggtactgcctgagcagcagactgagagtgtccgccaccttctggcagaacccccggaaccacttcagatgccaggtgcagttctacggcctgagcgagaacgacgagtggacccaggacagagccaagcccgtgacccagatcgtgtctgccgaagcctggggcagagccgattgcggatcccagagcttcggcctgctggaccccaagctgtgctacctgctggatggcatcctgttcatctacggcgtgatcctgaccgccctgttcctgagagtgaagttcagcagaagcgccgacgcccctgcctaccagcagggacagaaccaactgtacaacgagctgaacctgggcagacgggaagagtacgacgtgctggacaagcggagaggcagggaccctgagatgggcggaaagccccagcggagaaagaacccccaggaaggactgttcaacgaactccagaaagacaagatggccgaagccttcagcgagatcggcatgaagggcgagcggagaagaggcaagggccacgatggcctgttccagggcctgagcaccgccaccaaggacaccttcgacgccctgcacatgcaggccctgcctccaagaagggccaagcgatctggatctggagcaacaaacttctcactactcaaacaagcaggtgacgtggaggagaatcccgggcctactagtatggactggatttggcgcatccttttccttgtcggcgctgctaccggcgcgcattccttcgaacaacaaggcgaagaagatccccaggctctgagcatccaagagggcgagaatgccaccatgaactgctcctacaagaccagcatcaacaacctccagtggtacaggcagaacagcggcagaggactggtgcacctgatcctgatccggtccaacgagagagagaagcactccggcagactgagagtgaccctggacaccagcaagaagtccagcagcctgctgattaccgccagcagagccgccgatacagccagctacttttgtgccaccgacggcgatacccctctggtgtttggcaagggcacaagactgagcgtgatcgccaatacgcgtatccagaaccctgatcctgccgtgtaccagctgcgggatagcaagagcagcgacaagagcgtgtgtctgttcaccgacttcgacagccagaccaacgtgtcccagagcaaggactccgacgtgtacatcaccgataagaccgtgctggacatgcggagcatggacttcaagagcaactccgccgtggcctggtccaacaagtccgatttcgcctgcgccaacgccttcaacaacagcattatccccgaggacacattcttcccaagccccgagagcagctgcggtacccagagcttcggcctgctggaccccaagctgtgctacctgctggatggcatcctgttcatctacggcgtgatcctgaccgccctgttcctgagggaccaaagactgcctcctgacgctcacaaacctccaggcggaggcagcttcagaacccctatccaagaggaacaggctgacgcccacagcaccctggcaaaaattagagtgaagttcagcagaagcgccgacgcccctgcctaccagcagggacagaaccaactgtacaacgagctgaacctgggcagacgggaagagtacgacgtgctggacaagcggagaggcagggaccctgagatgggcggaaagccccagcggagaaagaacccccaggaaggactgtataacgaactccagaaagacaagatggccgaagcctacagcgagatcggcatgaagggcgagcggagaagaggcaagggccacgatggcctgtaccagggcctgagcaccgccaccaaggacacctatgacgccctgcacatgcaggccctgcctccaagataa

SEQ ID NO: 2340 - DNA, 2796 bp, synthetic construct
  source 1..2796: mol_type = other DNA
atggccttaccagtgaccgccttgctcctgccgctggccttgctgctccacgccgccaggccggaattcgatggcggcattacacagagccccaagtacctgttcagaaaagagggccagaacgtcaccctgagctgcgagcagaacctgaaccacgacgccatgtactggtacagacaggacccaggccagggcctgagactgatctactactcttgggctcagggcgacttccagaagggcgatattgccgagggctacagcgtgtccagagagaagaaagagtcctttccactgaccgtgacaagcgcccagaagaaccctaccgccttctacctgtgtgccagctcttggggagccccttacgagcagtatttcggccctggcaccagactgacagttctcgaggacctgaagaacgtgttcccacctgaggtggccgtgttcgagcctagcgaggccgagatcagccacacccagaaagccaccctcgtgtgcctggctaccggcttctaccccgaccatgtggaactgtcttggtgggtcaacggcaaagaggtgcacagcggcgtgtctaccgacccccagccactgaaagaacagcccgccctgaacgacagccggtactgcctgagcagcagactgagagtgtccgccaccttctggcagaacccccggaaccacttcagatgccaggtgcagttctacggcctgagcgagaacgacgagtggacccaggacagagccaagcccgtgacccagatcgtgtctgccgaagcctggggcagagccgattgcggatcccagagcttcggcctgctggaccccaagctgtgctacctgctggatggcatcctgttcatctacggcgtgatcctgaccgccctgttcctgagagtgaagttcagcagaagcgccgacgcccctgcctaccagcagggacagaaccaactgtacaacgagctgaacctgggcagacgggaagagtacgacgtgctggacaagcggagaggcagggaccctgagatgggcggaaagccccagcggagaaagaacccccaggaaggactgttcaacgaactccagaaagacaagatggccgaagccttcagcgagatcggcatgaagggcgagcggagaagaggcaagggccacgatggcctgttccagggcctgagcaccgccaccaaggacaccttcgacgccctgcacatgcaggccctgcctccaagaagggccaagcgatctggatctggagcaacaaacttctcactactcaaacaagcaggtgacgtggaggagaatcccgggcctactagtatggactggatttggcgcatccttttccttgtcggcgctgctaccggcgcgcattccttcgaacaacaaggcgaagaagatccccaggctctgagcatccaagagggcgagaatgccaccatgaactgctcctacaagaccagcatcaacaacctccagtggtacaggcagaacagcggcagaggactggtgcacctgatcctgatccggtccaacgagagagagaagcactccggcagactgagagtgaccctggacaccagcaagaagtccagcagcctgctgattaccgccagcagagccgccgatacagccagctacttttgtgccaccgacggcgatacccctctggtgtttggcaagggcacaagactgagcgtgatcgccaatacgcgtatccagaaccctgatcctgccgtgtaccagctgcgggatagcaagagcagcgacaagagcgtgtgtctgttcaccgacttcgacagccagaccaacgtgtcccagagcaaggactccgacgtgtacatcaccgataagaccgtgctggacatgcggagcatggacttcaagagcaactccgccgtggcctggtccaacaagtccgatttcgcctgcgccaacgccttcaacaacagcattatccccgaggacacattcttcccaagccccgagagcagctgcggtacccagagcttcggcctgctggaccccaagctgtgctacctgctggatggcatcctgttcatctacggcgtgatcctgaccgccctgttcctgtggcggcggaagcggaaagagaagcagtctgagacaagccccaaagagttcctgaccatctacgaggacgtgaaggacctgaaaacccggcggaaccacgaacaagagcagacctttcctggcggaggcagcaccatctacagcatgatccagagccagagcagcgcccctacaagccaagagcctgcctacacactgtactccctgatccagcctagcagaaagagcggcagccggaagagaaatcacagccccagcttcaacagcacgatctacgaagtgatcggcaagagccagccaaaggctcagaaccctgccagactgagccggaaagagctggaaaacttcgacgtgtacagcagagtgaagttcagcagaagcgccgacgcccctgcctaccagcagggacagaaccaactgtacaacgagctgaacctgggcagacgggaagagtacgacgtgctggacaagcggagaggcagggaccctgagatgggcggaaagccccagcggagaaagaacccccaggaaggactgtataacgaactccagaaagacaagatggccgaagcctacagcgagatcggcatgaagggcgagcggagaagaggcaagggccacgatggcctgtaccagggcctgagcaccgccaccaaggacacctatgacgccctgcacatgcaggccctgcctccaagataa

SEQ ID NO: 2341 - DNA, 2559 bp, synthetic construct
  source 1..2559: mol_type = other DNA
atggccttaccagtgaccgccttgctcctgccgctggccttgctgctccacgccgccaggccggaattcgatggcggcattacacagagccccaagtacctgttcagaaaagagggccagaacgtcaccctgagctgcgagcagaacctgaaccacgacgccatgtactggtacagacaggacccaggccagggcctgagactgatctactactcttgggctcagggcgacttccagaagggcgatattgccgagggctacagcgtgtccagagagaagaaagagtcctttccactgaccgtgacaagcgcccagaagaaccctaccgccttctacctgtgtgccagctcttggggagccccttacgagcagtatttcggccctggcaccagactgacagttctcgaggacctgaagaacgtgttcccacctgaggtggccgtgttcgagcctagcgaggccgagatcagccacacccagaaagccaccctcgtgtgcctggctaccggcttctaccccgaccatgtggaactgtcttggtgggtcaacggcaaagaggtgcacagcggcgtgtctaccgacccccagccactgaaagaacagcccgccctgaacgacagccggtactgcctgagcagcagactgagagtgtccgccaccttctggcagaacccccggaaccacttcagatgccaggtgcagttctacggcctgagcgagaacgacgagtggacccaggacagagccaagcccgtgacccagatcgtgtctgccgaagcctggggcagagccgattgcggatcccagagcttcggcctgctggaccccaagctgtgctacctgctggatggcatcctgttcatctacggcgtgatcctgaccgccctgttcctgagagtgaagttcagcagaagcgccgacgcccctgcctaccagcagggacagaaccaactgtacaacgagctgaacctgggcagacgggaagagtacgacgtgctggacaagcggagaggcagggaccctgagatgggcggaaagccccagcggagaaagaacccccaggaaggactgttcaacgaactccagaaagacaagatggccgaagccttcagcgagatcggcatgaagggcgagcggagaagaggcaagggccacgatggcctgttccagggcctgagcaccgccaccaaggacaccttcgacgccctgcacatgcaggccctgcctccaagaagggccaagcgatctggatctggagcaacaaacttctcactactcaaacaagcaggtgacgtggaggagaatcccgggcctactagtatggactggatttggcgcatccttttccttgtcggcgctgctaccggcgcgcattccttcgaacaacaaggcgaagaagatccccaggctctgagcatccaagagggcgagaatgccaccatgaactgctcctacaagaccagcatcaacaacctccagtggtacaggcagaacagcggcagaggactggtgcacctgatcctgatccggtccaacgagagagagaagcactccggcagactgagagtgaccctggacaccagcaagaagtccagcagcctgctgattaccgccagcagagccgccgatacagccagctacttttgtgccaccgacggcgatacccctctggtgtttggcaagggcacaagactgagcgtgatcgccaatacgcgtatccagaaccctgatcctgccgtgtaccagctgcgggatagcaagagcagcgacaagagcgtgtgtctgttcaccgacttcgacagccagaccaacgtgtcccagagcaaggactccgacgtgtacatcaccgataagaccgtgctggacatgcggagcatggacttcaagagcaactccgccgtggcctggtccaacaagtccgatttcgcctgcgccaacgccttcaacaacagcattatccccgaggacacattcttcccaagccccgagagcagctgcggtacccagagttttgggttgttggaccctaaattgtgctatctgttggacggaatcctgttcatttacggagtgatcctgaccgcattgttcctgaggagcaagcggtcacggctgctccacagcgattacatgaatatgacaccacgaagaccgggtcctactcgcaaacactaccaaccctacgcacctccccgcgactttgcagcgtaccgatctcgggttaagttttccagatccgcagacgcacccgcttaccaacaagggcagaaccaactctacaatgaacttaatttggggcggagggaagagtacgacgttctggacaaaaggaggggacgagatcccgagatgggcggaaagcctcagcgaaggaagaatccgcaagaggggctttataacgaactccagaaagataaaatggcagaagcctatagtgagattgggatgaagggagaaaggaggaggggtaaaggtcacgatgggttgtaccaaggattgagcacagccactaaagatacctatgatgcgctccacatgcaggccctgccgccaagataa

SEQ ID NO: 2342 - DNA, 2562 bp, synthetic construct
  source 1..2562: mol_type = other DNA
atggccttaccagtgaccgccttgctcctgccgctggccttgctgctccacgccgccaggccggaattcgatggcggcattacacagagccccaagtacctgttcagaaaagagggccagaacgtcaccctgagctgcgagcagaacctgaaccacgacgccatgtactggtacagacaggacccaggccagggcctgagactgatctactactcttgggctcagggcgacttccagaagggcgatattgccgagggctacagcgtgtccagagagaagaaagagtcctttccactgaccgtgacaagcgcccagaagaaccctaccgccttctacctgtgtgccagctcttggggagccccttacgagcagtatttcggccctggcaccagactgacagttctcgaggacctgaagaacgtgttcccacctgaggtggccgtgttcgagcctagcgaggccgagatcagccacacccagaaagccaccctcgtgtgcctggctaccggcttctaccccgaccatgtggaactgtcttggtgggtcaacggcaaagaggtgcacagcggcgtgtctaccgacccccagccactgaaagaacagcccgccctgaacgacagccggtactgcctgagcagcagactgagagtgtccgccaccttctggcagaacccccggaaccacttcagatgccaggtgcagttctacggcctgagcgagaacgacgagtggacccaggacagagccaagcccgtgacccagatcgtgtctgccgaagcctggggcagagccgattgcggatcccagagcttcggcctgctggaccccaagctgtgctacctgctggatggcatcctgttcatctacggcgtgatcctgaccgccctgttcctgagagtgaagttcagcagaagcgccgacgcccctgcctaccagcagggacagaaccaactgtacaacgagctgaacctgggcagacgggaagagtacgacgtgctggacaagcggagaggcagggaccctgagatgggcggaaagccccagcggagaaagaacccccaggaaggactgttcaacgaactccagaaagacaagatggccgaagccttcagcgagatcggcatgaagggcgagcggagaagaggcaagggccacgatggcctgttccagggcctgagcaccgccaccaaggacaccttcgacgccctgcacatgcaggccctgcctccaagaagggccaagcgatctggatctggagcaacaaacttctcactactcaaacaagcaggtgacgtggaggagaatcccgggcctactagtatggactggatttggcgcatccttttccttgtcggcgctgctaccggcgcgcattccttcgaacaacaaggcgaagaagatccccaggctctgagcatccaagagggcgagaatgccaccatgaactgctcctacaagaccagcatcaacaacctccagtggtacaggcagaacagcggcagaggactggtgcacctgatcctgatccggtccaacgagagagagaagcactccggcagactgagagtgaccctggacaccagcaagaagtccagcagcctgctgattaccgccagcagagccgccgatacagccagctacttttgtgccaccgacggcgatacccctctggtgtttggcaagggcacaagactgagcgtgatcgccaatacgcgtatccagaaccctgatcctgccgtgtaccagctgcgggatagcaagagcagcgacaagagcgtgtgtctgttcaccgacttcgacagccagaccaacgtgtcccagagcaaggactccgacgtgtacatcaccgataagaccgtgctggacatgcggagcatggacttcaagagcaactccgccgtggcctggtccaacaagtccgatttcgcctgcgccaacgccttcaacaacagcattatccccgaggacacattcttcccaagccccgagagcagctgcggtacccagagttttgggttgttggaccctaaattgtgctatctgttggacggaatcctgttcatttacggagtgatcctgaccgcattgttcctgaagagaggccggaagaagctgctgtacatcttcaagcagcctttcatgcggcccgtgcagaccacccaggaagaggacggctgctcctgccggttccccgaggaagaagaaggcggctgcgagctgcgggttaagttttccagatccgcagacgcacccgcttaccaacaagggcagaaccaactctacaatgaacttaatttggggcggagggaagagtacgacgttctggacaaaaggaggggacgagatcccgagatgggcggaaagcctcagcgaaggaagaatccgcaagaggggctttataacgaactccagaaagataaaatggcagaagcctatagtgagattgggatgaagggagaaaggaggaggggtaaaggtcacgatgggttgtaccaaggattgagcacagccactaaagatacctatgatgcgctccacatgcaggccctgccgccaagataa

SEQ ID NO: 2343 - DNA, 2436 bp, synthetic construct
  source 1..2436: mol_type = other DNA
atggccttaccagtgaccgccttgctcctgccgctggccttgctgctccacgccgccaggccggaattcgatggcggcattacacagagccccaagtacctgttcagaaaagagggccagaacgtcaccctgagctgcgagcagaacctgaaccacgacgccatgtactggtacagacaggacccaggccagggcctgagactgatctactactcttgggctcagggcgacttccagaagggcgatattgccgagggctacagcgtgtccagagagaagaaagagtcctttccactgaccgtgacaagcgcccagaagaaccctaccgccttctacctgtgtgccagctcttggggagccccttacgagcagtatttcggccctggcaccagactgacagttctcgaggacctgaagaacgtgttcccacctgaggtggccgtgttcgagcctagcgaggccgagatcagccacacccagaaagccaccctcgtgtgcctggctaccggcttctaccccgaccatgtggaactgtcttggtgggtcaacggcaaagaggtgcacagcggcgtgtctaccgacccccagccactgaaagaacagcccgccctgaacgacagccggtactgcctgagcagcagactgagagtgtccgccaccttctggcagaacccccggaaccacttcagatgccaggtgcagttctacggcctgagcgagaacgacgagtggacccaggacagagccaagcccgtgacccagatcgtgtctgccgaagcctggggcagagccgattgcggatcccagagcttcggcctgctggaccccaagctgtgctacctgctggatggcatcctgttcatctacggcgtgatcctgaccgccctgttcctgagagtgaagttcagcagaagcgccgacgcccctgcctaccagcagggacagaaccaactgtacaacgagctgaacctgggcagacgggaagagtacgacgtgctggacaagcggagaggcagggaccctgagatgggcggaaagccccagcggagaaagaacccccaggaaggactgttcaacgaactccagaaagacaagatggccgaagccttcagcgagatcggcatgaagggcgagcggagaagaggcaagggccacgatggcctgttccagggcctgagcaccgccaccaaggacaccttcgacgccctgcacatgcaggccctgcctccaagaagggccaagcgatctggatctggagcaacaaacttctcactactcaaacaagcaggtgacgtggaggagaatcccgggcctactagtatggactggatttggcgcatccttttccttgtcggcgctgctaccggcgcgcattccttcgaacaacaaggcgaagaagatccccaggctctgagcatccaagagggcgagaatgccaccatgaactgctcctacaagaccagcatcaacaacctccagtggtacaggcagaacagcggcagaggactggtgcacctgatcctgatccggtccaacgagagagagaagcactccggcagactgagagtgaccctggacaccagcaagaagtccagcagcctgctgattaccgccagcagagccgccgatacagccagctacttttgtgccaccgacggcgatacccctctggtgtttggcaagggcacaagactgagcgtgatcgccaatacgcgtatccagaaccctgatcctgccgtgtaccagctgcgggatagcaagagcagcgacaagagcgtgtgtctgttcaccgacttcgacagccagaccaacgtgtcccagagcaaggactccgacgtgtacatcaccgataagaccgtgctggacatgcggagcatggacttcaagagcaactccgccgtggcctggtccaacaagtccgatttcgcctgcgccaacgccttcaacaacagcattatccccgaggacacattcttcccaagccccgagagcagctgcggtacccagagcttcggcctgctggaccccaagctgagctacctgctggatggcatcctgttcatctacggcgtgatcctgaccgccctgttcctgagagtgaagttcagcagaagcgccgacgcccctgcctaccagcagggacagaaccaactgtacaacgagctgaacctgggcagacgggaagagtacgacgtgctggacaagcggagaggcagggaccctgagatgggcggaaagccccagcggagaaagaacccccaggaaggactgtataacgaactccagaaagacaagatggccgaagcctacagcgagatcggcatgaagggcgagcggagaagaggcaagggccacgatggcctgtaccagggcctgagcaccgccaccaaggacacctatgacgccctgcacatgcaggccctgcctccaagataa

SEQ ID NO: 2344 - DNA, 2436 bp, synthetic construct
  source 1..2436: mol_type = other DNA
atggccttaccagtgaccgccttgctcctgccgctggccttgctgctccacgccgccaggccggaattcgatggcggcattacacagagccccaagtacctgttcagaaaagagggccagaacgtcaccctgagctgcgagcagaacctgaaccacgacgccatgtactggtacagacaggacccaggccagggcctgagactgatctactactcttgggctcagggcgacttccagaagggcgatattgccgagggctacagcgtgtccagagagaagaaagagtcctttccactgaccgtgacaagcgcccagaagaaccctaccgccttctacctgtgtgccagctcttggggagccccttacgagcagtatttcggccctggcaccagactgacagttctcgaggacctgaagaacgtgttcccacctgaggtggccgtgttcgagcctagcgaggccgagatcagccacacccagaaagccaccctcgtgtgcctggctaccggcttctaccccgaccatgtggaactgtcttggtgggtcaacggcaaagaggtgcacagcggcgtgtctaccgacccccagccactgaaagaacagcccgccctgaacgacagccggtactgcctgagcagcagactgagagtgtccgccaccttctggcagaacccccggaaccacttcagatgccaggtgcagttctacggcctgagcgagaacgacgagtggacccaggacagagccaagcccgtgacccagatcgtgtctgccgaagcctggggcagagccgattgcggatcccagagcttcggcctgctggaccccaagctgtgctacctgctggatggcatcctgttcatctacggcgtgatcctgaccgccctgttcctgagagtgaagttcagcagaagcgccgacgcccctgcctaccagcagggacagaaccaactgtacaacgagctgaacctgggcagacgggaagagtacgacgtgctggacaagcggagaggcagggaccctgagatgggcggaaagccccagcggagaaagaacccccaggaaggactgttcaacgaactccagaaagacaagatggccgaagccttcagcgagatcggcatgaagggcgagcggagaagaggcaagggccacgatggcctgttccagggcctgagcaccgccaccaaggacaccttcgacgccctgcacatgcaggccctgcctccaagaagggccaagcgatctggatctggagcaacaaacttctcactactcaaacaagcaggtgacgtggaggagaatcccgggcctactagtatggactggatttggcgcatccttttccttgtcggcgctgctaccggcgcgcattccttcgaacaacaaggcgaagaagatccccaggctctgagcatccaagagggcgagaatgccaccatgaactgctcctacaagaccagcatcaacaacctccagtggtacaggcagaacagcggcagaggactggtgcacctgatcctgatccggtccaacgagagagagaagcactccggcagactgagagtgaccctggacaccagcaagaagtccagcagcctgctgattaccgccagcagagccgccgatacagccagctacttttgtgccaccgacggcgatacccctctggtgtttggcaagggcacaagactgagcgtgatcgccaatacgcgtatccagaaccctgatcctgccgtgtaccagctgcgggatagcaagagcagcgacaagagcgtgtgtctgttcaccgacttcgacagccagaccaacgtgtcccagagcaaggactccgacgtgtacatcaccgataagaccgtgctggacatgcggagcatggacttcaagagcaactccgccgtggcctggtccaacaagtccgatttcgcctgcgccaacgccttcaacaacagcattatccccgaggacacattcttcccaagccccgagagcagctgcggtacccagagttttgggttgttggaccctaaattgagctatctgttggacggaatcctgttcatttacggagtgatcctgaccgcattgttcctgcgggttaagttttccagatccgcagacgcacccgcttaccaacaagggcagaaccaactctacaatgaacttaatttggggcggagggaagagtacgacgttctggacaaaaggaggggacgagatcccgagatgggcggaaagcctcagcgaaggaagaatccgcaagaggggctttataacgaactccagaaagataaaatggcagaagcctatagtgagattgggatgaagggagaaaggaggaggggtaaaggtcacgatgggttgtaccaaggattgagcacagccactaaagatacctatgatgcgctccacatgcaggccctgccgccaagataa

SEQ ID NO: 2345 - DNA, 2436 bp, synthetic construct
  source 1..2436: mol_type = other DNA
atggccttaccagtgaccgccttgctcctgccgctggccttgctgctccacgccgccaggccggaattcgatggcggcattacacagagccccaagtacctgttcagaaaagagggccagaacgtcaccctgagctgcgagcagaacctgaaccacgacgccatgtactggtacagacaggacccaggccagggcctgagactgatctactactcttgggctcagggcgacttccagaagggcgatattgccgagggctacagcgtgtccagagagaagaaagagtcctttccactgaccgtgacaagcgcccagaagaaccctaccgccttctacctgtgtgccagctcttggggagccccttacgagcagtatttcggccctggcaccagactgacagttctcgaggacctgaagaacgtgttcccacctgaggtggccgtgttcgagcctagcgaggccgagatcagccacacccagaaagccaccctcgtgtgcctggctaccggcttctaccccgaccatgtggaactgtcttggtgggtcaacggcaaagaggtgcacagcggcgtgtctaccgacccccagccactgaaagaacagcccgccctgaacgacagccggtactgcctgagcagcagactgagagtgtccgccaccttctggcagaacccccggaaccacttcagatgccaggtgcagttctacggcctgagcgagaacgacgagtggacccaggacagagccaagcccgtgacccagatcgtgtctgccgaagcctggggcagagccgattgcggatcccagagcttcggcctgctggaccccaagctgagctacctgctggatggcatcctgttcatctacggcgtgatcctgaccgccctgttcctgagagtgaagttcagcagaagcgccgacgcccctgcctaccagcagggacagaaccaactgtacaacgagctgaacctgggcagacgggaagagtacgacgtgctggacaagcggagaggcagggaccctgagatgggcggaaagccccagcggagaaagaacccccaggaaggactgtataacgaactccagaaagacaagatggccgaagcctacagcgagatcggcatgaagggcgagcggagaagaggcaagggccacgatggcctgtaccagggcctgagcaccgccaccaaggacacctatgacgccctgcacatgcaggccctgcctccaagaagggccaagcgatctggatctggagcaacaaacttctcactactcaaacaagcaggtgacgtggaggagaatcccgggcctactagtatggactggatttggcgcatccttttccttgtcggcgctgctaccggcgcgcattccttcgaacaacaaggcgaagaagatccccaggctctgagcatccaagagggcgagaatgccaccatgaactgctcctacaagaccagcatcaacaacctccagtggtacaggcagaacagcggcagaggactggtgcacctgatcctgatccggtccaacgagagagagaagcactccggcagactgagagtgaccctggacaccagcaagaagtccagcagcctgctgattaccgccagcagagccgccgatacagccagctacttttgtgccaccgacggcgatacccctctggtgtttggcaagggcacaagactgagcgtgatcgccaatacgcgtatccagaaccctgatcctgccgtgtaccagctgcgggatagcaagagcagcgacaagagcgtgtgtctgttcaccgacttcgacagccagaccaacgtgtcccagagcaaggactccgacgtgtacatcaccgataagaccgtgctggacatgcggagcatggacttcaagagcaactccgccgtggcctggtccaacaagtccgatttcgcctgcgccaacgccttcaacaacagcattatccccgaggacacattcttcccaagccccgagagcagctgcggtacccagagttttgggttgttggaccctaaattgagctatctgttggacggaatcctgttcatttacggagtgatcctgaccgcattgttcctgcgggttaagttttccagatccgcagacgcacccgcttaccaacaagggcagaaccaactctacaatgaacttaatttggggcggagggaagagtacgacgttctggacaaaaggaggggacgagatcccgagatgggcggaaagcctcagcgaaggaagaatccgcaagaggggctttataacgaactccagaaagataaaatggcagaagcctatagtgagattgggatgaagggagaaaggaggaggggtaaaggtcacgatgggttgtaccaaggattgagcacagccactaaagatacctatgatgcgctccacatgcaggccctgccgccaagataa

SEQ ID NO: 2346 - DNA, 2148 bp, synthetic construct
  source 1..2148: mol_type = other DNA
atggccttaccagtgaccgccttgctcctgccgctggccttgctgctccacgccgccaggccggaattcgatggcggcattacacagagccccaagtacctgttcagaaaagagggccagaacgtcaccctgagctgcgagcagaacctgaaccacgacgccatgtactggtacagacaggacccaggccagggcctgagactgatctactactcttgggctcagggcgacttccagaagggcgatattgccgagggctacagcgtgtccagagagaagaaagagtcctttccactgaccgtgacaagcgcccagaagaaccctaccgccttctacctgtgtgccagctcttggggagccccttacgagcagtatttcggccctggcaccagactgacagttctcgaggacctgaagaacgtgttcccacctgaggtggccgtgttcgagcctagcgaggccgagatcagccacacccagaaagccaccctcgtgtgcctggctaccggcttctaccccgaccatgtggaactgtcttggtgggtcaacggcaaagaggtgcacagcggcgtgtctaccgacccccagccactgaaagaacagcccgccctgaacgacagccggtactgcctgagcagcagactgagagtgtccgccaccttctggcagaacccccggaaccacttcagatgccaggtgcagttctacggcctgagcgagaacgacgagtggacccaggacagagccaagcccgtgacccagatcgtgtctgccgaagcctggggcagagccgattgcggatccacaacacctggcgagagaagtagcctgcctgccttctatcctggcaccagcggctcttgttctggctgtggatctctgagcctgcctctgctggctggactggttgctgctgatgctgtggcctctctgctgattgtgggagccgtgttcctgtgcgccagacctagaagaagccccgctcaagaggacggcaaggtgtacatcaacatgcccggcagaggaagggccaagcgatctggatctggagcaacaaacttctcactactcaaacaagcaggtgacgtggaggagaatcccgggcctactagtatggactggatttggcgcatccttttccttgtcggcgctgctaccggcgcgcattccttcgaacaacaaggcgaagaagatccccaggctctgagcatccaagagggcgagaatgccaccatgaactgctcctacaagaccagcatcaacaacctccagtggtacaggcagaacagcggcagaggactggtgcacctgatcctgatccggtccaacgagagagagaagcactccggcagactgagagtgaccctggacaccagcaagaagtccagcagcctgctgattaccgccagcagagccgccgatacagccagctacttttgtgccaccgacggcgatacccctctggtgtttggcaagggcacaagactgagcgtgatcgccaatacgcgtatccagaaccctgatcctgccgtgtaccagctgcgggatagcaagagcagcgacaagagcgtgtgtctgttcaccgacttcgacagccagaccaacgtgtcccagagcaaggactccgacgtgtacatcaccgataagaccgtgctggacatgcggagcatggacttcaagagcaactccgccgtggcctggtccaacaagtccgatttcgcctgcgccaacgccttcaacaacagcattatccccgaggacacattcttcccaagccccgagagcagctgcggtaccacaacacctggcgagagaagtagcctgcctgccttctatcctggcaccagcggctcttgttctggctgtggatctctgagcctgcctctgctggctggactggttgctgctgatgctgtggcctctctgctgattgtgggagccgtgttcaaacggggcagaaagaaactcctgtatatattcaaacaaccatttatgagaccagtacaaactactcaagaggaagatggctgtagctgccgatttccagaagaagaagaaggaggatgtgaactgctgtgcgccagacctagaagaagccccgctcaagaggacggcaaggtgtacatcaacatgcccggcagaggataa

SEQ ID NO: 2347 - DNA, 2145 bp, synthetic construct
  source 1..2145: mol_type = other DNA
atggccttaccagtgaccgccttgctcctgccgctggccttgctgctccacgccgccaggccggaattcgatggcggcattacacagagccccaagtacctgttcagaaaagagggccagaacgtcaccctgagctgcgagcagaacctgaaccacgacgccatgtactggtacagacaggacccaggccagggcctgagactgatctactactcttgggctcagggcgacttccagaagggcgatattgccgagggctacagcgtgtccagagagaagaaagagtcctttccactgaccgtgacaagcgcccagaagaaccctaccgccttctacctgtgtgccagctcttggggagccccttacgagcagtatttcggccctggcaccagactgacagttctcgaggacctgaagaacgtgttcccacctgaggtggccgtgttcgagcctagcgaggccgagatcagccacacccagaaagccaccctcgtgtgcctggctaccggcttctaccccgaccatgtggaactgtcttggtgggtcaacggcaaagaggtgcacagcggcgtgtctaccgacccccagccactgaaagaacagcccgccctgaacgacagccggtactgcctgagcagcagactgagagtgtccgccaccttctggcagaacccccggaaccacttcagatgccaggtgcagttctacggcctgagcgagaacgacgagtggacccaggacagagccaagcccgtgacccagatcgtgtctgccgaagcctggggcagagccgattgcggatccacaacacctggcgagagaagtagcctgcctgccttctatcctggcaccagcggctcttgttctggctgtggatctctgagcctgcctctgctggctggactggttgctgctgatgctgtggcctctctgctgattgtgggagccgtgttcctgtgcgccagacctagaagaagccccgctcaagaggacggcaaggtgtacatcaacatgcccggcagaggaagggccaagcgatctggatctggagcaacaaacttctcactactcaaacaagcaggtgacgtggaggagaatcccgggcctactagtatggactggatttggcgcatccttttccttgtcggcgctgctaccggcgcgcattccttcgaacaacaaggcgaagaagatccccaggctctgagcatccaagagggcgagaatgccaccatgaactgctcctacaagaccagcatcaacaacctccagtggtacaggcagaacagcggcagaggactggtgcacctgatcctgatccggtccaacgagagagagaagcactccggcagactgagagtgaccctggacaccagcaagaagtccagcagcctgctgattaccgccagcagagccgccgatacagccagctacttttgtgccaccgacggcgatacccctctggtgtttggcaagggcacaagactgagcgtgatcgccaatacgcgtatccagaaccctgatcctgccgtgtaccagctgcgggatagcaagagcagcgacaagagcgtgtgtctgttcaccgacttcgacagccagaccaacgtgtcccagagcaaggactccgacgtgtacatcaccgataagaccgtgctggacatgcggagcatggacttcaagagcaactccgccgtggcctggtccaacaagtccgatttcgcctgcgccaacgccttcaacaacagcattatccccgaggacacattcttcccaagccccgagagcagctgcggtaccacaacacctggcgagagaagtagcctgcctgccttctatcctggcaccagcggctcttgttctggctgtggatctctgagcctgcctctgctggctggactggttgctgctgatgctgtggcctctctgctgattgtgggagccgtgttcaggagtaagaggagcaggctcctgcacagtgactacatgaacatgactccacgccgccccggacccacccgcaagcattaccagccctatgccccaccacgcgacttcgcagcctatcgctccctgtgcgccagacctagaagaagccccgctcaagaggacggcaaggtgtacatcaacatgcccggcagaggataa

SEQ ID NO: 2348 - DNA, 2130 bp, synthetic construct
  source 1..2130: mol_type = other DNA
atggccttaccagtgaccgccttgctcctgccgctggccttgctgctccacgccgccaggccggaattcgatggcggcattacacagagccccaagtacctgttcagaaaagagggccagaacgtcaccctgagctgcgagcagaacctgaaccacgacgccatgtactggtacagacaggacccaggccagggcctgagactgatctactactcttgggctcagggcgacttccagaagggcgatattgccgagggctacagcgtgtccagagagaagaaagagtcctttccactgaccgtgacaagcgcccagaagaaccctaccgccttctacctgtgtgccagctcttggggagccccttacgagcagtatttcggccctggcaccagactgacagttctcgaggacctgaagaacgtgttcccacctgaggtggccgtgttcgagcctagcgaggccgagatcagccacacccagaaagccaccctcgtgtgcctggctaccggcttctaccccgaccatgtggaactgtcttggtgggtcaacggcaaagaggtgcacagcggcgtgtctaccgacccccagccactgaaagaacagcccgccctgaacgacagccggtactgcctgagcagcagactgagagtgtccgccaccttctggcagaacccccggaaccacttcagatgccaggtgcagttctacggcctgagcgagaacgacgagtggacccaggacagagccaagcccgtgacccagatcgtgtctgccgaagcctggggcagagccgattgcggatccacaacacctggcgagagaagtagcctgcctgccttctatcctggcaccagcggctcttgttctggctgtggatctctgagcctgcctctgctggctggactggttgctgctgatgctgtggcctctctgctgattgtgggagccgtgttcctgtgcgccagacctagaagaagccccgctcaagaggacggcaaggtgtacatcaacatgcccggcagaggaagggccaagcgatctggatctggagcaacaaacttctcactactcaaacaagcaggtgacgtggaggagaatcccgggcctactagtatggactggatttggcgcatccttttccttgtcggcgctgctaccggcgcgcattccttcgaacaacaaggcgaagaagatccccaggctctgagcatccaagagggcgagaatgccaccatgaactgctcctacaagaccagcatcaacaacctccagtggtacaggcagaacagcggcagaggactggtgcacctgatcctgatccggtccaacgagagagagaagcactccggcagactgagagtgaccctggacaccagcaagaagtccagcagcctgctgattaccgccagcagagccgccgatacagccagctacttttgtgccaccgacggcgatacccctctggtgtttggcaagggcacaagactgagcgtgatcgccaatacgcgtatccagaaccctgatcctgccgtgtaccagctgcgggatagcaagagcagcgacaagagcgtgtgtctgttcaccgacttcgacagccagaccaacgtgtcccagagcaaggactccgacgtgtacatcaccgataagaccgtgctggacatgcggagcatggacttcaagagcaactccgccgtggcctggtccaacaagtccgatttcgcctgcgccaacgccttcaacaacagcattatccccgaggacacattcttcccaagccccgagagcagctgcggtaccacaacacctggcgagagaagtagcctgcctgccttctatcctggcaccagcggctcttgttctggctgtggatctctgagcctgcctctgctggctggactggttgctgctgatgctgtggcctctctgctgattgtgggagccgtgttcagggaccaaagactgcctcctgacgctcacaaacctccaggcggaggcagcttcagaacccctatccaagaggaacaggctgacgcccacagcaccctggcaaaaattctgtgcgccagacctagaagaagccccgctcaagaggacggcaaggtgtacatcaacatgcccggcagaggataa

SEQ ID NO: 2349 - DNA, 2382 bp, synthetic construct
  source 1..2382: mol_type = other DNA
atggccttaccagtgaccgccttgctcctgccgctggccttgctgctccacgccgccaggccggaattcgatggcggcattacacagagccccaagtacctgttcagaaaagagggccagaacgtcaccctgagctgcgagcagaacctgaaccacgacgccatgtactggtacagacaggacccaggccagggcctgagactgatctactactcttgggctcagggcgacttccagaagggcgatattgccgagggctacagcgtgtccagagagaagaaagagtcctttccactgaccgtgacaagcgcccagaagaaccctaccgccttctacctgtgtgccagctcttggggagccccttacgagcagtatttcggccctggcaccagactgacagttctcgaggacctgaagaacgtgttcccacctgaggtggccgtgttcgagcctagcgaggccgagatcagccacacccagaaagccaccctcgtgtgcctggctaccggcttctaccccgaccatgtggaactgtcttggtgggtcaacggcaaagaggtgcacagcggcgtgtctaccgacccccagccactgaaagaacagcccgccctgaacgacagccggtactgcctgagcagcagactgagagtgtccgccaccttctggcagaacccccggaaccacttcagatgccaggtgcagttctacggcctgagcgagaacgacgagtggacccaggacagagccaagcccgtgacccagatcgtgtctgccgaagcctggggcagagccgattgcggatccacaacacctggcgagagaagtagcctgcctgccttctatcctggcaccagcggctcttgttctggctgtggatctctgagcctgcctctgctggctggactggttgctgctgatgctgtggcctctctgctgattgtgggagccgtgttcctgtgcgccagacctagaagaagccccgctcaagaggacggcaaggtgtacatcaacatgcccggcagaggaagggccaagcgatctggatctggagcaacaaacttctcactactcaaacaagcaggtgacgtggaggagaatcccgggcctactagtatggactggatttggcgcatccttttccttgtcggcgctgctaccggcgcgcattccttcgaacaacaaggcgaagaagatccccaggctctgagcatccaagagggcgagaatgccaccatgaactgctcctacaagaccagcatcaacaacctccagtggtacaggcagaacagcggcagaggactggtgcacctgatcctgatccggtccaacgagagagagaagcactccggcagactgagagtgaccctggacaccagcaagaagtccagcagcctgctgattaccgccagcagagccgccgatacagccagctacttttgtgccaccgacggcgatacccctctggtgtttggcaagggcacaagactgagcgtgatcgccaatacgcgtatccagaaccctgatcctgccgtgtaccagctgcgggatagcaagagcagcgacaagagcgtgtgtctgttcaccgacttcgacagccagaccaacgtgtcccagagcaaggactccgacgtgtacatcaccgataagaccgtgctggacatgcggagcatggacttcaagagcaactccgccgtggcctggtccaacaagtccgatttcgcctgcgccaacgccttcaacaacagcattatccccgaggacacattcttcccaagccccgagagcagctgcggtaccacaacacctggcgagagaagtagcctgcctgccttctatcctggcaccagcggctcttgttctggctgtggatctctgagcctgcctctgctggctggactggttgctgctgatgctgtggcctctctgctgattgtgggagccgtgttctggcggcggaagcggaaagagaagcagtctgagacaagccccaaagagttcctgaccatctacgaggacgtgaaggacctgaaaacccggcggaaccacgaacaagagcagacctttcctggcggaggcagcaccatctacagcatgatccagagccagagcagcgcccctacaagccaagagcctgcctacacactgtactccctgatccagcctagcagaaagagcggcagccggaagagaaatcacagccccagcttcaacagcacgatctacgaagtgatcggcaagagccagccaaaggctcagaaccctgccagactgagccggaaagagctggaaaacttcgacgtgtacagcctgtgcgccagacctagaagaagccccgctcaagaggacggcaaggtgtacatcaacatgcccggcagaggataa

SEQ ID NO: 2350 - DNA, 2235 bp, synthetic construct
  source 1..2235: mol_type = other DNA
atggccttaccagtgaccgccttgctcctgccgctggccttgctgctccacgccgccaggccggaattcgatggcggcattacacagagccccaagtacctgttcagaaaagagggccagaacgtcaccctgagctgcgagcagaacctgaaccacgacgccatgtactggtacagacaggacccaggccagggcctgagactgatctactactcttgggctcagggcgacttccagaagggcgatattgccgagggctacagcgtgtccagagagaagaaagagtcctttccactgaccgtgacaagcgcccagaagaaccctaccgccttctacctgtgtgccagctcttggggagccccttacgagcagtatttcggccctggcaccagactgacagttctcgaggacctgaagaacgtgttcccacctgaggtggccgtgttcgagcctagcgaggccgagatcagccacacccagaaagccaccctcgtgtgcctggctaccggcttctaccccgaccatgtggaactgtcttggtgggtcaacggcaaagaggtgcacagcggcgtgtctaccgacccccagccactgaaagaacagcccgccctgaacgacagccggtactgcctgagcagcagactgagagtgtccgccaccttctggcagaacccccggaaccacttcagatgccaggtgcagttctacggcctgagcgagaacgacgagtggacccaggacagagccaagcccgtgacccagatcgtgtctgccgaagcctggggcagagccgattgcggatccctgggagagcctcagctgtgctatatcctggacgccatcctgtttctgtacggcatcgtgctgaccctgctgtactgcaaacggggcagaaagaaactcctgtatatattcaaacaaccatttatgagaccagtacaaactactcaagaggaagatggctgtagctgccgatttccagaagaagaagaaggaggatgtgaactgcggctgaagatccaagtgcggaaggccgccatcaccagctacgagaaatccgacggcgtgtacaccggcctgagcaccagaaatcaagagacatacgagacactgaagcacgaaaagcctccacaaagggccaagcgatctggatctggagcaacaaacttctcactactcaaacaagcaggtgacgtggaggagaatcccgggcctactagtatggactggatttggcgcatccttttccttgtcggcgctgctaccggcgcgcattccttcgaacaacaaggcgaagaagatccccaggctctgagcatccaagagggcgagaatgccaccatgaactgctcctacaagaccagcatcaacaacctccagtggtacaggcagaacagcggcagaggactggtgcacctgatcctgatccggtccaacgagagagagaagcactccggcagactgagagtgaccctggacaccagcaagaagtccagcagcctgctgattaccgccagcagagccgccgatacagccagctacttttgtgccaccgacggcgatacccctctggtgtttggcaagggcacaagactgagcgtgatcgccaatacgcgtatccagaaccctgatcctgccgtgtaccagctgcgggatagcaagagcagcgacaagagcgtgtgtctgttcaccgacttcgacagccagaccaacgtgtcccagagcaaggactccgacgtgtacatcaccgataagaccgtgctggacatgcggagcatggacttcaagagcaactccgccgtggcctggtccaacaagtccgatttcgcctgcgccaacgccttcaacaacagcattatccccgaggacacattcttcccaagccccgagagcagctgcggtaccctgggagagcctcagctgtgctatatcctggacgccatcctgtttctgtacggcatcgtgctgaccctgctgtactgcaggagtaagaggagcaggctcctgcacagtgactacatgaacatgactccacgccgccccggacccacccgcaagcattaccagccctatgccccaccacgcgacttcgcagcctatcgctcccggctgaagatccaagtgcggaaggccgccatcaccagctacgagaaatccgacggcgtgtacaccggcctgagcaccagaaatcaagagacatacgagacactgaagcacgaaaagcctccacaataa

SEQ ID NO: 2351 - DNA, 2220 bp, synthetic construct
  source 1..2220: mol_type = other DNA
atggccttaccagtgaccgccttgctcctgccgctggccttgctgctccacgccgccaggccggaattcgatggcggcattacacagagccccaagtacctgttcagaaaagagggccagaacgtcaccctgagctgcgagcagaacctgaaccacgacgccatgtactggtacagacaggacccaggccagggcctgagactgatctactactcttgggctcagggcgacttccagaagggcgatattgccgagggctacagcgtgtccagagagaagaaagagtcctttccactgaccgtgacaagcgcccagaagaaccctaccgccttctacctgtgtgccagctcttggggagccccttacgagcagtatttcggccctggcaccagactgacagttctcgaggacctgaagaacgtgttcccacctgaggtggccgtgttcgagcctagcgaggccgagatcagccacacccagaaagccaccctcgtgtgcctggctaccggcttctaccccgaccatgtggaactgtcttggtgggtcaacggcaaagaggtgcacagcggcgtgtctaccgacccccagccactgaaagaacagcccgccctgaacgacagccggtactgcctgagcagcagactgagagtgtccgccaccttctggcagaacccccggaaccacttcagatgccaggtgcagttctacggcctgagcgagaacgacgagtggacccaggacagagccaagcccgtgacccagatcgtgtctgccgaagcctggggcagagccgattgcggatccctgggagagcctcagctgtgctatatcctggacgccatcctgtttctgtacggcatcgtgctgaccctgctgtactgcaaacggggcagaaagaaactcctgtatatattcaaacaaccatttatgagaccagtacaaactactcaagaggaagatggctgtagctgccgatttccagaagaagaagaaggaggatgtgaactgcggctgaagatccaagtgcggaaggccgccatcaccagctacgagaaatccgacggcgtgtacaccggcctgagcaccagaaatcaagagacatacgagacactgaagcacgaaaagcctccacaaagggccaagcgatctggatctggagcaacaaacttctcactactcaaacaagcaggtgacgtggaggagaatcccgggcctactagtatggactggatttggcgcatccttttccttgtcggcgctgctaccggcgcgcattccttcgaacaacaaggcgaagaagatccccaggctctgagcatccaagagggcgagaatgccaccatgaactgctcctacaagaccagcatcaacaacctccagtggtacaggcagaacagcggcagaggactggtgcacctgatcctgatccggtccaacgagagagagaagcactccggcagactgagagtgaccctggacaccagcaagaagtccagcagcctgctgattaccgccagcagagccgccgatacagccagctacttttgtgccaccgacggcgatacccctctggtgtttggcaagggcacaagactgagcgtgatcgccaatacgcgtatccagaaccctgatcctgccgtgtaccagctgcgggatagcaagagcagcgacaagagcgtgtgtctgttcaccgacttcgacagccagaccaacgtgtcccagagcaaggactccgacgtgtacatcaccgataagaccgtgctggacatgcggagcatggacttcaagagcaactccgccgtggcctggtccaacaagtccgatttcgcctgcgccaacgccttcaacaacagcattatccccgaggacacattcttcccaagccccgagagcagctgcggtaccctgggagagcctcagctgtgctatatcctggacgccatcctgtttctgtacggcatcgtgctgaccctgctgtactgcagggaccaaagactgcctcctgacgctcacaaacctccaggcggaggcagcttcagaacccctatccaagaggaacaggctgacgcccacagcaccctggcaaaaattcggctgaagatccaagtgcggaaggccgccatcaccagctacgagaaatccgacggcgtgtacaccggcctgagcaccagaaatcaagagacatacgagacactgaagcacgaaaagcctccacaataa

SEQ ID NO: 2352 - DNA, 2472 bp, synthetic construct
  source 1..2472: mol_type = other DNA
atggccttaccagtgaccgccttgctcctgccgctggccttgctgctccacgccgccaggccggaattcgatggcggcattacacagagccccaagtacctgttcagaaaagagggccagaacgtcaccctgagctgcgagcagaacctgaaccacgacgccatgtactggtacagacaggacccaggccagggcctgagactgatctactactcttgggctcagggcgacttccagaagggcgatattgccgagggctacagcgtgtccagagagaagaaagagtcctttccactgaccgtgacaagcgcccagaagaaccctaccgccttctacctgtgtgccagctcttggggagccccttacgagcagtatttcggccctggcaccagactgacagttctcgaggacctgaagaacgtgttcccacctgaggtggccgtgttcgagcctagcgaggccgagatcagccacacccagaaagccaccctcgtgtgcctggctaccggcttctaccccgaccatgtggaactgtcttggtgggtcaacggcaaagaggtgcacagcggcgtgtctaccgacccccagccactgaaagaacagcccgccctgaacgacagccggtactgcctgagcagcagactgagagtgtccgccaccttctggcagaacccccggaaccacttcagatgccaggtgcagttctacggcctgagcgagaacgacgagtggacccaggacagagccaagcccgtgacccagatcgtgtctgccgaagcctggggcagagccgattgcggatccctgggagagcctcagctgtgctatatcctggacgccatcctgtttctgtacggcatcgtgctgaccctgctgtactgcaaacggggcagaaagaaactcctgtatatattcaaacaaccatttatgagaccagtacaaactactcaagaggaagatggctgtagctgccgatttccagaagaagaagaaggaggatgtgaactgcggctgaagatccaagtgcggaaggccgccatcaccagctacgagaaatccgacggcgtgtacaccggcctgagcaccagaaatcaagagacatacgagacactgaagcacgaaaagcctccacaaagggccaagcgatctggatctggagcaacaaacttctcactactcaaacaagcaggtgacgtggaggagaatcccgggcctactagtatggactggatttggcgcatccttttccttgtcggcgctgctaccggcgcgcattccttcgaacaacaaggcgaagaagatccccaggctctgagcatccaagagggcgagaatgccaccatgaactgctcctacaagaccagcatcaacaacctccagtggtacaggcagaacagcggcagaggactggtgcacctgatcctgatccggtccaacgagagagagaagcactccggcagactgagagtgaccctggacaccagcaagaagtccagcagcctgctgattaccgccagcagagccgccgatacagccagctacttttgtgccaccgacggcgatacccctctggtgtttggcaagggcacaagactgagcgtgatcgccaatacgcgtatccagaaccctgatcctgccgtgtaccagctgcgggatagcaagagcagcgacaagagcgtgtgtctgttcaccgacttcgacagccagaccaacgtgtcccagagcaaggactccgacgtgtacatcaccgataagaccgtgctggacatgcggagcatggacttcaagagcaactccgccgtggcctggtccaacaagtccgatttcgcctgcgccaacgccttcaacaacagcattatccccgaggacacattcttcccaagccccgagagcagctgcggtaccctgggagagcctcagctgtgctatatcctggacgccatcctgtttctgtacggcatcgtgctgaccctgctgtactgctggcggcggaagcggaaagagaagcagtctgagacaagccccaaagagttcctgaccatctacgaggacgtgaaggacctgaaaacccggcggaaccacgaacaagagcagacctttcctggcggaggcagcaccatctacagcatgatccagagccagagcagcgcccctacaagccaagagcctgcctacacactgtactccctgatccagcctagcagaaagagcggcagccggaagagaaatcacagccccagcttcaacagcacgatctacgaagtgatcggcaagagccagccaaaggctcagaaccctgccagactgagccggaaagagctggaaaacttcgacgtgtacagccggctgaagatccaagtgcggaaggccgccatcaccagctacgagaaatccgacggcgtgtacaccggcctgagcaccagaaatcaagagacatacgagacactgaagcacgaaaagcctccacaataa

SEQ ID NO: 2353 - DNA, 2238 bp, synthetic construct
  source 1..2238: mol_type = other DNA
atggccttaccagtgaccgccttgctcctgccgctggccttgctgctccacgccgccaggccggaattcgatggcggcattacacagagccccaagtacctgttcagaaaagagggccagaacgtcaccctgagctgcgagcagaacctgaaccacgacgccatgtactggtacagacaggacccaggccagggcctgagactgatctactactcttgggctcagggcgacttccagaagggcgatattgccgagggctacagcgtgtccagagagaagaaagagtcctttccactgaccgtgacaagcgcccagaagaaccctaccgccttctacctgtgtgccagctcttggggagccccttacgagcagtatttcggccctggcaccagactgacagttctcgaggacctgaagaacgtgttcccacctgaggtggccgtgttcgagcctagcgaggccgagatcagccacacccagaaagccaccctcgtgtgcctggctaccggcttctaccccgaccatgtggaactgtcttggtgggtcaacggcaaagaggtgcacagcggcgtgtctaccgacccccagccactgaaagaacagcccgccctgaacgacagccggtactgcctgagcagcagactgagagtgtccgccaccttctggcagaacccccggaaccacttcagatgccaggtgcagttctacggcctgagcgagaacgacgagtggacccaggacagagccaagcccgtgacccagatcgtgtctgccgaagcctggggcagagccgattgcggatccctgggagagcctcagctgtgctatatcctggacgccatcctgtttctgtacggcatcgtgctgaccctgctgtactgcaaacggggcagaaagaaactcctgtatatattcaaacaaccatttatgagaccagtacaaactactcaagaggaagatggctgtagctgccgatttccagaagaagaagaaggaggatgtgaactgcggctgaagatccaagtgcggaaggccgccatcaccagctacgagaaatccgacggcgtgtacaccggcctgagcaccagaaatcaagagacatacgagacactgaagcacgaaaagcctccacaaagggccaagcgatctggatctggagcaacaaacttctcactactcaaacaagcaggtgacgtggaggagaatcccgggcctactagtatggactggatttggcgcatccttttccttgtcggcgctgctaccggcgcgcattccttcgaacaacaaggcgaagaagatccccaggctctgagcatccaagagggcgagaatgccaccatgaactgctcctacaagaccagcatcaacaacctccagtggtacaggcagaacagcggcagaggactggtgcacctgatcctgatccggtccaacgagagagagaagcactccggcagactgagagtgaccctggacaccagcaagaagtccagcagcctgctgattaccgccagcagagccgccgatacagccagctacttttgtgccaccgacggcgatacccctctggtgtttggcaagggcacaagactgagcgtgatcgccaatacgcgtatccagaaccctgatcctgccgtgtaccagctgcgggatagcaagagcagcgacaagagcgtgtgtctgttcaccgacttcgacagccagaccaacgtgtcccagagcaaggactccgacgtgtacatcaccgataagaccgtgctggacatgcggagcatggacttcaagagcaactccgccgtggcctggtccaacaagtccgatttcgcctgcgccaacgccttcaacaacagcattatccccgaggacacattcttcccaagccccgagagcagctgcggtaccctcggagaaccacagctctgttacattctggatgctatcctgttcctctatgggatcgtcctgacactcctgtattgcaagagaggccggaagaagctgctgtacatcttcaagcagcctttcatgcggcccgtgcagaccacccaggaagaggacggctgctcctgccggttccccgaggaagaagaaggcggctgcgagctgagactcaaaattcaagttcgcaaagccgccattacctcttacgagaagagtgatggggtgtacacaggactgtctacccggaatcaagaaacctacgaaaccctcaaacatgagaagccacctcagtaa

SEQ ID NO: 2354 - DNA, 2235 bp, synthetic construct
  source 1..2235: mol_type = other DNA
atggccttaccagtgaccgccttgctcctgccgctggccttgctgctccacgccgccaggccggaattcgatggcggcattacacagagccccaagtacctgttcagaaaagagggccagaacgtcaccctgagctgcgagcagaacctgaaccacgacgccatgtactggtacagacaggacccaggccagggcctgagactgatctactactcttgggctcagggcgacttccagaagggcgatattgccgagggctacagcgtgtccagagagaagaaagagtcctttccactgaccgtgacaagcgcccagaagaaccctaccgccttctacctgtgtgccagctcttggggagccccttacgagcagtatttcggccctggcaccagactgacagttctcgaggacctgaagaacgtgttcccacctgaggtggccgtgttcgagcctagcgaggccgagatcagccacacccagaaagccaccctcgtgtgcctggctaccggcttctaccccgaccatgtggaactgtcttggtgggtcaacggcaaagaggtgcacagcggcgtgtctaccgacccccagccactgaaagaacagcccgccctgaacgacagccggtactgcctgagcagcagactgagagtgtccgccaccttctggcagaacccccggaaccacttcagatgccaggtgcagttctacggcctgagcgagaacgacgagtggacccaggacagagccaagcccgtgacccagatcgtgtctgccgaagcctggggcagagccgattgcggatccctgggagagcctcagctgtgctatatcctggacgccatcctgtttctgtacggcatcgtgctgaccctgctgtactgcaaacggggcagaaagaaactcctgtatatattcaaacaaccatttatgagaccagtacaaactactcaagaggaagatggctgtagctgccgatttccagaagaagaagaaggaggatgtgaactgcggctgaagatccaagtgcggaaggccgccatcaccagctacgagaaatccgacggcgtgtacaccggcctgagcaccagaaatcaagagacatacgagacactgaagcacgaaaagcctccacaaagggccaagcgatctggatctggagcaacaaacttctcactactcaaacaagcaggtgacgtggaggagaatcccgggcctactagtatggactggatttggcgcatccttttccttgtcggcgctgctaccggcgcgcattccttcgaacaacaaggcgaagaagatccccaggctctgagcatccaagagggcgagaatgccaccatgaactgctcctacaagaccagcatcaacaacctccagtggtacaggcagaacagcggcagaggactggtgcacctgatcctgatccggtccaacgagagagagaagcactccggcagactgagagtgaccctggacaccagcaagaagtccagcagcctgctgattaccgccagcagagccgccgatacagccagctacttttgtgccaccgacggcgatacccctctggtgtttggcaagggcacaagactgagcgtgatcgccaatacgcgtatccagaaccctgatcctgccgtgtaccagctgcgggatagcaagagcagcgacaagagcgtgtgtctgttcaccgacttcgacagccagaccaacgtgtcccagagcaaggactccgacgtgtacatcaccgataagaccgtgctggacatgcggagcatggacttcaagagcaactccgccgtggcctggtccaacaagtccgatttcgcctgcgccaacgccttcaacaacagcattatccccgaggacacattcttcccaagccccgagagcagctgcggtaccctcggagaaccacagctctgttacattctggatgctatcctgttcctctatgggatcgtcctgacactcctgtattgcaggagcaagcggtcacggctgctccacagcgattacatgaatatgacaccacgaagaccgggtcctactcgcaaacactaccaaccctacgcacctccccgcgactttgcagcgtaccgatctagactcaaaattcaagttcgcaaagccgccattacctcttacgagaagagtgatggggtgtacacaggactgtctacccggaatcaagaaacctacgaaaccctcaaacatgagaagccacctcagtaa

(The sequence listing continues in the following parts.)